United States Patent Application Publication US 2026/0191916 A1 - sequence listing, part 64

SEQ ID NO: 337 - DNA, 1062657 bp, Flavonifractor plautii
  source 1..1062657: mol_type = genomic DNA
cgccccccggcggccccggcggcgggcggagagatcgtactccaggttggaatagccccgggcggcctctcccaccgccgccgccgcccgcggactgagaggggcccggcccaggttggtgtggagcaccacgccggtggcgttgatcacccgccccaatgcgggccgggccagctccgcgccccggcggaggacggactgctccagctcatccaggccggggacggcagacagcgccccggcgcgcagggcggcgcggtactcgtccagcacctggcgggccgcctgccgccgcagggcgtagggcagggggctgcccgccagggcggggcgggcgagaagcagatccattttgggcagcgcacgcagcagttccggcttcacagagatccctcccgggtgtcatttggctagagtatatcacattttttcagacgatggggtataaactgcatggttttcagaaaaatgggtacaaaatacggtaagacaaggaaacattttcattgacaggacacttaccaaacggttatgattggagaggtcaaaaagcaaccgattccggcctgccccgcctcggggccgggccgatacagaaagggacagagagcagatgagaggtgtcgaaacccgtatccaggagatccgccaccgggtgttccgggaggtggcccgcatggcttaccacacggagtggccggtggacaagcgcattgagagcctgccttacaagatcatcccgggcgaggtgggcaacttccgcaacgacgtgtttttggagcgggccatcgtgggcgagcggctgcggctggccatgggcctgccctgccggagcgcggcggagcacgccccgctctcggagaatatcgaggcggccgaccggccggagacctactacacccctccgctcatcaacgtcattaagtttgcctgcaacggctgcgcggagaagcgggtgctggtgaccgagggctgccagggctgcctggcccacccctgcgaggaggtctgccccaaggacgccatcaagctggaccgctacaacggccgctcccacatcgaccccggcaagtgcatcaactgcggccgctgcgccgacgtgtgctcctacaaggccattatcattcaggagcggccctgcgccgtggcctgcggaatggacgccattggaaccgacgccaatggcaaggccgagatcgacccggacaagtgcgtctcctgcggcatgtgcctggtaaactgccccttcggcgccattgccgacaagtcccagatcttccaggtcatccgggccatccagtccggcgagcgggtttacgccgcggtggcccccgccttcgtgggccagttcggccccaaggtgacccccggcaagctccgcgccgccgtgaagcagctcggctttgccgatgtctttgaggtggccatcggcgccgacctctgtgccacacaggaggcggaggacttcgtccgggaggtgccggaggagctgcccttcatgggcacgtcctgctgcccggcgtggtcggtcatggccaagaagctccaccccgaccacgcccactgcatctccatggccctcacccccatgaccctcaccgcccgcctcatcaagcacgagcatcccaacgccaaggtggtgttcatcggcccctgcgcggccaagaagctggaggccatgcgcaagagcgtgcgcagcgaggtggacttcgtgctcacctttgaggagatggcggggatctttgcggccaagcatgtggatctgaccaccatcgaggaggatccggacggcgtcaacgatgcctctaccgacgggcgcagcttcgccgtgggcggcggcgtggccaaggcagtggtcaacgttatccagcaccgctaccccggccgggaggtcaaggtgaccagctcccagggcctgcgggagtgccgcaagatgatgcaggaggcggtggcaggcaagtaccccggctatctgctggagggcatggcctgtcccggcggctgcgtggccggcgccggtaccatgcagcccatcaagaagtcccaggccgccgttggcctttacgcccggcaggccaagcacaagacctccgacgaaaccgagcacatcaaggagctggacaagctggtggactgagcagagcaaaacgaacccccggaaccgcgtcggttccgggggttcgtttattccttgcaggccagacgcttgtgcacatcccggcggagcagggcgtagagcaccgaggccacgggcacgctgagcagcacgcccaccaggccgcccacgccgccgccgatggtgacggcggccagcacccagatgccgggcaggccgatggaggtgcccaccaccttgggatagatgacgttgccctcaatctgctggaggatcaccagaaagaccaggaagaccagggccttgatgggggagaccatcaccagcagcagggcggacacaatggccccgatgtaggcgcccgccaccgggatgatggcggaggcgccgatgatgacgccgatgagaggggcgtagtcggcctggatgaagagcatccccgccgcgcacagcccgcccaggatacaggcctcaatgagctgcccggtgacgaagcgggtgaaggtgtcggccgtcaggtggaccacatcggtgagggggtcggcaaaccgggcggggacataggcccgcagcacccggcggcactggctcatgagggtgtccctgccggagagcatatagatggagaatactagggagagcaccccggtgaccaccatggagacgatgccgctggtgagctccagcaggtgggggcccaggtcggacaggaagcccagcacgtagttgaacaggtttttgagcacatcgttcaggccggacaggtccagcgcctccacatccaggtggaagtaggcgatgatatcgttgtaccagccctggacgttggccaggtagccccccaggttgagggcgaaggtctggatgctctccaccagcttgggcaccacaaaggaaaagatggcggcgatggccagaatcagcaccagataggaggtgaccaccgccagggggcgggccgcccccctggcccgggtgcgggacagccctcgatcatagaggcggaaaaagaagtggcagggccggttgaggacgaaggccagtgcgaagccgatgagcaacggcttaaccagccccagcacccacgccaccccgctggcgatcaggcccaggcggctgagtaccatcaccagtaccaccgtataggtgatgaggagcagaatgcttttgaacagctttttatccatgctatctcccaatttcatataatctgcctccactatagcattggcgggcggggccagtcaacggaatccgggcgatttaagcaaagtttaatgaaatgttccgcctccataaaaatttccttgacaaaggggcctggcaggcctataatcatagtaaacatataggaattaagaagttttgaaaggagcgtctctatgtcgcacttcatttacgcggaccatgcggccaccacggccgtctccgataccgccctccaggccatgctcccccacttcaccacggcctacggcaacccctccagcctgtaccgctttgcccaggagggcaagaccgacctggagcgggcgcgggcggagatcgccgcctgcctcaacgcccggccggaggagatctacttcacctccggcggtacggaggcggataactgggccctgcggggggtggccgagctcatggccctgaaggggcggaagggcggccacatcatcacctccgccatcgagcaccacgccgtcctccacaccgcccagtatctggagaagcagggctatgaggtcacctacctgccggtggacgggcgggggctggtggatcccgccgccctggagggggcgatccggccggacaccattcttatctccatcatggccgccaacaacgagatcggcaccatagagcctgtcgccgagctgggccgcatcgcccgggcccacaaggtgctctttcacaccgacgcggtgcaggccgtgggccatatccccgtggacgtggaagcgtggaatgtggatctgctctccctgtccgcccacaagttccgcggccccaagggagtgggcgccctgtacgtgaaaaagcccctgcgcctgcccgcgctcatccagggcggcggccaggagaagggccgccgctccggcaccgagaacgtccccggcgcggtgggtatggccgccgccctgcgggaggcggtggacggcctgagccgggagtccccccgcctggccgccctgcgggacaggctcatcgacggcctgaccgggcttccctacacccgcctcaccggcgacccggtgaaccgcctgcccggcaccgcctcctttgtctttgaaggggtggagggagaggccctgctgctccacctggacgccaggggcatctgcgcctcctccggctcggcctgttcttctgcgtccctggacccctcccacgtgctgctggccatcggcctgcctcacgccattgcccacggctccctgcggctctccctgggcgcggagaataccgaggcggacgtggactacattttgaaggaagtgccccaggtggtggcgtatctccgggagctgtcccccgtatgggaccgggacgcacagaagcccacctgggagctgtaactggaaaggagaaactgctatgctgtattccgataaggtgatggaccactttgagcaccccaggaacgtgggggagatagaacatgccgacggggtgggccaagtgggcaaccccaagtgcggcgacatcatgaagatgtacctgaagatcgacggggacgtgatcaccgacgtgaagttcaagacctttggctgcggctcggccatcgccacctcctccatggccaccgagatgatcaagggaaagaccatcgcggaggccatgaccctgaccaacgccgccgtggcggaggctctggacggcctgcccgcctacaagatgcactgctccgttctggcggaggaggccatcaaggccgccctggccgactactaccgccgccagggccgggaggtgcccgaagccctccgcctgccctgtgaggatgaggagcacggctgctgctcctgcggccactgagccaggacacgcaaggccccggaatcgaagcggttccggggcttttttcttgacagagggcggggcttgtcataaaataggacggaactttgtgagaaataagggagtatgggtccgtgatcgagttaaaacacatttccaagacctttcccacggccgacggcgtgtttcaagccctggacgacatcaatctgaccatccgggacggggacatcttcggcatcgtgggcatgagcggcgcgggcaagtccaccctggtgcgctgcatcaacctgctggagcgccctacagcgggccaggtggtcatcgacggacaggatctcatggagctgtccgccccccagctgcgggagaagcgccgctccatcagcatgatcttccagcagttcaacctgctcatgcagcgcacctgcctgggcaacatctgcttccccatggagatcgccggggtgcccaagggggaggcgcgcaagcgcgccctggagtatctggacatcgtgggcctgcccgacaaggccaacgcctacccggcccagctctccggtggacagaagcagcgcatcgccatcgcccgcgccctggcctccaatcccaaggtgctgctgtgcgacgaggccacctccgccctggaccccaccaccacccgcagcatcctcaggctgatccaggacatcaaccggcgcatgggcatcaccgccgtgatcattacccacgagatggcggtggtggaggagatctgctcccacgtggccatcctggagcgcggccgcatggtggagaccggcacagtggaggcggtgttctccaaccctcagaccgaggcaggccgccggctggtgttcccggagggggccaacatcgacaagtttcccgtggcgggcgtggtgcgggtggtgttcaacggcggctcctcctacgagcccctcatcgcctccctggccatcgactgcggcgtgaaggtgaacatactgggggccgacacccgcaacgtaaacggcaaggccttcggctccatgctgctgggcctgcccgaggatcatggagaggctgtccgtgccatgaactatctgaaggcccagaaggacgtcaccgtggaggaggtgcccgactaccatggataaatttatgcagcagatgcgcgaggcctttgccaacgaggccctgtggaaggagttccagactggtatctgggacaccatctactccaccgtggcggccactctggtggcctgcgtcctgggcattatcctgggcattatcctggtggcgggggaggaggacggcgtgcgccccctgcccggcccggtgatgaaggtgctcaactttgccatcaacatcctgcgctcggtgcccttcctgatcctgatgatcatggtgcttcccctgagtgagctcctggtaggtaccaccatcggcactgtggcctccatccctcccctgattatcgcctcggcctccttcgtggcccggctggtggagacctccctgcgggaggtggacaagggggtcatcgaggccgcccagtccatgggctgctcccccttccagatcatctggaaggtgattttgccggagagcctgccctccctggtggccagcttcaccaccgcatttatcaccattctgggctacggcgccatggctggcgccatcggcggcggcggcctgggcaagattgccatcaactacggctattataaatacaactatgcggtgatgctcatcgccgtggtctttattgtggttttggtgcagattttccagtcactgggtacctccctggccacccggacggaccaccgcatcaccaaccgggctgggcgaagaaagctccgccggaacgtcagccggcagatgaaccgggacaagcgcagccccggcggcatgtgaattttggagggggcggcaaagcagttgctttgccgccccctcttttttgtgcagaatatgcgattgacaggagcgccttccggttgtaaactaagtgcaacccaagcggaactgaataacgcccctcaaacgcgaggaagagaagagtagccagagagatacggcacagagagcccggaatggtggaaacgggtacggaaggctttggggaagatggtctcggagcggcgcggctgactgccacaggcacaggccgcgacgggagcgcccgtcagcgcgcgggagtatgccagtactccataaggcccctgtcgtgaggcaggggtgaagcaaggtggtaccacgaagccggaaggctctcgtccttgaatttggattcaagggcgtttttttgtgctctgatttgggaataccacctccctttgaggaacaatgaaaaggagaaatgcaccatgaagaagctcgcatccctgctcctgtccggcgccctggccctcggcctgctggccggctgcggcggcacccccggtaccgccgacacccccgccgcaaacactgacacccctgccgcccccacccagaccggctccctggagggcaccaccctgaaggtgggcgcctctcccgctccccacgccgagatcctggccgtggtgaaggaactgctggcggaggagggaatcaacctggagatcgtggagtttaccgactacatccagcccaacaccgcggtggagaacggcagcattgacgccaactacttccagcacatcacctatctgaacaacttcaacgctgagaatggcacccacctggtgagcgtggcagatgtgcactacgagcccttcggcatctacgccggcaagaccgccagcctggaggagctccaggacggcgcgcagatcggcgtgcccaacgaccccaccaacggcggccgcgccctgctgctcctccaggagcagggcctcatcactttgaaggaggatgtgggcctggagcccaccaagctggacatcgcggagaacccccacaactatgagatcgtggagatggaggccgcccagctcccccgctccctgggcagcctggacattgccgtcatcaacggcaactacgccatccaggccgatctgaaggtggccgacgccctggcgattgagtccgccgagggcaccgccggcaccgcttatgtcaatgtgctggccgtcaaggagggccgggagagcgaccccgccatccaggctctggcaaaggccctgtgcagcgacgaggtcaaggcgttcattgacgagacctatgccggcgccgtgcaggcggtgttctaaggtcctgtccacacagacggcccgctttgcgggccgtctcatccgactaaaatcctattgattttgtaggaatttggtggtatactgctgaatagaatctaaattatgagggaggtattacctatgcagattgcaaatacactgcccgagctgatcgggaacacccccctgcttcggctggagcggtttgcccccggggcaggggtgctggccaagctggagagctttaaccccctgtcctccgccaaggaccgggcaggcctttacatgattttggacgccgaggagaggggcctgctccagcccggcgcggtgattgtggagcccaccagcggcaacaccggcgtggccctggcctacatcggccgccagcggggctaccgggtggtgctcaccatgccggagaccatgagtcaggagcggcgcagcctgctggccgctctgggggcggagctggtgctcaccgaaggggcccggggtatgggcggcgccattgagcgggcgaaggagctgctggagagcaccccaggcgcgtggatgcccgaccagttcaacaaccccgccaacgcccgggcccactacgagaccaccggtcccgagctgtggcgggacaccgacggcggcgtggacgtgctggtggcgggagtgggttccggcggcaccatcactggcgcgggccgctatctgaaggagcagaaccccgccatccgcgtggtggcggtggagccggctgagtcccccgtcctctccggcggccggccggggccccataagatccagggcatcggcgcgggcttcgtccccggcaccctggacatgggggtggtggacgaggtggtggccgtcaccggcgacgaggcctatgccgccgcccgggagctggcccgtaccgagggggtgttggccggggtgtcctccggcgcggcggcccacgcggcccgcatcctggcccagcggccggacatgcggggcaagaccatcgcggtggtgctccccgatactggcgagcgctacctctctacagggctgtttgcgtgaatagagcgcggtggacacaatcggcagcatggctccggccgcaggcgttttgcctgtggccggagccatattatgtatggagctgggcctccagggcggcacggtcggggagcagatagtgctggcgcgtctttttcagcaggccctcccggctcaggctttgaaagcactgggacaccaccacccgggagatgcccagaaaatcggccacctcctggtgggtcagccggatagtgaggcggacccccgccccctcctctgtaccgtatggctctgacacggagagcaggaactgaatgacacgcccccgcacgcttagaaagctgtcgcggatcagcatgcggccaagcacctggctcttccgggcggagatctggaacagcttcagtgccagggcgggagaggcctcggcccgccgtttgaacacctccgccgggatgcggaaaatctgacacgcagtgactgcgacggcccggtattcccgcgggccgccgaacaggcactcgtcctctcccacgggaatcccttcaaagagcaggcagagcacccgctttttcccgctgctgtggatgcactccacccggatctgccctgtttgcagaaaaatcacctcgcgggccgggtcgccctgctgatagaacaccgtgcccgccgggacggtctccgggcgaaagccgtcggtcagtctgtcccacacggtgtcccacggttcatttccaacggcggagaggtgctccggaatccactgcttttcccagcgaagctctttttccaatggtgttcacccttctcccggtttctgcgcgcgcagcccccgcacagattgggaggcggttcgtgcggtttgcacatggatacccaatttattttctttattttcgaagaaaatgacgattttgtaaagtggttaacagaaaattgcggcggggttttctatactgtatcacgttgtgcggcccgcacgctgtggggcctgtcaaatctggtaaaatggaaagggatggagcgaatgaaacgaaggacagcgcacgccctgtgcgcagcgggcctaagcctgtcactgctggccggcttggtgccggccatggccgcaggcccggcggaggtggcggatagcctctacatcaacggcaacatctacaccgtggatgaagacttctccactgccaccactatggcggtgaagggggaccgcatcctgtatgtgggcgaccaagccggtgcggaggcctatgtgggtgcgggaactgagatcaccgacctcggcggcaaaaccgtgctgcccggtctcatcgagggacatatgcatgtcagcaatctgggggaaaaccacctgaagctggactgctactttaaatcgaaggaggatattctggagatggtgcgccaggccgccaaggaggcggagcccggcgagtggatccagggttccggctggctggataccctgtgggatgagcccggcttcccttcaaaggaggaactggacgccgtggcgcccaacaacccggtctatctgctccgggcagacaaccatatgggctggtttaacagcatggcgctggagatggcgggcattaccaaggataccccagagcctcagggcggccagattctcaaaacggacaacggggaactgctgggctgccttaccgacaacgcggcgtcaatggtcatcaaggtaattcctacctggagtgctgaggcacagaaaaacgctgtgctcatggctcaggaggagctgttctcctatggctttacctctgccacggacgcaggcacaaaggtcaactacatccagcactatgaggatctctatgagagcggtgagctgaagctgcgcatttacgccatgcccatgctcaacagcacggacagcgccgaggccggctacatccgggagcaccggccggtcaacggcctgtacgacaaccatctgagtataatgggtgtcaaggtgctgggcgacggtgctctgggctcccgcggctctgctctgctgaaggattactccgacgatccgggcaatcgtggttcctaccgctttacggacgaggagatttacaacgtgatgagcctggcctacaacaacggctatcagatcgcgtaccacgccatcggcgacggtgccaaccaccaggtgctgaacacctacgagcgcctgctgaaggaaaatccccgggaggacccccgcctgcgcattgagcacttccaggtcgttaccccggaggatattgaccgggccctggagctcggcatcctcaccgcgatgcagtttacccatgccacctcggacctgtccatggcggaggaccgcctgggccccgagcgtattcagacggcctacgcctggcgcaccgttctggataagggcggcatcattatcggcggctctgacgcgccggtggagatggtcaaccccttccacggcctgtatgccggtgtcacccgtatgacccgcgccggtgagccggagggcggctggtacgccaaccagaaggtcacccgtgaggaggcgctgcgcgcctttaccatctgggccgcctatggtcagtttgaggaggatctcaagggctctctggagcccggcaagctggccgactttgtagtgatcgaccgggactacatgacctgtcctgaggaggagatcaaggatattcaggccctgatgacagtctccggcggcgaggtggtctataccaaggacaccagcgagcctacgattctctggcaggggaagccggttaccctcctgtctggggcgctgattgagcagcccggcaccatttatgcctccgcctcggatctggcgggcaacatcagcgcggttctggagcggggagagggcactgtgaccgtgacctgcggtgagcagtcggcggagcttcccgtcaagacggtgaatggggcagactacgtccctgttcgtgccttctttgaaggcatcggctatgcggtgacctggtgcccggacagccggacggtatcaacctcccgcatgagcacggcggacacctctgaggctgcggctcagccccctgtggacgagtacagctttcagctcggcaattttgacggcaccgtgggcgccttctgcgatgtaatcatgaccggagccaaggagctggcgttcagtgatccctttgatcccgaggacgaaccccttcttacatcctatgtggcgaaaaagtgcgagggatacggtgtaaagtactacatcgacaaggatcttcttctgaccaagctgttttccactgtggagatggatggtcagtgggtctatatcctctatgccgacgacgcagtgcttcaggagtatctggagctgaagcaggaggagaaagacatgattgcagcaggaacctacacagagaaggcccagatcgacctggctacccggtatggcaagctgatgggctatagcgatgctcatattgctgccagcatcgcaggggcgtaatccagacaatcagagccgccgcactggaaatcagtacggcggctctgatttattttgggctgttctacgcgttatgtccggggcacttctcatgatagcggcgcacgaggtcggccagagtcaggcggtccaccacgctggagacggcggcctgaatgtcccgccacacctctacggtgacgcaccggtcggcccggttgcagcggcaggtatcgtcctgatccacacagctcaccggcgccagattgccctccagcacccgcagaatctcccccacggtgtactcctctggctcacgggtgaggaggtagccgccccccgcgccccggaccgagcgaaccagcccggcccgggagagctgagttacaatctgctccagatatttatcggaaatctcctgccgctgggccacatcccgcagcggaactgccgcgccatggctgtgaagggccacatccagcatgaggcggagcgcataacggcctttcgtggaaattttcatgcacatccctaccttttctgacaaatataataccatggaacaggtaggatttcaagtgaaatttccacttgactttcgcgccaaaaagtgctaaagtgctctacaagaggagcgtgagaggttcatgcgcaggtacgtcggttatggatacggctattaccgctgctattttgccagcggtctgtttgcctgcccataaccggcctgtcaggaatcttccggcgctccgcagttggagccgatggaacccgcggccgcctttgggcggctgcgggttctttgtttgtgaaaggagtcagaatatggttgtcattatgaagcgggagtttaccccggagcagttggaggccgccgtacacaccatggaggagggcggcgtcaaagtcatggtgtccaagggggcggagaccaccatcctgggcgcggagggcaacgccgagcacatcgaccaggagaagctgtccctgctgcccggcgtggagcgggtcatgcgggtcacggagccctataagaaggccaaccggaagtaccacccggaggacacggtgattgagctgtccaatggccgcagcgtgggcgggaaccggctggcggtgatcgccgggccctgctcggtggagagcgaggcgcagattgtgggggtggcccaggcggtaaaggccagcggcgccgccgccctgcggggcggcgccttcaagccccgcacctccccctatgccttccagggtatgggcaacgacggcatccgcctgctccaggaggcaaaggaggccaccggcctgcccatcgtcaccgagatcatgtccaccgacaacgtggagatgttcgagatgtgcgtggacgtgattcaggtgggagcccggaacatgcagaacttcgacctgctcaagcaacttggcaagacctccaagcccatcctgctcaagcggggcctgtcctccaccattgaggagtggctcatgagcgccgagtacatcatggccgggggcaaccaccgggtcatcctctgcgagcggggtatccgcacctttgagacctatacccgcaacaccctggacctctccgccgtgctggcggtgaagcagctctcccacctgccggtggtggtggacccctcccacgcctgcggcaaggcgtggatggtggagcgcatgagtctggcggcggtagccgccggggcggacggcctcatcatcgaggtgcacaacgacccgccccacgccctctgtgacggggcccagtccatcaccccggcccagtttgacaccctcatgggcaggctgaccgccctggccccctgcgtggggcgggagctgtgaccggccctcagtaaagaagaggagtgcgcgatgaaacaaacgatgctgattgtgggcctcggtttaattggcggctcactggcccttgccctgaagggctttgaggatttcgagattgtgggcgtggacgtgtcccagcccaccctgcgctacgccgccgagcacggtgtgggcgaccgtgtgaccgaggacgccgccgccgagctcccccaggccgacgtggtggccctggccctccacccccaggggatcgtggacttcctggcccggtatcgggatgcgttcaagccgggggccctggtgtgggacgtgtgcggcgtcaagaccgctattttggaggcggcccaggtgctgcccggtacagtggattttatcggctgccaccccatggcgggcaccgagttctccggcgtggagcacgcctttgcggagatgttccgggactcccacttcctgctggtgccccgggatgacagcaggccggagcacattgccctgctggagcggctggcggcctatatcggctgcaaggacgtatgccgcaccaccgcccaggcccacgacgccctgatcgcctacaccagccagatgatgcaccttatcgccgtgtcggtgtgcgacgatccggagctctttcagtgcaggggcttcgagggctcctccttccggggctgtacccgggtggcggccctggacgtggggttgtggacacagctcttctccctcaaccagcccgccctgctggcggcggtggaccggctgctggacaacctccagtcctaccgggacgcgctggcctccggaaaccgggcggccctggcggagaagctggcccactccgccgcccgcaagcgggagatggatctgcccgggcccgatctgctggcatgacaaaaaggcgccgctgcattgcagcggcgcctttttgtcacggcttctgaaaaatgttgagatccgccgcggtgagcggcgcgttgtaggggttgatgagggagttgacggtctccagggcggcctccgggtccagctcgtagcaggagccccagcggtagccccggctgtccacatagtagacattctcacccgccagggtggcgctggcaaagcccgtggagaagtccaggcccagggcgggctgggcaaaccagagggcctcgctgaactccagatcagtgtccacatactccaggaagaggttcacgtaagagttgatcttctgcggattggacagggcttttttcagaatggcggcgatgagctgctgctgggtacgggtgcggccgatgtctccgtccggataggcgccgtagaggttgtcggggtaggagccggggccgtcggagttgttgcggcagcgggccaccttgagcacgtcctcgccggtcaggtgctggaggccgggctggtagtggatgtggaggtcctgggtgggatcgtcaaagctcatgcgcaccggtacgtcgaactcgatgccgcccagctcatccaccagggccacaaagccgtccacgtccaccgccacatagtagtcgatgggcacgcccagcaggtcggagacggtatcccgcaggttctccggccccttgtggtaggcggcgttgatcttcccgctctccagcagggtgtcccgggggacggagaccatacccaccttctgagcctcagtgtcgtaggaggccacaatgatggtgtcggcgttgccgctggactggtcgctggcggccagcagaaaagtgtatgtcccttcccgcctctggcggccgggcgcttcggtctgatccggggagagggagccggcgggggcctccggtgtgggctccggggcctgggtgggctttttggaggccaggcgataggcgcagtagagtaccacgatgatggcggacaggaccaccaggatgcgatatgccagcttccccgcccggcggaggggggagatacgcttttttttgcggatgcgacggcgttgggccacagagaggcgcccccttttctcaggtgtgattatgtcaacaagcaaccactagtatataaaatgggaagccgtctgacaagagaaagtttgcaaacttcacgaatctgtaagaactcagaggcggctctggatactcagggttgcggcggtgagcgcgttgacggcccccagcagctccaccagaagctgattttggcaggccagggcctccagaatccggtccagcccgtcggcgggcggcggggtaggacagtcgatgcagtaggggatgggatgggcgtagcgcttcatgggctcctcctccagaggggcgccctccagccgctggcgggccatccggcggccctgggcgatgatggcctgggcctgggactcggcctgggcccgggcatcccggccgggctgacggcagtttgacatggcagttacctcctttttaccccattctatggaaaagcagccccatttgcgcttgacatttggaaaatacgtgctacactaaactgtaccgtatgagacagatttgggggagggagagccaatggacagccgggaagcggccgagcgggcccgattggcggagacctttctcttccggggtgcgccgccggaggcggtggagctcgcccggaccgacccccgcacactccggcaggagaacggtaagggcggggtgatttacgcccctcacgccttccgccgctgcctgggcgtggtgctggagggccgggtgcaggtgaacaagggcgcgctcatcatgagcgtgctggaaccgggggatctcttcggcgcggcggccctgttcaacgaccgggcggactacgccaccaccctcaccgcccgcgcgccctgccgggtgctccttctgccccaggcgctggtggaggagctgatggtccgctttccggaggtggggcgcaactatgtggcctacctgtccggccgcatctgctttctcagcggcaagatcgacgccctcaccgccggcagcgccgagcggaaggtggcccagtacctgctctcccggctggaggggggatgggtggagctggactgctctgccgccggcctggcccggcggctgggggtgagccgcgcctccctctaccgcgccctggacgccctggccgggcggggggttctccggcgggagggcagacgggtgcaggtgcttcagccggacgcgctggaacagaattaggaaaggaagagattgacatgaaacagaagctgctgtccctgggcctgagcctggccctggtgctgggcctggctgcggggtgcgcccccaaggccgggccggaggagtcccccgcgccggagacgtcctcccccgtcgcggaaaccccgccggccgagaccgttgccccttaccagaccatccggctgggcctgctcaacggccccaccggcatgggagcggccaaactgctctccgacagcgacgcgggggagacggtcaaccactatgagtatgccatcggctccgacccgtccaccgacattgtgcccaagctgaacaacggcgagctggacatcgctgcggtccccaccaatctggcggccaccctctacaacaaggcgggcagcatcaggctgctggccctcaacaccctgggcgtgctccacatcctggagaacggcgacacggttcactccatggccgatctggcgggcaagaccatctacagcatcaaccagggcaccaacaccgagtacgtgctcaactatctgctggaggagagcggcctcacccccggcgaggacgtgacaatcgagtggaagaccagcgaggaggtcacggccctcatggcctccggcgggatcgatctgtgcatgctccctgtccccgccgccaccagcgtcatgatgcagaacgccgatgtgcgggacgccatcgatctcaacgacgtgtggcaggacgtgggggccgccggcacctttaccatgggctgcgtggtggcccggagcgacttcgtggaggagcacccggaggcggtggacgccttcctcaccgagtacgccgcctccatcgcctatgtgaatgagcacccggaggaggccgccgccctggtcgagcagtacggcatcgtccccaaggccgccgtcgccaaggcggccatcccccaggccaacatggtctgtctgaccggcgacgagctgaagggcatctccgactactatgaggtgctctatgccgccgaccccacctcgatcggaggggccatcccggatgataatttctactatattccgtaatcgaaccacacaaaaaatactgcgcgttgtcgtgcccctggccttctggctgggggcttggcagcttgcggccatttgggtggacacagtatatacccccggacatggagccctgctcctgccctctcccctgctggtgtgggagcggctggccgccctggccgcccggccctccttctggcggacagcggcggtgagcctgggccgcatcttcggcggcttcgccctgggggcggcggcgggcaccctgttggccgtcattacctccgccctctcctgggcggactggctgttccggcccatggtgaaggtgatccgcgccgtgccggtggcctccttcatcgtgctggtgctcctgtgggcctccacggggcgggtgcccgccatcgtctcggggctgatggtgctgccggtgctgtggggcaatgtttgtaaaggtatcagccagaccgacgggcagctcctggaggcggcgcgggcctaccgcttcggccgctggaagaccctccggctggtgtatgtcccctcggtgctgccctatttcgccagcggctgcgccaccggcctgggcctggcctggaaggcgggggtggccgccgaggtgctctgccagcccaggctggccatcggcacccaggtctaccgggccaagatcaccctggagacccccgatctcttcgcctggacggcggtggtgatcgccctcagctttctgctggagtacgccctgggcctcctgttccggcggctggggaagggggcaaagctgtgatatcagcggaacatattacggtctgttatggggaaaagcgggtgctggacgacttctccctggtgctgccggagacggggatcaccgccctgtccggcccctccggctgcggcaagaccaccctgctgcgggtgctggcgggcctccagcggcggtcggccggggtggtgacggttcccccccgccccaccctcctgtttcaggagaaccgcctgctgccctggcggacggtggagcagcacatcgccgatgtgctcccccgggcgcgccggggggagacggggcgctggctggccctggtcgagctggagggggaggagcacgcccgcccctctgccctctccggcggcatggggcggcggctggccctggcccgcgccctggcctgcggcggcgggctctacctgctggacgagcccttcaccggcgtggacgccgcccgggcggcccgcatcctggagcgggtacgggccctgggcgtgccggtgctcctgtccagccacgaggcggagatcgtcgccctctgcgaccgggtgatccccctcgccggaccgcccctccatagggcggattgaacagtagagccgctccgaatcaacggagcggctcttttatgcgctatgtgtcttgatgcctagcctgttcagcccgactaagggccattagatgaaccatgaagtcggtcaaactatcggtataggccgggttgtgaaggagactgcgggcatgtcggagcacctcttgttcccggctgctctgtaagatggggatatgctggcgctgtttgagcttggcaatttgacaaaccagctccatacgctgctcgaacagctccacgagctggcagtccagcaggtcaatcttctggcgaagagcgtgtaattcgtccatgaaagcgcctccgtcagggattatgcgcccataagagcgctggcaatggggtaaccgactgcaacagtaaccacgatggagatgaccatcagaatcgtgccataaagaattacctgccctgtttttgtccagccggagccaatggccaggggaacattggggtgggcagggggcgtgacaaaggcatagctggccagcatcccaatgatcatggcaatggccggtgtgctgacagcgccgccgctggccatgcagagggggattgctacagcgcagactaccgtaacggtgaccatattagacgccacattggtcatgacggcggcccatacggtaaagaccagaatcaaaagccagacgggcaggccgttgagggtgggggcgatagctccgctgagccagtcggtcagtccgatctccgcattggtcatggcggagccgagtgcaagagtagcgcctgccatgataacactgccccactccacgcccttctgcatggcctctttgaagttcattagtggagcgcctcctaccgacagcaggcacagggccaccgcgccgaccagcggaggaaaggcggtgccctgggtgtccaggaagctggctacagcggggaggacaggttcgataaactcagggagaacccacatagcgaccaccaaaaagaagatgatcagggttgccttttcgcggcggtcagccggggtgacgctgcgcttgagcgcatcaaagtccaatctggagacgcaggacagatccggacgcagcacaaagcggaacagcagaagcatggcggcgaagcagagcaggccgaccggtacggcgaaggccatataatggatatagctgacactggcgccggtggcgttttgataaaatccaatggccatgatggggaacacgtgggcaatgggggtcattccgcatgagatggcagaggagaaaagctgacccagcattagagcgttggccagccggtcgtcctgccgcagctccagctcctcgcagatggcgcggagaatgggaaggtaaataacgaagaccaccgagggagacataaccagaccaatgaccaggatagaggcgcagtagaggatcagaaagcaccagggacttctgcgggcgatgcggctgctgatgaagaggatggcgcagcgtttgacaaaagaggtcttggagatggcgtaggtacacataaaggtgaacagaagaaaggcaacggtggaattgccaagagagtttgccagaacgctccccatggtcagctccggcacggtgacgagggcggccagggccaggaggctgggccagtcgatggagagagtgagccagagaatcaacgcgccgataaagataccgagcacctgcatggcggagctggtcataccggatggcgcgggcagaaaacgaaagccgatgatgcaaagaagggctgccaagatggagattgtccgtttcatgtgtaatcccccatttcacaatttgaatcagatacaggcgccctgccggcgcagctctgcttgaatttcagagacaggagtaccgcgaccggcggcgagaaaggcggcggccacgccagcagcctgaccggtggcaaagccgatgcccatgacgcggaccgaggcaaaggctacggcatcagcactgaccagacgtccggcgccccacagattggcggtactgcgggattttagacagcggagcggaatgtcgtagtagccgtcatctttgacccagagatagtctgccatccggttgatgtcggtgtgcatttcgcagggccatgcgcctctagccactgtatcggggtgcttaacggcgccaagtacctcctcagcagtcagtatgtgttcaccaaccagatgacgggtatcacggataccgagcttgtaaccggaggagaccagacggcagtgctccatgccgggtaggtacttccggaaggcggccacatactcctgacactgagcgcgggtattcatctcgcaggcggtgagcgtctcggcgtccagcgcgggtacggctacactgggcaggatggcgtaagccgtatctggagcagtacgaaagacgatgccggattccttggttaggcggtggaagccgtccgccttggcgcgctgtatggcctcctccaggacggcgggggcaaatttggcctctagccctacatgatccaagcgcatcatcttggtggataggtagcctccgcccgctccgtctccaaagcgcagttccgccccggccaaatgggccagatttccatctccactggcatcgacaaaggctttggcccgaaattcataggtgccctcgtcgtctacacagtggatagactgaatcgagccatccggactggtctgagccgagatcatccggcagtgcagcagtacctttagtccgctgtaacgctgtaccaacaggtccaacgcatatttcagagcctcctcatctagagtgacgatggcattttgtacagaggagagccgatagccgtcataagcccccagctcatgaagcagctccagtacctgctggccaacaccctttacaatttgctggggaggattgctgtgggtaaaaaaaccgcagtaggaggccacgttggcattggtggcctgcccgcccaggcttccattgcgttccaccagcagacaggcggcgcccgcctgcgccgcgccgacagcggcggcaatgcctgcggcgccgccgccaaccaccaccacatcatagctttggactttctccattaaaaccactcctttgttggtgcaccttttgtcgaaatcaactatatcataaggagagtatatttgtaaaagtcataaaaactataatattaatagtttaaataaatgaaattgcgtctgatgcattgacacagatatctccggctcgtatactgaagctgagaagggaggataggcatggagcgcagtcagttaatctacgtggtgaccgtggcggagtgcgggagcgtaacgcgggcggcagagaagctgcacctatcacagccgtcgttgtccaatcagattattcatttggagcaggagcttggaatagcgctatttgcccgggtacggaaacgggtgcatctgacagaggcgggcgaggtgtttgtccgccatgcccagcgaatactcaacgacatgcaggcgctggcggagcgcatggaggattacgcagccaaccggagcgggcgtgtgcgcattggggcgctgccaattatgtgcgcgctccatatcccggagctgataggcggctttcacagtgagtacccaagtattaccctgactttgcaggaacggggaagtgcggagctgctccaggcgctggaacagagtgagattgatgtggcgtttgccattcttaacccctcggagccggcagttggacaggtgcacagccttccgctgctccagtcggagatatgtgctgccgttcatgtggacaatcccctggcctgccgagacgcgatagaactggagcagctggcggaccagacgttgatcacgcccaatcaggacttcaacctgtcggggataatcctgtcccatttgtccagcctggggatttcctgccaggtacagaatatttgcagccagatcgactcctgtttggcgctggtaaataagaacatgggcatcagcttttgcagccgcgcctctgcggactactaccgatatcccaacgtggtgtcagtttccataaagccggtcatttcccggacggtctatcttgtctataaaaaagatctggcgttttatccctctctgcagcactttgtacgctttgccgcggagttctggaggacaaacgttatattataaagatttttggaaaacgggcgaaattcgttgtactttcgcctgtttgtgctaaaatagttgtcataatcatttgagagaaggcagcaaacaatccatgacatacaccgtagacaccccgcgcagcaggcagcgcttccgctggccacgcctccccctgggagaagggcaggccgcctggaccacccgggccctgatgctcctggcccccctgctctccttcaccctggtggagtacctcaactacaacaacccctggactgatttcagtccccttcagatcgcccttaacctggcatggtactacctgggggagctgtttttctacttcgtccttcggcggcgggcctcggccgtcaagtgggccatggggatcgcctggggcctgggcatggccaaccactacctgatctccttccgggggcgcaccctctttcccggcgacttcctcaccctccgcaccgccgccaacgtggcgggcaactacgactaccggcccgactccatgcagtggctcaccatcggcgtgttcgcggcggtgctgctggccctgtccttcctgccgaacgagaaaaaaagacccttcccgtggcggctctttgtcccggcggccggggccgccgcggtctttctgggcgtgttcttcggcaccgggtttgtggaggaccggggcattgagccctccatgtggaccacccggggcaacggcctgttcctcaacttctcggtgtgcctgaagtacatgagggtggagcggccggagacctactcggaggaggccctagcggccctctccgggagcgctcccagcgacccggccgccgtgccggcggccggagaggacggcatgattcgtccggtgaacgtcattgtcatcatgaacgagtccctctccgacctgtccgtgctgcccggcgtggagagcaatacggatgccatgcccttcctccgctccctgacggagaacaccatcaagggctacgcctactcctccgtgttcggcggcaccaccgccaactcggagtacgagttcctcaccggcaacaccaccgccttcctgcccgcaggcacggtgccctaccagatgtatgtctccagcggcgatcccaccctggtggggcagatggccgccctgggctaccgcaccgtggccgcccacccctaccgctcctccggctggagccgtccctcggtctaccgggatttcggctttgacgaggtgtactttgagggggacttccaggaccgggagtacatgcggggggacgaaaaaaccggctatgtcaccgaccggtgcgactacgccaacctgatccgctggtatgaggaaaaggaggcgggggaaccgctgtttctcttcaacgtgaccatgcagaaccactccgcctaccagatggcgtggacgaacctgccccgggaggtgtggcttaccggggcgctggagggccggttcaacacggtcaaccagtatttgtccctggtgtaccagagcgatcaggccttcgaatacctgctcggctacttctcccaggtggaggagcccaccctgatcctcctcttcggcgaccaccagccccaggtggccaccaacttctataccgacgtgctggggacggccccggataccgccctggcccagaaaaaacagatggtgcccttcgtcctctgggccaactacgacataccggaggcccagggggtggagctgtccctcaactacctgtccgccctgctgatggacaccgccaacctgcccatgaccgggtatcagaagtacctggcccggctgtgggaggccgccccggtgatcaacaccgtgggcatccgggacgccggcgggaactggtacggcgaaaacgaggcgctgccggaggagctggacgccgccgtggaggattaccgggtgctgctctacagcaatgtatttgacaagaaggaccggcccgagggcttctttgccctgacggagtgacccccggtatcccccgcacaaacaagaaatgaaaagtagatgcaggccgcccagtctcactagagactgggcggcctgtcgaatgagaagataaaatgcaggggcgggtaatgcgcaagaggtgccgggcccggcacagcgggccggtgtgggcatcggcccgtgcggtgtgggaatgaaaacgcaggggcggccacaggggccgcccctgctcagggcgcgggaaatgccgcccggcggcggtcaggccgaacggggcctcagtacagccccagcagatagcggaaggcgaaccgcttccaccaggggagggacttgtccaccgcctctgccgcggcgcgggcggcgcggagcaccgcgtcccgctcctcggcggtgagggtgtgggggctgaatttggccttttgggccagctccccggcccgggcgggcggctccgctccccagcgggtcagccgctgaagatagagataggccgcgatggccgcccggttggggttttcatcctggaaacgccgctcccggcggcggcgggcccaaaagcgccgcagggggagggccagcgccagcagaagggcggccaggagggccggaagcaggcggagagggagcttcgggccctcatccgggagggccgccgacggcgtgggggtgggtgtaggcgcggcggagtcgggggcgcggctggcctggggcgtgggcgtgggagagggggtggcctcgggttcctccgcgccgctctggccgggagtgctcccggcgtagacgggggtgacctccaccggctcccacccgtagccgtcgatatagacctccacccaggcgtgggcggcggagtcgggcacgttcacgcggccggaggcgggcacgtcggccacaaagccggagacatagcgggcggggacgcccatgctccgcagcagcagcacggcggcgctggcaaagtgcatgcagtagccccgatggctctcggtgaggaaccaggccacaaagtcctccccctccggcgcggcgggggtgtcggggtcgtattccgcgacggcggctaggtagtccgccaccacctgggcggcttccagcgcatagggctgcttcacagaggcgggggaggcgtactgggcctgccgcagccagtcggccagcggctccaacgcgccgtccagcgcctggcggagcgccgggttttccgagtagagggggacctggaggtagtactcccgcacgaagtccgcgtaggccgcctccgccagagacagctccccccgcaggcccgcggaggcggcgggggaggcgtcgggctggacgtagacggtgtgggtccacacccgggccgcccgggccagataggcgtcgtggacgaattccgccccggacagctcgccgggctgggtcaggatatggtagggaacgtagacatagcccggatcggcccccacattgcgcacggtgatcttggcgtaggggctccccgggtgggcgtcccggaccgccagggcggggaaattcatgggctggaaccgggcgaacagggactcagctccagcggcgccgagatccgtgtccggcgcggcgggcgctccatatgtgacgccgcggaggcgggcctgccagttgtaggccgcctcatccagcggcttccagctctcgccgtcatataccgcgtcggagagcccccgcaggtagatgcggccggtgaggtcggtctccacctccagcacggtgcgtccggagaagcgcagcggccccgcgtcggagagagagacggagccgtcggcgtcggccagccgtcccccgccgctgccaatgccgaaggggccgctcccctccagcaggccgtcccccaggcggacggcctgattggtgaggtgctgtagggcccggtcggcccaggcggggcgctggtaggtgtccatgggcatggccaggctgagggcggccagcagcagggcggcggccggaagggcggccaggttgaggcgcgcggccccctggggcgaggtgcgggccagcagggaggtgagggccggcaccacccaccccagcaccagggccatcaggggcagccagcccggggtgaccgagatgcacagggggagcagcacgaaggggaaggagctgacgaagaccagccagaaggagcgcaggcgcacgacgcccagccccagcagggcgcccagcggtaccagggccaggaggacgagcagggtggcgcagttggtccagagggcttcggggagggaaagggcgggctccagggtgaagcccagctccaggctggcggaaacggtgttgaccacgtccacccgcagggcatcggcccccagggccagcggctgccacagccgccgcaccgccaggagccaggcggcggccagcagggccaggggaagggcccaccagcggcgggggagggaccagaggccgaggaaggccagcgcggcggcggcgcagcccagcagcaggggaagggcgtgaatctggacggagaaggcggtaaggaaggaaaagacggtgcccgccagcaccagaagaaggaggcagccgtcccccaacaggatggcgggcccccgccgcagaggcgcggcggcgcggcgcttgcgcttcatggcgcacctccttccagtccggtgggcgttacatggatgtgccggaggggaccggcgcggccgggcaggcgcagggcggtgtccaggatggagcgtccctccgccggggcgggccgggagaaggccagctccaggcaggccagcagggcccgctccgagtccaccagccgcccctccacgccgccgccggtggggctggcccactggatatggtggggcctgccccgctccagcagggcccgggacagggcgcacagccgggcgaaggtctggtccagcgccgcgggggcgccgaagtggtcataggtgagcaccagggtggtctgccggggctccagggtctcccgcaccaccagctcgtcccgcttggaggagagcttccagtggaccgagcgcagggggtcccccggccggtagtcccgcagatcgtagtcctcccccggccctccccctgggcgggggaggagcgcaccgccgccggggccgccccccagcaggcgctccggcagcgcctgctccatatcgggcggcaggatcagcaccgccgccggccgcccggtggggatgggcagggggaacaggcccagcagatcgcaggtccaggcccgctccgcccggcagatcagccggccgcagtggggggtggccagctccagagtgggcggagcgcccggtgcggtgcgcacgggctcccaccgcacccgcccgcccgcgccggtgagctggttgctccagtggagacgggcctgaagccggggcaggggcaggcgggtgcggctgcgcagccgcacctgaaagaccgcgtcctccccctgtaccaccgtgggagcggcggaggtgagaagcagtgtgcagcccagcaccgacggcaggctcagcagcaccgacagcagggggagcagcagcaccagcgccagggtgaaggtggacaggtaaaagcggaacacgatctgaaagagcactgccccgcccagcagggccgcgtaggcaatccgacggtacgccatggcgtcaggagatccggggggcgggcacccgctccagcagctccgaagcggggtcgaaggagcggtcggcctccgcacggggggagaggagcagccggtggggcaccacgtcgccaaagaccagggacacatcctccggcagaacatagtcccggccccgcaccagggcggcggccttggccatggcggtgagggccagggtggcccgggggctggccccctggagaatcatggggtggctccgggtggcgcccaccaggcgcacgatgtagtccagcacctcgtcggatacgtagacctgtccggcctgggcccgcagggcgagcaggccgttgagctccagcaccgggcgcaccccctccaggagtgcgcccccctgccggcggcgcaccatggccatctcgtcggcgggggcggggtagccgatggacaggcgcaccatgaaccggtccatctgggagtcgggcagaagctgggtgccggaggcccccgccgggttctgggtggcgatgaccaggaagggctggggcaccgggtgggacaccccatccaccgtcacctgcccctcctccatagcctccagcagggcggactgggtgcggctggtggcccggttgagctcgtcggccaaaaagaggttgcacagcaccgcgccgggctggtactccatccggcccgcctccttgttgtagagggtgaagcccgtgatgtccgacggcatcacgtcgggggtgaactggacccggttgtaccggaggctcagggccttggagaaggccagggccatggtggtcttgcccacgccgggaatgtcctccagcaggatgtggcccccggccagaatggccagcagcacctttgccagtacctcgtccttgcccaccacggcgcggcgcacctcgcccagaatggcggcggccagcttgctcccctccatggaaacgccctccttatcatccgtcttaccctccattctagcagagctttgatttatgtcaacgaaaaaagagttacagattgggctccgggccaaacaaacgcgcaaaacctcttgcactgcgggattttttgtgctatagtacatacgatagtaagtagtggtatggtgagagtggggtcgcggctccgctctttcttattgaaaaaacggggtatgtaaaattatgggaaatatcccggaacggaggtcaaaccatggcgaaagtgacggagctggtggccgctctggccgcccccattgccgagcagaacggctgcaccctctgggatgtggagtatgtccgggaggcggggcagtggttcctgcgggtgtatatcgacaagccggaggggatctccatcaacgactgcgaggcggtgagccgtcccctgtccgacgcgctggacgaggccgaccccattgagggaagctatgtgctggaggtgtcctccgccggcgcagaccgccccctgaaaaagcccgcccacttccagcagttcctgggcgcggaggtggatgtgcgcctctaccggcccctggacggccgaaaggagtacaccggcgtgctgaagggctatgatggcggcgatgtgaccatcgagaccgcgggcgaggcccgcacctttgtcaaaaaggatgtggcgcaggtgcgcctgacggtgcatttttaaggagagcgggtacgggccgggggcccgtaccgacgatgcaggggcgacctgcggccgcccgcaggagaaataaggagtgcagttatgccgaagaagaatgccaaagcgcagaagtccaacgagctggacggggcggagttctttgccgccatcaacctgattgagaaggagaagggtatccccaaggcctacatgctggagaaaatcacccaggccctggtgtccgcctacaagcgggaccacgagggcgcgggggacaacgtgaccgtggaggccgacgaggaggccggcaccgtgcgcatgttcgtcaagaaggacgtggtggaggaggtcgacaacccctgcaccgagatgagcctccagatggcacgggagaagctgccccacgcccagcttggcgacgtcatccgcatcgaggtgcgcacccgcgatttcggccgcatcgccgcccagaccgcccgccaggtgatcatccagggtatgcgggaggccgagcgggggatgatctacgacgagttctcctccaaggagcacgagatcctcaccggcgtggtcacccgcgtcgatccccgctccggcgcggtgagcctgcgcatcggctcgggcagcgaggccaccgaggccttcctggcccccggcgagcaggtcaagggcgaggcgtacctcgaagggatgcgcctgcgcgtctacgtagtggaggtgcgccgctccaccaagggaccccaggtgctcatctcccgcacccaccccggcctggtcaagcgcctgttcgagctggaggtgcccgagatctacgacggcaccgtggaggtcaagtccatcgcccgtgaggcgggcagccgcaccaagctggccgtctggtccgccgatcccgacgtggaccccatcggcgcctgcgtgggcccccggggccagcgggtcaacaacatcgtggaggagctcaagggcgagaaggtggatatcatcaagtggtccgaggagccggcggagtacattgccgccgccctgtcccccgccgatgttgtcagtgtggccgtccgggaagagggcaaggcctgccgtgtggtggtgcccgacgaccagctctccctggccatcggcaaggagggccagaatgcccggctggcggccaagctgacgggctggaagatcgacatcaagcccgcgtccgcccccgccgacgaggagccagaggacgaagcggacgtcctgctggacgacgaggccgagaccgaggaataagccctgcgggggcggcctcctgagtggggctggccctccctgggacccgccgcaggcgggacggcgcttgcgccgcacaaaggttttgccgagggcaaaaccttggtttggggcaattcagttgccccaaacgggatggaaacagggtccccgcaaaaaggctctgccttttgcggggcgggccagaacgcccggctggcggccaagctgacgggctggaagatcgacatcaagcccgcgtccgcccctgctgatgaggagccggaggacgaagcggacgtcctgctggacgatgaggccgagaccgaggaataagccctgcgggggcggcctcctgagtggggctggccctccctgggacccgccgtaggcgggacggcgcctgcgccgcacaagggttttgccgaaggcaaaaccttggtttggggcaattcagttgccccaaacgggatggaaacagggttcccgcaaaaaggctccgccttttgcgggatgtccgcacacgtaggggccgatgcccacatcggcctgcgaggaggcgagaaaaatgcccaagaaaatacccctgcgccagtgcgtgggctgccgggagatgaagcccaagaaggagctcattcgggtggtcaagagcccggagggagaggtctccctggatttcaaggggaagaagccgggccgcggggcctatgtctgccccgatgcggagtgtctcaggcgggcgcggaagtccagggcgctggagcgggcgttctccgccgccatgcccgacggggtctacgacgcgctggaggcgcagatgagggagggcggcgatggataacgtgctgcatctgctgggcattgcccgcaaggcgggccgcgtggaggtgggggaggagccggttggtgcttccgcccgggcgcggcaggccaggctgattctggtggcctccgatgcggcggacaacagcgcccgccgggccgcccactttgcccaggcgggtaaggcgccctggttccgggtgccctacaccaagggggagctgggcggcacagtgggccgcgcatcctgcgccatgctggccctcaccgatgtggggctggcggccgccctgctggccaggctggccgccggagcgccggagacctacggtgcggcgtcggcggagctgagtgagaaggcggacaaggccctccagcgccagaaggaacagcgccgccacaagaaaaagctgcaaaagggcggaaggaagccgtgggcggccccgcccgcccggaaggagtccccgccggagcccgccgggaagcggacgctgccccggggcaggctgaccgtcaagaagaagacgccatgagaccatggcacacaataggattggaacaacgagggcttgttccaataagaaagcgcagcggccccgccgcgttttcctattggcgcaagcccgccgatggaggtggcttatttgctgaacaacaagtatcgcgtgcatgaggtggccaaggatttcaagaagaactccaaggagatcaccgacattctgacaaaatatgcgacggctcccaagaaccatatgcaggtgctggaggaccgggagctctccctgatcttcgagtacctgacccagcacaaccaggtggacaacatcgagagcatctacgccgaggtctaccgggagcccaaggctgccccggcccccaagggggagcccgccaaggccgcgccccaggcgcagaagcccgccgcgccggcgggcaggcccgcgccccagcagccccagggcaagccgcagccggcccagcagccggcgaaccggcccgctacccgcgtccccgagaagaaggtagtggacacccgcaagggcggccaggtgaacctggagaagtacgacgagcggctggagaacctggctgcgggcaagaccaagcagatgcaggccggcaagcagaagttccagggccgcaaccagcgcaagggcggcttccagggcagcaagcgccgccaggaggagcaggagaagatgcgccggctccaactggagatcgccaaaaagactccgctgactgtcaagatccccgacgccatcggcgtgggcgagctggcctcccgcatgaagaagaccggcgccgaggtggtcaagaccctgatgaagaacggcgtcatggcctccctcagcgacgtcatcgacttcgacaccgccgccatcattgccgaggagctgggctgcaaggtggaaaaggaggtcattgtcaccatcgaggagcggctcatcgacaccgccgaggacaaggaggaggatctggagccccgcgcccccgtggtggtggtcatgggccacgtcgaccacggcaagacctccctgctggactatatccgcaacgcccacgtggcggcgggcgaggccggcggcatcacccagcacatcggggcctatcaggtgaacgtgcagggcaagaccattaccttcctggacacccccggccacgaggcattcaccgccatgcgcgcccgcggcgccatgatcaccgacgtggccatcctggtggtggccgccgacgacggcatcatgccccagacggttgagtccatcaaccacgccaaggcggccaacatccccatcatcgtggccatcaacaagatggataagccggaggccaaccccgagcgcatcaaggagcagctcaccaagtatgagctggtgcccgaggagtggggcggcgagaccatcatctgccccatctccgccaagaccggcgagggcatcgacaacctgctggagatggtcaacctgaccgccgagatgcaggagctcaaggccaaccccaaccgctccgcccacggcgcggtcatcgaggcccggctggacaagggccgcggccccgtggccaccctgctggtgcagaacggcaccctgaagcagggcgacgtgatcatcgccggcaccgccgtgggccgcgtccgcgccatgaccagcgccaagggcgagaagctcaccgaggcgggcccctccgtgcccgtggagatcatcggcatgggcgaggtgcccggcgcgggcgacgacttccacgccgtggccgacgagcgcatggcccgcgagctggtggagcagcgcaagcatgagcagaagatggccgcctccgcccccgtgggcaaggtaagcctggaggacctgttcagccagatcaagcagggcgagatgaaggatctgaacatcatcgtcaaggccgacgtccagggctccgccgaggccgtcaaggccagcctggagaagctgtccaacgaggaagtccgggtgagggtcatccactgcgccgtgggcgccatcagcgagagcgacgtcatgctggccaccacctccaacgccatcatcgtgggcttcaacgtccgccccgaccacaacgccaaggagtccgccgcccgcaacaacgtggatatgcgcatgtaccgcgtcatctacgactgcatcaatgagattgagaccgccatgaagggcatgctggctcccaagttcaaggaagtggagctgggccaggccgaggtgcgcaacgtgttccgcatcaccggcgtgggcatggtggccggctgctatgtcacgggcggcaagatgcagcgcggcgcccagatgcgcctgctgcgggacaacatcgtcatctacgacggcgccatcgcctccctccagcgcttcaaggacagcgtgaaggaggtcgcccagggctacgagtgcggcatcaccttcgagaagttccaggacatcaaggagggcgacgtgatcgaggcctatctgatggagcagatcgaggtgtaaccctgcctcctgcggagttccctcctcgcggcaaagccgctgcggcctacgctaaaaatttgacgcaggcaaattttcttcacgctgcggtggagcagatcggggtgtaaagctgttcccgcagcctgaaccgggccggagcccagcgaagcgggttcggcccggagaggagacgcagcggaaggagcgagctttgccgtaagcggcaaagcaagggatctgaagcttgcggcgacgaggtggagcagatcgaggtataaatttctttcggcttcgtaaaacgccgtaggggcgacccttgtggtcgcccgcgggcggccataaaggccgcccctacgatatggagtggccagctggggcatgcggtatgctgccgggctatcgtgccgcatgtctggccttacccgagaaattcgtaggggccgatgcccacatcggcccgctgcgccccaagccggtaaaaaaccaaatcagacccgttccgtccccaagtcatttgaggagggggcgggcctgtgcgtctttatcgggaggatttttatgagcgccgtcaccctgctgtgtgccgaccgccccctgcccctgtacgagtccggtgtccgccgggtcgagaccagttcccatggcgggtacacggtccgtattgaggcgagcggattttctgtgggggagcacacatactaccgggaagcggtggaggatctgaacctgaccatgaagccctgccggtacgagctggatctgcgggccacccaggaggacgcggcggagctgagggcctatctggcaaagcatctgcgccccggagagaccgtggaactgtggaacctgtgggtgggggccggccccgcgcggccgaggcgcttttccggcgccctgggggatgtggagctggacaccctgaagcaactggaggagaacttccagacctgcctgaccattcgtatttgaccgggggcgcagccctctggaaaggagtatattatgccgagcaatcgcatcggacgcatcaacgaggagatccagcgggagctggccgccctcatccgcaccgtgaaggacccccgggtacacggcctggtgtccgtcacggcggtggacactaccccggatctccgctacgcgaagatttacgtcagcgtgctggacaagagcgacgtgaagaaggtcgtcaagggcctgaagtccgccgggggctacctgcggcgggagctgggccgggccctttcgctgcggtacaccccggagcttcagtttgtggaggacgactccatcgacaccggcgcccacatcctgagcatgctccgcaacccggaggtggtcaagcccgtcaacccggccaacgcccacatcgagctggacggcgaggagtgagcgccatgaccgtgagggagaccgccgcctttctgcggcagcatgacaactatctgatcctcacccacaagcgccccgacggggacaccatcggctgcgccgccgccctgtgcgaggggctgcgggccctgggcaggacggcgtggatctgtccccacgcggaggagacccacctgttcaccccctatctggagggccgcctggccccggagggctatgttccggatacggtggtgagcgtggacatcgccgcccgcagcctgttcacccgggctggagaaccctggctggcgcggggggttgatctggccatcgaccaccacccttcccaggcgttttttgcggcgcagacctgcctggacgccggtcgggccgcctgcggcgagctgatctacgacattctccgggaactcggccccatcacccccgccatggcgatacccctgtatgtggccgtgtccaccgataccggctgctttcagtacagcaacaccacggcggacacccaccgggtagccgccgccctgatggaaaccggcatggacgtgttctctctcaataagcgccacttccgcaccaagagctgggcgcggcttcaggtggagcggctgctcaccgagcggatgcaccgctatgaggacgggaaaatcgctgtggcccccgtgtccctgtccctcatggacgaggcgggcgcaactgaggaggatatggaggatatcgccgccttcctgggacagattgagggggtggagacctccgtcaccatccgggagctggcggaggggggctgcaagctgtccgtccgcaccagcggcgggctcaacgccaccaaggtgtgcgcccggctggggggcggcggccacgcggccgccgcgggctgcaccgtctccggcaccctggccgaggcggaggcggccatcctggacgccatccggcaggtggaggcaggggcatagaggacgcggcctgcctgtaggggccgacctgcgtgtcggcctgctgcccgccctacaaaccagaaaagacgccgatttttggcgcacgggaggccacttttatggtaaatggaatcatcgtaattgataagccccaggagtggaccagtatggacgtgtgcgccaaaatcaggggcgtcctccatgagaggcgggtgggacacgccgggacgctggaccccatggccaccggcgtgctgcctgtctttgtggggcgggcgacgcgggcggtggagtttgcatccgaatccgaaaaggaatacatcgctgggttaaaactcggcgtagttaccaatacccaggataccaccggccaggtggtggaggagcgccccgtggaggcggaccgggcggccctggagggggcgctggccgccttccggggggagatcacccagattccgcccatgtactccgccctcaagcgggacggtaagaagctctatgagctggcccgggcggggaaggaggtggagcgggccccccggcccgtcaccatccacgccctggaggtggtggagcagaccgggccgaactgctataccctgcgggtgcgctgctccaaggggacctatgtgcgcaccctatgccacgacatcggggccgccctgggctgcggcgggtgcatgtccgccctgcgccgcaccgaggccgccgggttttccctggcggaagcggtgccgctggaggcgttgctggacgcacctgacccggcggccctgctccggccggtggacgcctatttcttccgttatccggcgatgacggtggaggggacggccctgcgcaaggcgaagaacggcaacccgtttccctgctccgcggccgacggcgactggcgggtgtacggccccggcggggaattcctgctgctgggccggtgcgccggggggatgatgagcactatcaagagctttttcgaggtgtagcggtatgcagacagagaaacgtgtgatcgccttgggcttttttgacggcgtccatctgggccatggggccctgctgcgccgggtgggggagaaggccgcagagctgggggccgttcctgcggcggtcacctttgacacccacccggagaacctgattttaaaaacccctgcggtccccctgctcagctctcccctggaccgggcggagctgatgcggcggttctacggtatccgagaggtcattgtggcccactttgacgagcggatgatgcacatgccctggcgggaattcgtcaccgattatctggcgggggagcacggggcggtgcatctggtggcggggcacgatttccacttcggctacaagggggagggcaacccggagcggctccaggccctctgcggggagctgggcatcggctgcgacattatccccaaggtggtacaggaccatatcaccatctcctccacctatatccgtaccctggtggcccagggggagatggagcgggccaaccagttcctgggccacccccacaccctgaccgacacggtggcacacggcaagaagctgggggggactttggggttccccacggtgaacctgcgttttcagccgggggtgctggtgcccgctcacggggtgtacgctacgcgggtgacctttgaaaacggcgagagccgcccggcggtgaccaatatcggagtgcggcccacggtagacgacggtgaccgggtgactgtagaggggttcatcctggattttcagggagatctctacggccagacggtccgaatggagttctacaagcgtctgcggggggagcggaagttccccagcctggaggcattaaaggacgaggtcatgcgcaacgcggagcagacccggacctatttttccacgcagccctgagcccctgagactgaggatgaggaaagagagggagccccatgcgttataaaaagctctaccccgccgtcatctgcttttgcgtcttcctggctgccatcggactggtgctgggcgatccgtccactgtgctgccaggactgtggaagatcatcgttacggaggacgcgctgatcaccgactacgtgaaaattgcgggtgtaagcgcggccctggtcaactccgccctggtgacgctggtgagcctgctgctgctctacctgagcaaggagccgcccaacggcttcacactggtggagctgggcctgatggctggcttttccctgttcggcaagaacattgtcaacatctggcccatcattgccggtaccttcctgtacgccaaggcgcggcgggagccgttcggcaagtatgtctccgtgtccctgctggccacagccctggccccggtggtgagttatgtggcgctggacaacggcttcggcaacctgtggtggggtatcgccgtgggactgctcatcggctttgtgctgccgcccctctccgcctatacatacaaaatccagaacggcatgaacctctacaacatgggcttcgcctgcggcctgctggccatgatcctggtacccgttatgagctccatgggggccaatcccaccgtggcccaccactgggcggagggctataacctgcactttgctatcttccttggggtgctctgtctggggctgactgtggcaggcttttttttcagcggccgcccggcgtgggccgcctgggcggggtaccgccgcctgctgcgcaccaccggccgggctcccagcgattaccttcgcatgtttgggcccgccccggtgctcatcaacatgggggttaacgggctcatcggcatggccttcatcctcgccaccggcggcgatctcaacggcccaaccctgggcggcattctcaccatcatgggcttctccgccttcggtaagcacgcccgcaacatcacccccatcatgctgggcgtggtcatcggcggcgtttttatgcacttcgatatcaaccagagttccgtgcagctcgccctcctgttcggaaccactctggcccctatctcgggctatttcggctggcccttcggcatcgtggcggggttcctccactcctccgtggtgctccacgccggaaccccggtggagggcattaacctgtataacaacggcttctccggcggcctgctggccatcgttctctatcccatcatcagcgaggccatccgccaccaccggccggggctccaggaccgcgactacttcgatgacaccatcgagcacgacgagcccctggtcccgcctcctgcccggcgaaaatgaaaatgaggtcaaaagaggtgcagcgctcccgaaggagcgctgcacctcttttttgcgcaaagaaggcaaggatctctccaaaacgctgccgaagaacggacatcaatttgaaaaagtgtaccttttcaaacaccctgcctttgttctataaattgaagtatagcatagaaaaggagcgatatcaatcactttatggaaaggtagttcttacaatctgctgctttgaaaaggtacacaattccaaattagaagatgggaggcagatttatttatgagaagcaggttactaaagatatcgatatgcttaattatgattatttcttatattccgataactgcgatttctgttgagtcaggagaatcagtggtagatggaagcacggcaggggcgccaatcgcagtgccggaagaagggcttgctatttcgggcggaaccttatatggaatcgataaaacatggtttgcaaacgttaatcctgataagggaaagatttatttggctatctctatcccctcaggcgtgacggaaattaataacgatgggctcaaggattcttatacaagcgataaaaaattacataatgcagtcacatatatggatgggttggggagtttcagtgttgcagctcttagttttgatgatgcaactggacttgaaacaattggtgagcaggctttgcaggggaacagccaactgacagggatacttgatttatcagcgacaaatgtctcagtaattaaaaaaagcgccttttccggctgctccaatctgacaggagttgttctaccaaaaacgttgacagaattaggaagcagatcatcctctgccggttctgtatttaacgggtgcgaaggacttcggtatatccgcgtggccggtagtagtaaccagaatgcggtttttgaactgccggagggccttacctatattggaaggcagacatttaagaactgttttgcttccgatgtggatgcaaaggtaattattcctgctagtgtagagacaatcggaagtgaggcgttttacagcaaacggatttcccagatcatcattcaaaaggaaggagacggatgggatccacgattaaccggatatgatacatctgcatttaaaaccggaaacgatgacctgttggtggtgtttttaaataggaaaagctatgtggactatacagtgggccggagctttacaggggcggtaaaacgtgcattgtcctatccggtgacgctcacctttcagaatgccaaagagggtgtcatcaagcaggataaactaaactatcagtacattcagtatgagtatgatgaggcagcaggattttgggccgtcaaccaggactatctgcttccgcagcccgcaggagaacaggtgtccaagcctggctataatacattttggacagtggacgacaaaaaattgacagacagcggaaaaataaatattacttcagataatccaatggtagaaatagactatgtcatacagaacccgacaattcaacctgttgcggacggtactgttcaagcggatttccacacattaagcatagatttggatgcggcgggcccgcataccgtaggggtacaggtttcacacccactgctgaaagagcagcagggcacagaggatacctatgtgtatttccaatactgctggtgggatgaatccggagaggaaagcggtgtcaacggccccagaagcagggcggaacctgaattgttttccagctccgctgaaaacggaattctaaatcgtgtcaagacgggaaatgcggtcattcctatcgacggccaggagcatgccaggaccgatggacactactacatggtcgaaatctatggttacctggtggaaaacggaggtaccccggagcttttctacaagtcccatcacaattttattgatttcggttcggactccgacacggaggcaaccgtgagcaggagctatacactccaagtggaggtaactcaggtagagcgccatgcagttctcttccagactggtgagcatggtacgctggaggggacttccaactttgcagtaaaagacgggtccacgatgcgtaagagcggttatcctgtaccgagcgttgctgcggacagcggatacagctttaccggctggctgggaacggatggtataacccgcaccagcaatgaagtgctggatctgacggtcaccggggacatgacctttacggcgcagtatgcaaaggattccggctccggcggcagcaccggcacggcccggtacaccattgaggccagcgcgggccatggcggcgggatcagcccggacggcagggtgcgggtgagccgcggcagcgacaagaccttccgcatcacccccgatgccgggtatgagattgccgacgtgctggtggacggcgaaagtgtgggcgcggtcagccgttacacctttgaaaccgtgcgtaagaaccacaccattgaggcggagttccgcgccgtggagaaggccccggatacgggcgtggaccgctggctcaacaccaccgaccatatggcctacctcaatggctacggaaccggcctcttcggccccgacgaccacatgacccgcgccgaggccgcgcagatgttctataatctcctgctggatcaggacgtctccagtacggtccgcttcaccgacgtgcccgccgacgcctggtacgcccgcgcggtggagacactggcctccctgggcatggtggaaggcgtaggcggcgggaaattcgccccggagcgcaccatcacccgggcggagttcacggtgatggccatgcgctttgcccgcctgcccgagggcggggagaatcccttctccgatgtgacctcctccgactggttctacgaccaggtggtgggggcggtgcagtacgggtggatcaccggctacaccgacggcaccttccggccggaggccaccatcacccgggcggaggtgacggccatcaccaaccgcctgctggaccgggcggcggacgaggactacgtggacgaccacgccggcgagctgcgccagttccccgatgtgagcgcctcctactgggcctaccacgacattgtggaggccaccaacgcccacagctaccgtgtctatgacggcgaggagcactggatgtaagcgggaaatggcaaggcccccggaaccaatcggttccgggggccttattcagccggcctggattgcctcataggcctgcatgccccactcgcccagggcgcgcagataggggtcaatggaccgccccagcgccgtcagagagtactctacccggggcggaatttcgggatactgctcccggtggaccagcctggctcgctccaactcctccagggacttggagagcatgacgctggagatgccctccagccgccgttggagttcgttaaagcggattacctcctgctggttgagctcccacaggatgcgcagcttccacttgccgcttaccagccccagggcaaatttgaccggacagccctccatggtgttgcctccccactaagtattttcttaccggctaaagaaaaattgcgtacttgtacttttttcgccgctgtctataatgataccaacaaggaccagaaaaggaaaggggtattttaaaatggaaatacagcaggcgattgagatccggcggagcatccgtgcctacggagaccggccggtggagcgggagaagctggaggccgtgctccgggcgggcaaccaggcccccatcttcggccggctccacatgagcgtctttgcggggccggagcagctccaagcggtggacgcggcggcggtggcgggcatggcccgctccggcgtgcccttcctggagaacctggccgcccaggagggctatcaccctctctacggcgcggcggccctggtggtgctctccgcccccggcggcctggatgagaagggcttcaacatggccaatgtatcctgcgcggcggagaacatgctgctggccgccgccgggctgggactgggctcctgctttctgatggggcccatggccgccttctccgacccggcgctgcgggcccggctggagctgcccgggggctacgagcccctggtaggggtggccctgggctacgccgctctggagcgccccgtcgccccggagcggacggatgccggtatcacctggtgcagataagcaaagcggagggcgcgccctctcgggcggcctccgctttattcgctgctttatttgctttcagcggggggcttgggcttgttgggctccaccgagtcgaacacggccttggcggaagcgcacaggcccgccaggccctggatctcggaggggatgatgatcttggtggccttgccgtcagcggcggcctggaaagcctccagggccttgatgcgcagcaccgcctccctgggatcggcctcgttgagcagcttgatggcctcggcggtggcctgctggaccttgaggatggcctcggcctcgccctcggccttcttgatggcggcctgcttggcggcgtcggcccggagaatcatggactccttctcgccctcggccaccaggatctgactctggcgctggccctcggcccggagcaccgcctcgcgcttctcccgctcggccttcatctgcttctccatggcgctctgtatgtccggagggggctgaatgttcttgacctctacccggttgaccttgatgccccaggggtcggtggcctcgtccagcagggcgcgcatctgggagttgatggtgtcgcggctggtgagggtctgctccagatccatgtcgccgatgatgttgcgcatggtggtgacgctcaggttctcaatggcggacatgggccgctccaccccgtaggcgtagagcttagggtcggtgatctgaaagtagagcaccgtgtcgatctgcatggtgacgttgtccttggtgatgacgggctggggcgggaagtccaccacctgctccttgagggaaaccacctttgccacccgctccaggaacggaaccttgaagtggatgcccacgccccagacggagtggaaggcgcccagccgctcgatgacgtaggccttggactgctgcaccaccttcaggtttgtggccagcaccagaatgagcacgacgaccaggataatgatgataatggggataaacggcatgcgggattcctcctttttctcttcctcggtttggaattaccgtcccggcgtagggacgggcaggggggacacgatgaccttgacgccctcgatgcggagtaccctgacccgggagccggcggggatggcggggcagccctcctcggtgcgggcggtccagggggcgccgttcacggtgatctggccctgggccttcaggttgtcgatggcctgggtgaccacaccttcggcgccgacgacccggtcggcgttggtactctcccggcggggatcggcgtacttcctggccagggggcggatgatgaccagacacaggaaggacaccgccaggaacacagcaaactgcacccagatgttgcccacaaagaaggatgtgagcagggcgcacagggagcctaccgcgaaccacagggaaaccagccccaccgtggcggcctccagcgccagaagggcgacgagggcggcgagccagcagatgcttggtatgggcatgggcactcctcctttcgaaatactactgctatcctagcacaactcggagaaaaagggaagcaaattcgctttccagatttgccaagcagagaaaaataaggtatactgctgtctgagaacgagaacggagcgaggcgatggacatgagagagctggaattgctggtccccaccctgttcgggctggaggggctgtgcgccgaggagctgcggcggctgaagctgccggaggtggcggcggagaacgggcgggtgcggtgcaaggccgccccggcggatatcccacgggtgaacctgaacctgcgcaccggcgagcgggtgctgctggtggtgggccgctaccgggccgccgacttcgaggcgctgtttgagggctgccgcgccttgccctgggaggaatttatcccccgggagggggccttcccggtgaaggggcactccctcaactcccagctccacgcggtgcccgcctgccaggccgtgctgaaaaaggcggccgctgcccggctgggggagaagtacgggctggaaaccctgccggagagcggggcgctgtatcagatccagttctccatcatgcgggacgaggtcaccctgatgctggacaccaccggggccgggctccacaagcggggctaccgggcggtgggggtggccgcccccctgcgggagacgctggccgccgccatggtgctcctctcccgctaccgggggagggaccccttctgcgaccccttctgcggctcgggcaccatcgccatcgaggcggccctcatcgccaaaaaccgggcgccgggcctcaaccgggccttttccgcccagaagtggcgttggctggacagcgggctgtggctccaggccgccgacgaggccatggacggcgagtacgacggggcatacgacatctggggtggggacatcgaccccaaggcggtggccatcgcccgggccaacgcggagaaggcggatgtggaggacgtggtgcgcttcgaggtggcggacgccgccgccttccgccgggacgcgccctatggccgggtggtcaccaacccgccctatggggagcgtatcctggagaagcgggaggcggaggagctttaccgggctttcggccgggcggtgcgcacgctgccggaggggtggcgggtgagcgtgctctcctcccacacggagttcgagcgcacctttggccgtaccgcagacaagaagcgcaagctgtataacggcatgctcaagtgcgacctgttccagtacggaagataggaggaagggattgatatgaggcgaggaaagggaaagcgcgccctggcgggggtgctggccgcggccctgtgcgcgggattgtttttcctcccggcctccgccgcgccggagggggccacggtatggggctacagcgaggggctggcccagtgtgagctggccggaaagtggggctatgtggacgctggccggaatgtggtcatccctctccagtacgacagcatcgtgtccttccagctcggcatcgcggcggtcaacctcaaaggcaagctcggggtgatccggcaggatgggcggtatctcatccagccggagtacgacacccttctccccattgactgcgggctctatatcgcccaaaagggaggcggctggggcgtggtcagtatactccccttcccggacggggcggggagcaccaccaatgtgctctatgagctgagctatgaccaggtgcaggtggccgagcagggcggaactcaggtgctcaccctcaccaaagggagcaccgttaccaaaatcccggtctatgatctgcctggcatcctggcggccaagggggtgccctccgcccagtttcccctcacccggggcaagctgccctccttctccgatgtgtccccccgggactggttcgccctctgggtggacatcgcctacaatgtggggctcacctccggcgtggggaagaaccgttatgcgcccaatcagaccttgaccgtggcggaggccctcaagctggcggccacgattgagagccgctaccagggggacgactttcatctgagcaccgaaggcggaccgtactggtatgtgccggcggtagactactgcctggccagcggcatgattcaaaagggggactttaccgagcgggattacggacgggctgtcacccggcgggaggcggcggagctctttgccgccaccagtctggccaaggccatgccggaactcaactctctggcccgggtgaaggcgtcggtgcccgacatccgcagcggcgatgagggggcggaggccatctacagcctctacgccaagggagtcctgtccggggtggacagccggctgaccttccagccggagggcaccttcacccgggcggaggcggcagccattgtctcccgcatggcccgcaccgagcagcgcctgctcctgtggagctgaccaacggataaggaggatgggccctgtgagacacctgttcttaatcaacccccacgcgggaaaatacgaccgcacccaggagatgcgggagaagctccgcactgccttggccgggcgaggcgagccatgggaggcggcggtcacccaataccccggccacggggccgagctggcccgggcggcggcggagaggggggagccggtgcgcatctatgcctgcggcggcgacggcacccttaacgaggctgttgccggagccgcaggcttcgccaacgccgctgtgacccactaccccatgggttcgggcaacgattttctgcggatgttcggcccggatgcctgccgcttttacgatctccgggctctgctggacgcgccccaggcgccggtggatctcattgagtgcaacgggcggctggccctcaatgtctgctcggtggggttcgacgcccgcatcggttttggtgcggcagacttcaagaagctgcccctggtgagcgggccgctggcctaccagctctccgccgtgcgcaccattgtccaggggattcaccggccttaccgggtgaccatcgacggggagcgtctgccgggggaggcgtttaccctcatttgcgcctgcaacggccgctactatggcgggggctttaacccctgccccgacgccgtgcccgacgacggcctgctggactttgtagtggtgccggctgtctccaggctgaccattctgacgctgatcggcaagtacgccaaggggggcgccggggatatcccgcggatccttctgcgccgcggccgggagatgcacgtcgcctgtgagcgggccgaccggatcaatttggacggtgaagagctggtggattctgagctctctgtccgtgtgtctgctaaaaaagtaaactttttctttcccgaaggaacccattggattccggagaaacgggtgcgaaattagaaaacagaagagagcgggagaaaaaagaagatctgaacaggttttgaatgttaaattgaaataggaaccgcgcgggatggaaatttaacagattatttaaaaattaagacttgcggaatccatcaagtgaggttattattataagcaggttagcactccggtaaaatgagtgctaacctgctgaattggtttacaagaaaaatgaatgatacatgaaggaggaaccccttatgaaactcaagccccttgcagaccgtgtggttatcaagctggtcgaagcggaggagaagaccaagagcggcatcatcctgaccggtgccgccaaggagaagcccgaggtggccgaggtcatcgaggtcggccccggcggcgtggtggacggcaaggagatcaccatgaccgtcaagaagggcgacaaggtcatcaccagcaagtactccggcaccgaggtcaaggtggacggcgaggagtacactatcgtccgtcagggcgacattctggcgatcgtagaataacccagcggaacggcgagataagccgtccacctggggccccgcctggggcggggcggcgcgataagcgccggaggccgacggaattcatttccggcggtcgcagatgaaatccccgggggtccccgcgaaattctgtttcgcggggcggacggcgaggagtacactatcgtccgtcagggcgacattctggcgatcgtagaataacccagtggaacggcgagataagccgtccacctggggcggggcggcgcgataagcgccggaggccgacggaattcatttccggcggccgcagatgaaatccccgggggtccccgcgaaattctgtttcgcggggcggacggcgaggagtacactatcgtccgtcagggcgacatcctcgccattgtggagtaattttccgtgtaggggcgcacagtgtgcgcccgctctctggaacaagaaatcttccgggtgagttccacccgactcaatttggaggtaatacgttatggctaaaattatctgctacggcgaggaagcccgtcacgcgctggagcgcggcgtcaaccagctcgccgataccgtgaagatcaccatgggtcccaagggccgcaatgtagtgctggacaagaagttcggcgcccccctgatcaccaacgacggcgtgaccatcgccaaggagattgagctggacgacccgtttgagaacatgggcgctcagctggtgaaggaggtctccaccaagaccaacgatgtggccggtgacggcaccaccaccgcaaccctgctggcccaggccatcatccgcgagggtctgaagaatctggccgccggcgccaaccccatggtcatgaaaaagggcatcgccaaggccaccaccgccgcggtggaggccattaaggccaactccaagaaagtcaacggttccgccgacatcgcccgcgtgggcaccgtgtcctccagcgacgagaccgtgggcaagctgatcgccgaggccatggagaaggtctcccacgacggcgtcatcaccgtggaggagtccaagaccgccgagacctattccgaggtggttgagggcatgcagtttgaccggggctatatcaccccctatatggtcaccgacactgagaagatggaggccgttctggacgacgccctgattctcattaccgacaagaagatctccaacattcaggagctgctgcccatcctggagcaggtggtgcagtccggcaagaagctgctggtcatcgccgaggacgtggagggcgaggccctgtccaccctgattgtcaacaagctgcgcggcaccctgaatgtggtgtgcgtcaaggcccccggctttggcgaccgccgcaaggagatgctggaggatatcgccgtgctgaccggcggcaccgtcatcacctccgacatgggctatgagctcaaggaggccaccatggacatgctgggccgcgcccgccaggtgaaggtctccaaggagaacaccatcatcgtggacggcgccggctccgccgacgccatcaaggcccgcgtcaaccagatcaagagccagatcgagactaccacctccgactacgaccgcgagaagctccaggagcgcctggccaagatggccggcggcgtggcgatcatccgtgtgggcgccgccaccgaggtagagatgaaggagaagaagctccgcatcgaggacgccctgaacgctacccgcgccgctgtggaagagggcatcgtggccggcggcggcaccgcctatgtcaacgccatcgcctccgtggagaagctgctggccgagaccgagggcgacgagaagaccggtgtgtccatcattgccaaggccctgaccgagcccatgcgccagattgccaccaacgccggcatcgacggctccgtggtgctggagaatgtgaagaaggccgacaaggtgggctacggcttcgatgcctataatgagacctatgtggacatgatctccgctggtatcgtcgatcccaccaaggtgacccgctccgctctggagaatgcggcctccatcgccgccaccctgctgaccaccgagtccctggtggccgacaagccccagccccccgctccggctgctccggctgcccccgatatgggcggcatgtactgagccagagagaaaaaaggcccggaaccgatttggttccgggcctttttgcagggctgtggcctgtcgacggggctaaaaagagctgctgcttccggcatacggaaaagcaagaaatacgaaggcacccccggagccgttggactccgggggtgcctggtgtgtagggggagatcaatcaggccgcggcctgggcggcagcggggatcaactgcgcctggaagaaagcggcggtggcgtccaccgtctgatagagggcagtgaaatcgccagagaacacgttgtaggtgtggtcgcagttatccaccagcagcaactggctgtcggcgttagcggcggccttcacaatcttctcggcgttatcgggggtgacggtagtatcgtccttgccgttgatggccagaatgggggccttgatgtcagcagttaccttcagaatgttggtttcggccacctcctggaaccagcgctcacccagctccaagggctcccgccagtcaaaggtcatcgtataaaagccctcttttttggcctgggcataggcatcctcaaagctggtacccgcaaacagggaggcgccgttcagctccagggcgccggaccaggtgacaacagcctggaaggtgtcggggtgggcctctgcggccagcagggcgtcggttccgccctggctccagcccatgacgcccaggttcccgccgtccacagtctccaggccggccaggtagtccgcggcggccttggcgtcaatgacggcggaggtgtagttgtaatcccggtagctggcggtggagtcgccgtttcccatgaagtcgatgcgcagggtggcgatgccgtcggcggccatacggggggcggccagggcgtaacccatgccggcttcgtcccggttggagccggtgccgtggagcatcaccacgccggggaccttcgcgtccttggaggcggagacgggcagggtcagggtggcgggaatctcatgggcagggatcccgtcctgggcggctacagggatggaaaccacggtctccacataggtgggcttgaggacgctgaagttcttgagcacctgggcaaactcagcgcgggtgagctggccgttggggttcagattgcccttctggtcaccggtcatcaccttgccataatagcagaaggtcatgccctccagatcggcggcggggatggagtcgtagtcgggagcctccttcatagccatgccggaggtgtccacggtaatacccttgtaggaggcgtaatcggcgataatagtggcgataccggaacgggtgattacggtgtcggtgccgtactcagtgccctcaaacaggccggcggaggcggcccagttaatggcgttggcgtaccactcgccctcggtgccggtcacagtggtcttttcaaccgcgggcttaccctccatgttatagagggtctggtacacggtggcgcgggtgacggtgccggtgggctcaaagcccttgttggtgccgttcatgatgccattgtccaaggcatacacggcggcgttgtagtaccaggagccggtctccagatcggcgggatagttggcgggctcgtccacaatggtgatgcggccggcgggctcgccgtactgctcggcggtgatggtgccgtccagctcctcagtggtgtagttgatcagggcgtcctccagggacacgcccacatccttccagccgccggcggtcttgaacacgccgtaggtgtcgccgcccttggcggtgaagtcgttggtggcgatggtgtaggtggcggcgggatcaaaggcctcgccgttcaccgtggagatggtgacgcggctgccgggattggcaggagcgtagtaggtagagttggcgtattgagtgccgttcacatagggaacgccggtgttgagggtgaactcaatgccggacacctgggggaaggcgccgatggcctcgggggtggtgcaggtagcggcctccagggcctccagaagctgggcgccggtcacgtcgatggtggccacggtgttgccgaaggggaagacggccagcaggctcttcttggaaatgtcgcccttggccagagcctcgcggatgccgccgccgttggtcagcgcggcgtccacgttctcctcgcccagagtctggcgggcctgccacaggatggcgtcggcggcaaagtcgcccaggttggtctcagtggtgcggacgccctcgccctcggggaaggtcatctcggccttggtaacaggatcggtggccgcgccgccggagcgggagccgttcagatccacctcggtggtggcgatcttctcgccgtagactttatcaacggcggtgttgcggtcgtccaccagcttggccacatcggcgtcggtcttggtgtaggaggcggcgggaaccagctcgtcggtcagggtgccggtctcctgatcgtagatcaccacgcccacgttggccagagcggtgccggtggagacgatcttggcgccgttgaccacgttggtatcgcctaccttggcaatgatatcggcagtggtggagtggctgtggccgtcgatgaacaggtcaatgccatccacgtgctcgcacacgtcgatggagcggttgccgatgctctcgtcatcgatgcccaggtggcccaggcagacaatcagatcggcgccggccttgttcagctcatcgacctgagcctgggcgacggcgtacagcttgtcggtctgggggaaggtgatgccgggcatcttggaggcgtcggccttggtcagggtctcgggggtggccaggccgaacacgcccaccttcacgccgccgatctcaaagatcttgttggagtcgaagacagtcttgccgtcggcctcagtggtcatgtcggcgcacaggatggggaagtcggcatccttggccagggccttgaggttgtcgatgccgaagtccagctcatggttgcccacggtcatggcatcataaccggcggcgttcatgaactcgatggcgctcttgccctggtcggcgctcaccaggggcttgcccatgatggagtcgccggcagagaccagcagcacatcggcgccagcggcctcgaagtccttcttcagctgggccacaccggccatgccgaaggaagtgccctcctcgtccagatccgcgccgtgggtgtcgttggtatggagaataacaaccttaccatcgacatcgggaatgacatagggggttgcggtttcttcctctgcggcaaaggcggccccgaacagggagcacaccatagccagcacgaggaacagggacaggaatttgcttgcgggttttctcatagaaaacattccacctttcctcattgcctttccctatgaaaggcgttttttggggcatcctaatggtaacaaactggaaacaaaaatacaaggtggcggagaaaaaaagtgtgcaaaaagcacacgaatcttatgagcccgctgctcaaaagattcgtgtaggaaataatttatttttcagcccagttgccggtggcctccgccttcagataggcgttgatgaagccgtccagctcgccgtccatcacggcgttgatgttgctggtctcatagccggtacggttgtcctttaccaactggtagggcataaacacgtaagaacggatctggctgccccactcgatcttgagctgtacacccttgatgtcggagatcttctccgcgtgggcctgcatctgaagctccaccagcttggagcgcagcatccgcatacaggtgtcccggttctgaaactggctgcgctcggtctgacaggaaaccacaatgccggtgggcttgtggatcaggcggacagcggaagaggtcttgttgatgtgctggccgccggcaccggaggagcggaacacctgcatctcgacatcctccgggcggatgtccacctctacatcgtcgggaatctccggcatgacctccagcgcggcgaaggaggtctgacgccgggcgttggcgtcaaagggggagacccggaccagccggtgcacgccgtgctcactcttgaggtggccgtaggcattctcaccctcgatggaaatggtggcgctcttgaggccggcctcgtcgccgtccaggtagtccagcgtcttgcacacgtagccgtggcgctccgcccagcgggtgtacatgcggaagagcatctgcgcccagtcctgggcctcggtgccgcccgcgccggcgtgaaaggtgaggatggcattggagccgtcatactcgccggtgagcagagtggacagcttggcctcctctatctcggcctccagcttggcgaagccctcctccacttcgggaaccagagtctcgtcctcggcctcgttgcccaactcgcacagggtcatcaggtcgtcccactgggtcttgcgcttttgctggccctcaatcttgtcccgtagctgcttgacccgctgctgcaccttttgggccttctccaggttgtcccaaaagccgtcggaagcgctctccgactccagcatctccacctcccggatggccgtctccaggcccaaggcctggtccagctcgtccagctccgggcgcagattgttgagctttaccttgtattcatcaaactgaagcatgtaaaaccacactcatttccataaaatagccctcatattatatccaaaagagtggaaattgtaaagagagtggcaggaaaaaaccgcccgagggcgggcggttttatcgctcactgaccatccagccgggatcggcgcggaaaatcaggtcatctatgtcttcttttggctcggtgcgcagaatggtttcgtcctgctgcgtgtgttgcatggggatacctccttcgtaagtcgtgtacatatcagtatatgccggagggagggaaagatgtatacgattcctgtcgggcggctttttaaaaataggggttgacaagaggctttggctgtggtattctaattgagcactcaaaagcaagagactggagccctccacgccggagtggcggaattggcagacgcccgggacttaaaatcccgtgggaggaatcccgtgccggttcgaccccggtctccggcaccatatcgcggggtagagcagcttggtagctcgtcgggctcataacccggaggtcggtggttcaaatccatcccccgcaaccataaacccgtcagaatccatggattctgacgggttttctcttgttttcatcattttttctggatgattatttttgccgtttttatctgacccaaaccgtgacccatacgggatctcggagcgttcagggctggagactgccggagaggatactgcccatcgttttggccgcctggcgctgggaggccgtggtcacatgggcgtaggtgtccagggtaaaccccgccgagaagtgccccagcattccggataccgttttcacgtccaccccgttctggagggccagggtggcaaatgtgtgacgcaaatcgtggaacctcactcgaggtagccctgcccgtttcagcacccggtggagcatgtgcagcacgctgtccggtgaaatcggcctgccggtggggctagggaacacccacgggctgtctcctgttttctgtttctgtgctttcagaacgcctatcgtatcctctgccagcggcagggtgcggtaggcgtttttcgttttcaggggcgcctccaccacctcgccgttgatccgggcgatctgccgccgtacccggaggtcaccccgctccaaatcaatgtccacccatttcaggccgagaagttctccccggcggagcccagtagccaattccagatagtagagctcaaacacgccgctgtccttggactctctcaggaaggactggagctgctccaccagcagggttttcatctccttgtgctccagccggggcagggcacagccctccgcaggatttgcggtgatcagtttctgctccctggctaagttcatcgcagaggagatgatctggtggatgttccgcacggtcttggggctcagccccttggcctggtgcctggactccagccggcctgcccttccctgctccagcagcttcttgtagaacttctgcaattccagaggagtgagtttttccagggggaccttgccaatgttgggtttgatgtggttgtcgatgtagccccggtaggtctggtgggaggatggccgtacttttatcttggcgtagtgctcaaaccacacctccatccactgccccaccgtgtaccggccaaccttggccgtgtccagtcctttcgcttcctcgattgcttgtttcagcttggccttggcctctgcctgggtttttcccaggacgttcttgtagatggccctgcccgtctccgggtcgcggccggcggtgtaccggccctcccagcgaccgtccttgcgcttgcggaggtttccctccccgttggctctacgttttgccatggcttattacctcctttgcagcaacacaacataccgcagaagaggagaaatagctaggccaacgacgcagagttaacagaacattatcatttgccttttctttgttacaacgtatcatttcccgtccagcgcaaaagaccctatctttgttttatgtggcgcaggatttgcgtatcccggcgtggaaggatgtccccagcccaaacgcccccacagcggcggtcaaaaaggctggaaccagctggtaacactgcctttctcaatactaccgaccacctaaaacttcgaactccgccttcagcgaccacctaagcttggtctgagccgaaatcccgcaaccccttggcacgccccgcactgcggggcgttgtgattgggccggcggcggttcaccgacgtcggtcctttatcctagtactaaaatcgaacgcctccggagaacccagaatcgggcccccggaggccttttctctctggaattcatgctactctgggagggcagattttccgtgacactcccgcccaggaaccacttgcccacacgcggcccaacgccgccaaaatcccgtttcagggggccctgccccacccctgccccgaaaccggcacacaggggtgacacggccgtgacggcggtcgctccctggcttgtccctctctgcactttgccgcacgctgtgcgcttctcccgagaagtgggtgcgggtttccgcccgcaaaaggcgtttggcaggcacttacggcagttcgcctccacctcagaatgggcaaaatctctccgaaaggaaattaacgattgacaacgaataaaatggggaatacaatcaagttgctacaaataaaatagcgaacgcacaggtgcgtctcccctccgggtggagacggaaaagggaagccgggtgaaactcccgcacagggccgctgctgtaattgcggagtcccgccaaaaatgccactggcaggtaatgccgggaaggctggcgtggacggagacgcatgagtcagaaaacctgcctgctgcgtgcacaggacatgctcttcggatctcaggagccagtgtgcggcagaggaatatcccccgtaggcgggggatgaactgtttgcaggaaaaccgggatcggagcacgctccgaccccggttttttgcgttcatcttcccgatacagaaaggcggtcatgcgcaaatggaacgatacgaataccccttctcagccctggtggggcaggaaaagctgaaaaccgcgctgctgctcaacctggtggagccccgcctgggcggcgtgctgatccagggggagaaaggaacggccaagtccacggcggtgcgcggtttggcagagctgatggacgaggtggaggtggcggaggggtgccccttccactgccggatggatggtgaggcgctgtgcgacgagtgccggtccagcccggcccgccgcgccgttccctaccgccgccgagtggtggagctccccgtaagcgccaccgaggaccgggtggtgggcaccctggatctggagcgggcgctgaaggagggcgtccgcgcctttgagcccggcctgctggcccaggccaatggaaatatcctctacgtggacgagatcaacctgctggaggatcacattgtggacgtgctgctggactccgccgccatgggggtcaacaccgtggagcgggaggggatctcctacagccatccggcccgcttcatcctggtgggcaccatgaacccggaggagggggatctgcggccccagctgctggatcgcttcggcctgatggtggaggtgcacggcgaacaggaggcggaggcccgcaaggaggtggtgcgccgccgcctggcctttgaggaaaaccccgccgccttctgcgcccgctgggcgccggagcaggaggccctccggcgtcggatcgggtcggcccaggccctgctgccccaggtgtccctgcccgagcccctgttcgataccgtggcccgggtgtgcaccgctctccaggtggacggccaccgggcggacatcaccatgctcaagacggcacgggctctggcggctctggagggccggacggaggccggaatggaggagctgcggcgggcggcggaactggccctgccccaccgcctgcgccgggccccgtttgagcaggctggagatgccggcatcgactgggaggcgctgttctatggataggcccctgtatcctttcaccgccgtggtggggcaggagcgggcaaagcaggccctcctctgcctggcggtggagccccgcatcggcggggtgctgctgtgcggggaaaaggggacggccaagtccactctggtgcgggccctgggcggcctggagggagtgcgcctgctggagctgccggtaagcgccacggaggacatgctgctgggcggtgtggagctggagacggcggtgcgcaccggccgcagaaccttccagcccggtttgctggcccgggccgacggggcggtactctatgccgacgaggtaaatctgctcccctccgccctgaccgccgccctgctggacacgctggagaccggagtgtgccggatggagcgggacggcatctcccacacctgccccgcccgcttcgccctggtgggcaccatgaatccggaggaggggacgctccgcccccagctgctggaccgcttcggcctctatgtggcggtaacgggggagcgggagccggaggcccggaaagaggtggtgcgccgccgcttggcctttgaggaaacccccgccgcctttcgcgcccagtgggcccggcgggaggagcggctggccgggcagctggccgccgcccgcgccctgctgccccaggtggacgtgggggaggcggaggagcaggccgcctgcctgctggcccggcaggccaacgccgccgggcaccgggcggagctggccatcctgcacaccgcccgcgccctggccgccttggccgggcgcacttacatcaacttggaggatctccacacggcggcggagctggccctgccccaccgcaggcgggagggaagcgaaggcccgcccccgcgacaggagagaggggaggagccccctcagggatctggagcggacggacaggccgggggcggggatggaccggcggacgagtcccaccccgccgacgggccgccgcaggagggggttcaggcccccgcgccacccacggagcaggggccgtcccgagagcggttggagcagggggagaacctctacgaggtgagagccctgctcaccacccgggccgaccgcctggcccgccggggcagcgggcggcgcagcaagacccgctccgccacccggcgggggcgggccgtgggcgaccgcatcccccgggggaaggcggaagatctggcggtgggcgccacgctgcgggccgccgccccctatcagtggagccggggcggcgggcagtccggcctggtcatcctgccccccgacctgcgggtgaaggtgcgggaaagccgcgtgggtgcggacatcgtgttcgccgtggacgccagcggctccatgggtgcggccaggcggatgaaggaggtcaaggaggcggtgctctccatgctgatggactcctaccagaagcgggatcaggtggggctggtggccttccggggcggggaggccgccgctgtgctggagctcacccgcagcgtggagctggcccagcgggagctccaggccctccccaccggcgggcggaccccgctggccgctgggctagaggaggcccgccgcatgctggagcggcagcgccgccgggtgcgggattccctgcccctgctggtgctcatcaccgacggccgggccaatttcagccggggcggcgacccggtggaggaggccctgcgggccgcccggcgggtggcggaggcccacatcccagcggtggtgatcgacaccgagcggcagtttgtctctctggggctggcggctcaggtggcccaggtgatgggtgcgccctgctaccgggtggaggagctgcgggccaggccgctggcccagctggtgcgcggccacagcccggcggcgggttaaggaggcgtctatggtaaagctgcttttcgtgctcatgaatgaataccggctctgggccctgcctcaggccctggccgccctggagcgccggtaccccggcgcggtggagggcagggtctactccgtgcgggagataaatgccgacgccgggctggagcgggcccttctggccgacggcgcggcggcggacatggcctttctggcctcccatggctcgattcagaacctgtactgcttttcccggctgtgggaggcgctggaggggcggccggtctattttacctccaccatgggggacgagctggccgagctgctccccaggttggggctggagccggccctctacgccgcgctggacagctattaccaggcggggagcccgggggatctggaggggctggtgctctgcgccctcaacggccgcttcggcggggattatcccctcagccctccgagcccgccccgggggcagggggtgtacaccctggagggcttcctgccgccggagagggaggcggggtaccgggcacggatggccgccgagacccggccggtcatcggtgtgctgatccatgaccactacgccagaaccggcaatctggagcatgtggacgccctgctgcgggccattcaggcccgggggggcgtcccatacgccctgtccgactccttcgccgccgaccacgggacggagcagggcatcctctaccggatggagcggttctaccgcagggcggacggcacccccattccgggggcgctggtggtgtcctacggcttcagcctgaccaccctggccgggcgggaggcccgggcgggccaggtgcccgccagcgtgtttgagaactggggcctgccggtgatccagggactcaccacctacttcagtgctgacgagtaccggcgggatatccggggcctggatctggtctccctgcccgtgtgcgtctaccagccggagtttgacgggcagctcatttccgtgccctacgcggtgacggagcggacggcggacgggcggaaggtgtgcctccccctgcccgaccgggtgacgagggtggcggagctggcctgccgctgggcggaactggcccgcaagcccatgccggagaaaaaggtggccgtcatctttcacaacatgccgccccgcagcgacaccatcggcagcgcccacggcctggacacgccggagacggtattccgggtggtgcgggccctggagaaccagggcctgcgcacagcctactccttttccagcggggcggagatcattgcccgcatccgggcggcggtgaccaacgacaaccgctggctctccccggaggccgcgctggagcgggcggaggccacggtgccggcggagcagtatcgggggtggttcgaccgtcttaaccccgagacccgggcccagatggaggagagctggggccccgccccgggcaccgtgatggtgtccgggggccagatcgtcatccccggtatccgaaacggcagcctctttgtgggggtgcagcccatgcgctcggcgccggagcgggcggaggagctctaccacagcaccgacagcaccccgccccactcctacctggccttttaccgctgggtggacgaggtgttcggggcggacgtggtgctccacgtgggcacccacggcaccctggagtggctaccgggcaaggagatcggcctgtcctccggctgcttcggcgacatctgcatcggcgggatgccccacctctacatttacaacatcagcatcctgggggaggggatgcaggccaagcgccgctcctacgcctgcatactcgaccacctgatcccctccatggacgacgcggacacctacggcggcctcaccgatctggacgaggccatcgacggctactatcacgcccgccaggcccggcctgcccaggtgcccgcactgctggagcggatcttcaccttggcggaggagctggaggtgactgccgacctccagatggagcgggcggatctggaggccgagccggaggatggggtggcccgcctccaccgctggatgagccgcatcaagacctccctggtgcgggacggcctgcacatctacggccagcccccagagggggagcgcttcgaccacctggcccgagccctggtgcgggtgccaaacggcgccgtgcccgccctggaggacagcatactgctggcccaggggtgggcgcccgaggagctgcgggccgcgccggagcggctctaccccgacgggcgcaccgccctgcgcattgtggacggggcgattgcgacggcccggcggctctttgcccgcctgtcggcggagggctaccggccggaggctgcggcggagctcctggcggaggagggctttccgggggacaccaccccgctggcgcgggtgctggactttgtctgcacccaggcggcgccccggctgcgccaaaccacggacgagctggatctgctgctggcgggggtggaggggcgctttgtcccgcccttgcccggaggcagtccctcccgggggaatgcccacatcctgcccacgggccggaacttttacgccatcgaccccgccgccgtacccagccgggcggcatggacggtgggacaggcgctggcggagcaggcggtcgacgcctaccgggcccagaagggggaaccctggccggagagtgtagcgatcgtggtctactccgacgagtgcatgaaaaccaacggagaggacatcgcagaggtgttcgccctgatgggggtgcgcccccgctatctgggccagacggacaaggtggtgggggtggagcccatccccctggcggagctgggccgcccccgcatcgacgcggtgctgcgcatcagcggcctgttccgggacaccttccccaacgtggtggagctggtggagcgggcggtgctggccgtggccggcctggatgagcccccggagcagaactttgtcaaaaagcacaccgaccaggagcggaagcggctggtggccgagggcctgagcgaaaatgaggcgttggagcaagcatccctgcgggtgttcggctgcccacccggcacctacggcgcaggggtgagcaaggccatccacagccagaactgggagagctggagggatctgagccaggtctacaccctctggagcgcccacgggtacagcagccgcttccacggccaggccatgccggagctgttccgcagccagctgtcctccgtggggatgaccatcaagaacgagtcgtcggtggagatcgacatgctggacagcgacgatttttacagctatcatggcggcctgatcgcctgcgtccgggactgcagcgggcagaggcccgtctccgtggcgggcctcaccgccgaccccgcccgaccggagaccgcccgtgtagagaccgagctggcccgggtcatgcgcagccgcatcctcaatcccaagtggctggagggcctgaagcgccacggctacaagggcgcccaggagctgtccaccacctttgacaccttttttggctgggacgcggcggcggaggtggcctctaactggatgtacgacgccatggcgcggcagttcctcctggacgaggagacccgccggtggatggagcaggtcaacgacgcggcggtgctccagatgagcgaacgcttcctggaggcccaccagcggggtatgtggcaggcgggtgaggaggagctgcgggccatccggcgcatctacatggacatggagggcgtgatggaggacggctttcaatgaagggcgggctggacaccctggtgctgcgcctcaccaaccgctgtaatctggcctgcggctactgctacgccgggagcgggccggcgggtgaggatctctcccccgagcgggcggcagaggccgtggctctggcctgcccgccggggggagccctgcgcatccagttcactggcggggagcccctgctgcgttgggacacggcggcgaaggtgctggacttcggccgggcctccggacggaggttccacgccgccatccagaccaacggcacgctgctcacaccggcgctctgccgggagctgagggcccggcgggtggccgtgggggtgagcctggacggggtgggcccggacaacgccgcccgccgcaccccggagggggagccctccttccaggcgacggcccgcgggctccagaccctggcggcggccggcatggcggccaacctgaccgcggtggtgtcggcgggcagtgtgcgcggcctggaccgtctgctggacttcgccctgtggtgcggcaacgtccacggtgtgggcctggatctggtgcggccccagggccggggcgcgggggcggggctgtccccctccccccacgcgctggccgagggtttgaaccgcctgctggcccgtcacgatcagctggcccggctgggccgcccggtgcggctcaaggagctggagcgcctgcgcctgctgctgcgcacgggctgcagacgggactgctactgcaacgcccagaccgggcgctccctggcggtgacgccggacggccgtctgtggccctgctccgccctggccggggcggaggggtgcctcctggggacgctgggcgcggagacggccctgccgcagagtccctgccccgggctggaaccgccggaggaatgcgcccgctgtcccgccttcggcctgtgcggcgggggctgtcctgccgcccggcgggccgggccctcccccctggactgccagatgcaccggaggatgctggagcacgcctgccggctggaggggaaattggagtggtggaatacgtggaaaaccgcgtttccagatagagaagaaccagatgacaaggaggaatcgcaatgatacaccatctgaatcgggcggccgggctgtgcctgaccgccgccctgctgctcacagcggcgggctgcggccagcagactgtgccggagagtcccagcccgtcccccgtggtggagaccgctgcggcagacaagaacgacctgaccgtggtgcgcagcatggagctccagtatgccaacaacttcgcggtggactactgtgccaatggctgtaagatcatcaccgacggcgcgggacagaagttcctgtgggtgcccgaggggggagaggtgccggacgacacgggggacatgaccgttctccaggccccgctgaccaagctgggctgtttctccaccacccacgccaccctgtttcacgccatcggggcgctggacaaggtgagtctggtgaccaccgacaaggataaatggcatattgagcagattgcgcagcagattgaggacggcaccaccacctatgtgggcaagaactccgcccccgactatgagctcatcagcgccgccgcgccccagatcatcctgatctccgccaacaccatgcacggcagcgacgaggtgctggccaagctggacgagctgagcatcccctacatcgccgacagccagcacctggagaaccaccccctgggccgcgtggagtgggtcaagctggtgggcgccctgcttgacatggaggaggaggccgacgcctacttcgacgaagaggtgcagcgggtgaatgccgtggccgagagcgtggccggggagagcgagcaccccaccatcctccagacctatatcttcaagggtaccgtctacgtgcgcaacggcggcgactatgtcaacaagatgctggagctggccggcggcacatatccctttgcggagctggagcccggccagggcggcaacaccaagatgaccgtggaggagttctatcagggggcggtggacgccgagatcctgatctatgacaataccagcgacgtcagcgtgtccaccgtggcagacattctggccaacggggactatctggcggatatgaaggccatccaggagggcaacgtctggggcatccagaagaactactggcagtctgccgacgacgtggccaccatgatcgaggacattgccaccattatctaccaccccgaggacgcggatcagctccactacttctataagctgcccgccgaataagccgcggagcccggcaggggaacgcacggaaaaggagagaggcctatgagacaacacacgagaaacgccgtgggatttgttgtgctggcaatactgatggccgccctgttttactggaacatcaataccggctcggtgcatctgagcctggagcgcatgctcaccctcctccgctggggcaacgacggcaccacggagggcaatatcctctggaaaatccgcctgtcccgcctgctgggggctgccctgctgggcggggcgctgtccatcgcgggcttcctgctccagacctttttcaaaaaccccatcgccggcccctttgtgctgggcatctcctccggctcccgcctgtttgtgggcttcttcctcctggcggccacccccattgtgacggggggcttctccccctacgtcatcttcctggcggccttcgccggggcactggcggccatggctctggtgctggccgtgtccagccgggtgcagaacctagccatgctgctggtcatcggcatgatgatcggctacatctgcgacgcgggcaccgacttcatgatcaccttcgccgagagcagccagctccagaatttcaccatctggacgatgggcagcttctccggcatgacctgggccaccctgggggcctccgccctgatcaccatccccacggtggtgctggtgtttctcctgtccaagcccctgggggcctatctgctgggtgagaactacgccaagagcatgggggtcaacgtcaagggcttccgtgtggccctgatcctcctgtccagcatcctgtcggcctgcgtcaccgcctttgccggccccatctcctttgtgggcatcgccgtgccccacatcacccgcctgatcttccgcacctcccggcccatggtgctcataccggccaccttcctcacgggaagcgtgttctgcctggcctgcgacctcatcgcccgcacggccttttcccccacggagctcaccatcagcaccgtcacctcagtgctgggcgcccccgtggtgatctggctgatgatcaagcgcaggaggaatggctgatgtattttgagacccagaagctgtcggtgggctaccatcgccggcccctcatcgaggacatcgatatcggcatctggcaggggggcattctctgcctgatcggccccaatggctccggcaaatccaccatcctgcgcagcatcacccgccatctgacaaagctgggcggcgtggtggccatcggcggccgggatttggacggcatgagcgacaaggagctggcccgccacgtgtcggtggtgctcaccgaccgcatcgagccggagctcatgacctgctgggaggtggtggccgccgggcgctacccctacacaaaccacttcggaaagctctccagggaggatcagcgcatcgtggaggactccatggcccgggtcaacgctctggagctgcgggagcagcggtttaccgaactcagcgacggccagaagcagcgggtgctgctggcccgggccctgtgccagcagccggaggtgatcgtcctggacgagcccaccagctatctggacatccgccacaagatcgagctgctggacatcctccgggagatgaccgccagccgggggctgtccgtggtgctctccctccacgaggtggatctggccaccaagctggccgacgtggtggtgctggtaaaggataacgccatcttccgctgcggcgcgccggaggacgtactggatgacgacaccatccgccagctctacgatatccacgacggcagcttcaacctgctgctgggcagcgtggagctgtgcggcgcggcaggggagccgcgggtattcgtggtgcccggagaaggcagaggggccccctgcttccgggccctgcaaaagagggggctcccctttgccgccgggatcctccagcggtgtgacgtggactgggcggtggcggagaccctggccgcccgccggtatgaggcggagagcttttcccctcccgcgccggacaccctgcgcgccgcggtggcggcggcctgttcgtccgcctgtgtggtggacagcggggccgccatcggcccctacaaccgggagaatctggagctgctgcgggcggcggccggggcgggggtgccggtgctcaccctgcggagggagcggctggagagcctggaggccgcccggccatttgacaccgtccgggccctgatggacgaggccgcccgcctggcggccggaaaggggggaggggtgtgtccctcgtctggcgctgcctcaggcgctatcgctggtactgtctgacggccctcctgtttgtcctgctggaggccaactgtgaactgctgctgcctaccctgatggcgcggatgatcgacgagggggtgcgcacgggggaactgggccgcgtcctggagctggggggctggatggcggtggcggccctggcgggcatcctgtgcgtgctggtgcgcaacttctgctccggcacggcctcccagcggtttggggccgagctccgccggacgctgtttgccaaatgcctccgcctgaccgaggggggcgtggatcagctcgggagcggcgccctggtcacgcggatgtccagcgactgtgaccagctctccagatcggtgaactccgccctgcgcattggtgtcaaggcccccgccctgtgcgtgggcagcgtggtctatgccatggggctggacatggggctgagctggattgtgctggcggtggtgctgggggtgacggccctcatcacggcctatctggcggagagcggccggcgcttccgccgggtgcgggaggccatggaccgggtcaacaccaccgtggaggaatttctgcgcggcatccgcctgatccgggccctggggcgggaggagtgggaaaaccgccgctttcaggcgtccaacggagagctggaggagtccggcatccggcttcagctcctgtcggcctggttcgcccccctggtcaccctcactgtcaacctgggcatcgcggcggtgctgtgggcggcggggtgcggcggggcagaggcgggcacggtgtccgccctcgtcacctatatgacccagatgctcacctccctgatgactctcattgacgtgttcaagctgctcatccgggccagaacctccgtccggcgggtggaggaggtgctggctctcccggaggagggaaccctggaggggccggaggagacaggcgtggaggagccggtgctggagctgcgccatgtgaccttcgcctaccccgggggaagcggcgtgcccgccctgcaggacatctccttcacactgcggcggggggagcggctggcggtggtgggtcccaccggcgcgggcaagaccaccctggcctggctgtgcgcccggctctatgagccccagaagggagagctgtacctgggcgggcggcccatgagccgccttcccctggggcgggtgcggcggcaggtggtggtggccgcccagcggagcgccctcttttccggcaccatccgggaaaatctgtccatgggtgaccggggcgcgggggaggcacagctctgtgccgccctggagactgctcaggccgccgacttcgtggcggaggccggcggcctggacgccgtgctagttcaggggggcgtcaacctctccgggggacagcggcagcggctctctctggcccgggctctagtgcggggaggcgcggtgctggtgctggatgactgtaccagcgccctggacccggccactgagcggagggtgctggatggattggagcggcggccggggcaggcggtgctccacatcactcagaaggtgcgcgcggcccgcacggcagatcggatcctggtgctggaggaggggcggcaggtgggtctgggcactcaccggagcctgctggacacctgccccacctaccgggaaatctgggcctctcaggccccggaagaggagggagaagatggcacacggtgaagcgtccggcggccctgtgctgcctccccagcggcggagcctccagcagcgcttcggcccccacgccagggccagggacgggcggggcaccgtgcggcggctcctggccctctacgcccgctggggcagggagctgctgctggtggtgtgccttaccctgctctccaccggggcggccctggcggtaccctatctgctgggacgggcggtggactgctttctgccttggggcggcgtggagcgtgccgctctgtcagtgctgctgcccactctggcaggggccgcggcggcacagtggctcggcaactggggccgacgccgctggatggagatcctctcccagcggatggtggcccgcatccggagggagtgctttgccaagctggggcggctgcccctgtcctactttgaccgccacccccatggggataccatgaaccgcctggtcagcgatgccgacaacgtcagcaccgtggcggctgagacggtgactcagctcctgtccagcctgctgatggtggcgggggcgttggccatcatggcggccctcagcccgctgctcactctgacggccctggcaactgtgccggtgatcgccctgtgcacccgcctgatctcccggcggagcaggacgctctaccgccggcaggccgatgagctgggccgcctgagcggcctggtgcaggagtccctctccaacagccgcacggtgaagctctaccaccagcaggaagagctgttggcgcggtttgaccagatgaacggggcgctgtgcgccacatcggtgaaggcgcagatctgcgccggcctgctcagcccgctggtgaacatggtcaacaacctgggctttgccctgatcgcctgcgccgggggcgtgctggccctccgcggcgcggtgagcgttgggctggtggtcagcttcctgggctactcccggcagttggggcggcccctgaacagcattgccgccctcttttccagcattcagcaggccgtcgctggggccgagcggctctttgagattttggacgagccggagctgccccccgatgtcccgggtgcagtctcaccccggacggtgcggggagaggtgtcctttgcggatgtgtccttctcctatgagccggacaggccggtgctggagcatgtgagcttccgcgtcagggcaggggaggtggccgcatttgtgggggagaccggcgcgggcaagaccaccctggtcaacctgctgatccgggcctatgagccgacggcgggggagatccggctggacggcgtgcccctcggtcggtacagccgggaaggactgagccggtgcttctccgtggtgctccaggagaccgtctttttccgcggcacggtgctggacaatctgcgctatgcccgcccggaggccacggaggcggaggttgtccatgcggcaaaactggcccatgcccacggtttcatccagcgcctgccccaggggtaccaaaccctcatgtcgggggcggccggggaattcagccaggggcagtaccagcttttggccatggcccgggccctggtgagccgggcgcctatcctcatcctggacgaggccaccagcagtgtggatactaccacggagcagcggctccagcaggccaccctccgcctgctggagggccgcacctgcttcctgatcgcccaccgtccctccaccatccgccgggccgaccgcatctttgtggtgggggagcgggggatcgtggagtccggcacatatgatgaactgatgaaaaagcgaggagtttattggagtgtgcttcaatgaatcagtcgttttgaatgtaatttatgaccagcaggccattgttcttttgaccttgcgcctccgttggggtgttttgtcttatagtgacgaatttctgataacgtgttgctactttgacccatgacttgacccagaacgggaaaaatcccagcggagcaggcagcatacgacctccgggatttggcagttttctggaacgaaaagggtcggaaagcacttgaaatcaaaggattgaactgccggtagcagctcataacccggaggtcggtggttcaaatccatcccccgcaaccatatggacaagggtaggagtattgaacagttttcttagactgtccaatactcctacccttattccatgggagaaagccttggtatttcaggtgttttcttttctcttgcacagctcggtaattcatatcgcaaagataaaagacgcaagcttggtggttgaaaaatgaaaaatacccagttttgaaccctttgtccagatcagcctgtccgttctttcctttgcgcatggagcaattcaaacctatccggcgtcctgtagttgagcgtgctgtgggggcgcttggtgttgtaaaattctatgtaagtatcaacgctttgcatgaactggcgctcagagcaatattgtgtccgataaatctcctcccgcttcatggaggcaaagaaggactcggctacagcattgtcatgaggacggctggacttcgagaaagattggacaaccttgtttatgcgaagtagtttccggaatgtgttggatgtatattgcgggccttggtcgctgtgaaacatcagctgctggggctcgtttctgttccgatatacctgacgaaaggtagaggtaaccaagtaggtactattctttggtgatactctgtgggctactactttacgtgagaaaaggtcgaggattacgcagatatagagatacttgccattgaccttaaagcaagtgatgtcgctgacccaaacacggttcggttcatccactttgaattgctgctgtagcatgttctgcttttttgccagccgctcacttttctgataatcgcgtttggagtagatggatacactttgtaatcccatttctctcatcagttcagccacatacttgggcgaagtccgaacgcctcgatctgctaacacagcagcgattttatttgcgccaaacctttgttggctctcatcgaaagctgcttggatatgctctttcatctcggctcttcgtttatcataggctgttacctcttttcgccggaagatatggttgtagaaggtaccgcgggatacacaaagcgcctcgcataaggcatggacactatactgaccatgcaatttggcaagctcttgcagcttttcttgaagcgacgctgaaaccgtgcagttgaccttttgtaaaatctcgatcttcttctccaacttttgaagtttctgtttcattttgataaacgcctgctggctgacagcatgaccggagtctgtcatggtcacagtgtacggcttgatccatgtgtagaacgtactcttgggcacgccggagtcggcgcagatatcggagacggattctccggcctggtaacgagcaaccagggagtgcttttcttctatgctgatgcgcatgatttgattcctcctgtaaaatggtgtagaataccattgtacagaaaccagtattcatttccaaagatgcaatttttccaaagtaagatactgtaaaatgcattaagcatcaaggattagtccattccgaaaacccgattagaaaacttagtttatttaatactggtgaggagaaaggcatatgtacatacagaagatacacattgaaaattttagactattaaagaatgtagatatcgttttagacaaatctttaacgctgatagttggtaaaaataatactggtaagacatcagttgcccatctgcttcaatcaatcattaacgaaaagaagaatttatcgtttaacgactatcctcttgaatgtcggaaacagctttatgaggcacttgaaaaatactgggcaggtcaacttaaaaatactgagataaaaaatcaaatagaggaaacgaaggtatgagattctcggaacaacgcgtcagccaatagagactaagaggcagaagaagcagtggcgagagcttacaggtgatttatgtgtcgcaagacaaggaactatctatgacattttaaggacagctgctgatagtaggttgattcctattcctccagatattgaaaattatatggaagaatataattctggtgatgattctgcctatgagcagacgaccctaaaacagttttatgaaattaaatatggtgaagtcatcaatgctattaatttcttcaagccggatgccgtgtactccacagaccatggagtaaaaggtgaggagtacgaaaatgttctttttgtgatgggcagaggatggaatctctgcaagtttgaagattcattatataaagacgaaaaatccctgcaaggcaaagaacttgcaacatacattaggaattgaaacttgttttacgtgtgttgttccaggccgaggaagagactcgctattttagttactgtagagattaacgcacaattcgaaacgtatttgcgcaatgtatttggtgctgataatgtggtaccatatagtgagtttataatgtgaaactccaatatgcataggtgcttttatctttttagtatattagtgtagcctttcctcaaaacaaaaacgttgcggctactttccaaccgcgacccatttacactgggagcgcggtcggtgtaccacactataggggcttttccctgaaacgagaaaatatcgattttaaccgtcccttccaaaaaatagccacaccgaaaggtgtggctattttttggttaccgggaagattttacatgctcgggcggagtgaatccgccctgcgccaaggttttcgcttgcggcgaaaacgcttgtacggcgcaaaggcgccgccggccagaaggccggagcttccgggttgtaaatatccagattgatctggcacttcataagaaaccctggaacttcaatggttccagggtttttctttttgccttaaattgcaaaattttagttcattgccgtcccggcggcgtcctaaatttaatattttgcatttctgccaatcatattttcgatgctatagcatgtcaaaaattcatactggatgtctgccacctgtgcaataaggagccaggcatatcaaaaagggggatgtaattttacattccccctttattatgtggaagaagtttaaacatgaatattttagcagtttatgtcctaatatatacaaagaagagttttcttgtcgcaaattatagctcagtgagattaaggaaccaatctatataacttgatatattccgctgtaaaaagagaaataaaaattctaaatatttttgctgttctcagctttctattttgttatttcatatagagacatttattaaatagaaactctaaatctcattaagtgaggaatatttctggatatttttatacactgggccgaaaaataacttatccgtacgacaacgggccgcggttcggctcgtttatgacgaaccgatggagaaactgaccgggaaacagaaccgaaccaccggccccatggacccggcggactgttatgtgccgggattcgggtagaaaatagataccgtgtgcttcccaatggcatgggctatgcggaaatcctgatcaggcagatgggcattacggatgagatgattcacaagtaccgggagaagtttacacatgacgggctgggagcctgtctataagctctggctcgccggggctggctggctgcggagcccgtctatacctgcatggtacaacacaccagagagacccaggagggccgggaactgtgggggcggtattggagcggcatctccgttggttcgagtaccacctagtacagtctaaacacattgatagacccggattagagtacacataaagctgataatggagcactgcatgaggaagtaccggaacagactgaggcggatgaagcagttctggagcatccggtattttataagaattccggggggagcctggaaagtgaaaaaagacctgctgcattcatgcagcaggtcttcttgagtgcgcagtcaaaatcaatacactccgtacttgtaaacgcgatcgggaacgtccttattgatcttgtcctcgtcgatcatggccacggcgcggacgatggtgccgtcgcccatataccagcgcagcgggaaggcacagaacatgaagcgctgtcccttcaccttctcgatgtcgccgcccaggttctcaatacccatgacgttgttgcccagcaggatggtatgcaccggctcccactcggggtagtcctcgatgggctcgtggccgaactccttcttgtactcgtccacgatgcgggggacgtaggggccggggccgtgctgggccgcgtaggtatagaggatgtggtccagcgcctgcagatcgaagcccacgcccttgaccttgtggtccaccagccagtgggcgccctcgatggacatgccgggggagtacatgaagtagtcgtcgttctcgccccagcgctggttcatgccggtgcagatgagaacccagtcgccctcctggatgccgccctccaccttgtcggcggccttctcgatgtcctcaacggtgatcagctcccagtgctttttggggatatccaggcagaccgcagggccatagtagttctccagaggcagctcgtgggtataaggagactcgggaatcacgtgggagggggagtcggcgtgggtggagttgtgcatgtggaagtcgttgaaggtctgaagcagacgatagtgcatgggcatgtgctgcacacggtcgatgtggaagtcgccgttggagggccacaggggattgccgcggccgaagggatgggacaggtcaacaagtacggtcttgcccatagtataagactccttttctttatgattaaaattgagttgtaacaaaatcaggaacagacggcgggctgaaaatgaagatctgtggcggtctggatcatctcatcccaggtggaaaagcgggtgctctcctgcacgaaacggtccaaaagcgcgtcgtcatagatgagacagtcggaattccagtttacaaagacagcgctggagtagcgaaagccctcaaaggactggaaacgggtattggcctgcatgaaggaatcgtcaaagatttgcatcagcaggtccttcatttcctgggggtagtccacatattgaaaagccatatcaaccttcctgactgccgtagaacttctgagcctgttcctctacgtacttacgccacacgggctggtcggcagccatacggggacggatgtactcgctcatctggccgcccttgccgtggaccagctcgccgttgctgatggacatatacagcagaggctcagagggggggcagccctcgatgtggatggcgttggggtgcttcttcaggtatttgcgggtacagttgccgtggagcaccagcttctcgtcgggtacctcgtcgggcacttcattttttccgccagccacaaccacgaagtcggagcggcgctcgtagtcgccgatggccttcagagtctccatgttgatggccagcaacgcctgacagctggagcaggcgccatcacacagcaccttgtactcgggccaacgggtgctcatatcaccgatgtagggaacccacattttcttatagcattcggcgacggtggcgcccacaacgtcaatgttctcccgctcggtgatacccagtccggtctcggcagccacccggaagtaatccaccgcctcggcgtcgatgccgaccagatcgcaggcgatcaggtccacggccacgggatcggaggaccccaggatgcagcccacttcaatgggaacgggggtgtggggggagtagccgctggcgggacggatggcgtccacgatgttgatatccgcgcggcacacgctccacacatccatcatagccatggtcagattctgctggtgcatctgcaggtgtacagcatcctgcaccacacccttaatatttttcagggcgcaggagaacaccatgctggcgtgcgccttcaggatgggcaggttgatgagatgatcggcctccagcaggcggcggggcagcttgacatgatggaggttggagcggtagccgcggacagccacattgatcaggtccttgtcggccttaatatcgtagagctccacgccctcctcgcgggccacatcggctatgccagagacctcatagcattccatggtatcgcagccgatggcggcagcctcggcaataacaatgctcttgggattggctttcttgacttcgcggatgactgcgcggacgacctcgggattggtgcagaccgaagtatcggcgggggaagcgtggccggcgttgggcttgagcattacagtggtgccgggcttgatcatgtttgttacgccgcccatcaggtcaaagaccttggtgacgctgtcctgaatactggcctctttggccagagcaaccagcgctttcttgtcagacatactcagttctcccttcagttcttggtaatctctatttccatcaatggattatgcaaggctgatgccaagtgtaatgagccgctttttgctaaattgcagggggatttggggcgtgttgttgcagaaataggacaatacacaattgcttgttgcagcgctgaaacaaacttagagtagcttatgaagcttgagcagctcggcgaaggcgtaatcccggaatttgcacacactgtcgaccgtgttgccaatggagggatcccggttggcgatctcctcgtcaaccccttgggcgtatacctcattccagggggttgactcctcgccgtatttatcggcaatggcccggaagccgccttccacgcccagactgatggtgagcagctggccggtgaccgccatacgcatgccggggccgaacataattgccttgtccatgtcctccacagagcagacgccgtcccgcacgcactccttggcggcatctagtgcggcccaggaaaggcggttgacaataaagccgtagatctcttttttacacaccacggccaccttacccatgccagtgtaaatctccttggccttttcaatggcttcgggggcggtctgctcaccgccgcacagctcgatcagaggcagcaggtaggcggggttataggggtggcccaccaagatagattggggatagagggagccctcctggagcttggtggggaagagcttggaggtggagctgcatataatggcgtcgggacccgtgactttctgaatggtggcataggtggattttttcaattccagccgctcggggatgcattcctgcacgaaattagcgcccttcacggcatcctccagatcattcgagaaatgacaggcatttagtgcggcatcggcctgctctctggtggcggcgccagccccaactaggatatccaggatatggctgatgttctggcgcattttctcatgaggcaccacatcgtagagaaccgtctgataaccgttcagcatggcgttggcagccaagccggcgccgatcataccggtgcctacaaaaactgctttgatattgcccatgtcactttcctcatttctttgtttgttatccagggcgtctatggttactgcgtccttacgaaaagaataaagcaaacgacgtgccaaatatttgagcattaaacaaggctacaaacggcttattttaatctggcgttgcaaaatggaatcaaattgggacagtgaatggcgctgttattgcaaatatgcaacagcagcgccggtgagaaaacaagtagtaaaaaacagaaagatatagaagtttctgtttgttcctaaaataggttttatgtggaatcctgtccctgtctgtgatttttctggaggagcgttgacaaacgagttgtaatgctgttaaattagtgaaacacaaggagggcctatgtaaggctttcattttaaggttgattcgcacaagtgtgtttattgtgcccggtgcatccagccctgcgcttcagtgatcctgtattttgatgaatcgggattgccggccataaagcagaaggccgacggcgttgtgtgtgggggatggctgctgcggctgtcagcactgcatggcagagcaggcggctctaccctggcagcatcagcaaaagcgactgggaaaagcagttggagtgagagccgggcccgcaatcccggcgtcatgttttttgtcactgcgccccatatccttatgatccactcataacgggagtgaggacagtggaggactggtccggtattacagcctgattctgggttttggctatctggaatatcgctatgcctgtggcgtacagcgggaggggaccgcggaaatcagggagctgaacctctggacgcctttgtaccgatggaaaagatggataaaggagaaacgtaatgaaccagtattcggccatacgagaggtgcggaggcttctcagagcagtaatggagcaaagccagcgaccggaactgattgaacagttggaggagattgacgtccgattaaaggcgtttcatgaccggggcattgattttaaagaagtggtggacgggctggatgacagcatcatgattaccgatgcggaggggacggtgttgtacatcaaccctgcctacacccgcaacacagagattacagaggaggacgtgcttaatcgggatgtccgtagcctgattggcaaggacaaactgtttaccggcggcgcggtgaccagtgtgctggagagtgggaagagcgcctttcggctctccaccacttacaagaccggggagccgttggtgggctatgtggtggggacgcccatcttcaaggaggacggcagcctacgccaggtagtggcttgcagccggcccatcgtgacgctcagctcgttgcaggaggattttgaggcatttgttaaggaaatcaatgccatccaccccaagaccatcaccacggactcagacaagcatctgtcggagggaatgatagggaaatacggctccttgaagcagatcgacactctgctggaccgggtggcgcccaccgatgcctcggtcctcatcaccggcgaatccggcgtgggcaaggaggtggtagcggacgagatctaccgccgcagcctgcggaagaacaagccctatgtaaagattaactgtgcctcaatcccgggacatctgctggagtcggagctctttggatatgagaagggggccttcaccggagccaacaccaagggcaaggtcggcctgtttgagtacgctaaccacggtacacttatgctggacgagattggcgatatgcccatggacctacaggtaaaactgttgcgggccatccagtcccaggagatcacccgcatcggcggaacccgccccatcaagctggatatccgctttctggcactgaccaacgcagacctaaagaagaaggtggcggaggggagtttccgccaggacctctactaccggctcaatgtgatccccattgctgtgccggcgctgcggcagcgcacagaggattttgaggagctgtgccggcactttattcatcgctttaccaaaaaatatgaccggaccttttgcctgacggaatggcagatcgactatatgaaacgctatcagtggccgggcaacatccgggaactggagaacgtgatggagtacctgatcctgtgcagttccggtatcggccgcattgaggacgatgtgctgagaggtctgctgaacgtgccggaggagaacctggggccacagccggcagcgcccgcaattgtggagtgtgcacaggaagaggagccggaggagctgccgccggaggacctggacttcaacaccgcagtggctggatttgagaaaaagctgctggagcaggtgctgaaggaatcgtccaatctacgggaggccagccgcaagctgaatattaacgcctctaccatctgccgcaagatcaagcagtatgggattgactacgaaaaccgcagaagctgattcaaatagaaagcagcaagggccgcccgattattccggcggcccttgctgcttagagagagattgaaataggcggggaacggattacttcatcagctcctgctcggtagccacgtccttgttgtacctggtgggatggatgatggcggtaaggatcatgttgaccacaagcaggccgatgtagaagatgtaggcgccccgcaggctgccggtgacccggatggcgaaggcgttaacctggtagttggtcatgagcacaatctgcatcagggggaagaacacagagttgaccatggtgaagccatggcggccgaacacagaggcgggcagggacacgatgaagttggcggcggcgcccacggcaatgccgatcatagctacagacacatacacaccgattgtggtgtcagtacagttgatggccaaggcgatgcagtaccagatcaggaagaggataatggcctttttgacgccgaacttctggtcaatggcgccgaagaggtaggaaccgcacacgccgatgatggcgcacaccgtcatcaggcccacagcggcctcctgagagaagcccaagctggtattgcggaccaccagttggctcatgacgccggtggtcaccagctggttgatgccgatgatgagggcgcacagccacagctccttggttttcagcagcttaccggcagtccagccgccgttgtcctcgctgttgccctggaagtactcccgctcatagacctcgcgggtcacgttgtcaggatacatgccgcactcctggggggtgttgcggacaagaaccaggccgatgatgcccagcacgatggcccccaccgccacgtagctcatgccgttggcaaagccgaaagcgccgatggtgaaggaaatcagaggcacatagaaggcggagccgcagttatggcccatggtggtgaagccgttggccagacccttcttcttggggaaccactgggcaatcagggtgttgccggcgatgtaggctgcgccgttgataaagcaggttaccagggtcagggcaatgaagtaggtggtcagggtggtgctgtgccccagaaaaatgtaggacaggccggcgccgatcaggcagacgcccgacagcagccgggggcccacggatacgttgatgcgggcgatgagaatataggctacaacaccgatcatgccggcccaggtagccacgcccagcacctggtcgtaggcgatgccggtggactcggcgaaggcgggagctacgatgttcaggccgtcaatggaaaagccgatcagaaagaagaacatcagggcctggtacaggatgatgccccagcctttggagaacttcatgctcatattttcactggcgatttgggaactctttttactcataggttactcactcctcttttgtactgtagatggtcagccttggctctgttgtaccggcttgcgctggcggcaagacttgcctcctctctctccatttcgttcaacaaataggttaagagcaaagttgatgccaataaaatacgataaaattacatgatagaaaggccctggacagaaggatagctacgcatccgttgcacggcggcaacaggcatttttgctttgcaacagctatccccgggccaactgtaggaggctgactaccgcgccgtagtccaaggcccggaagttgccgcccagcgttcctgccatatcgggcaaagccagccgcgccaggtgctcaatggaaacgtcgcacaaaccagcctcccgaagtgtaaccggaaggcctgacgagcagaggaagtcctgaaacgcggagatgccgttttgggcggtttgaatctggctgggacaggaggggacctgccaaaccagggtgcagaagtcggcaatggcctcggtttcatcggtgagcatatacttgcaccatgcggtcatcaggatacccagggccgcaccgtggggcaggcccagctcggtggtaaacacatgagagagggcgtgacaggcaaagtccccctcaaaccccagcatattactgtgggccacggtggaggcccacatcagttggctgcgggcatcatagctgtcggggtgagccagcgcccggggcagctctgtaatcacagtgcgcatcaccgccgcacacatctggctgcggagggtgccctgctgccccttgtggaaataccgctcaaaagcgtgagaaaagatatctaccgcgcaggaggcggtctgtcggggcggtagtgtataggtgaggactggattcatcagtgcgaagcgggggcgggtcagaggctcgtccagggccgccttttcgtggaggacatcgtggcagaggacagagaccccgttggcctcactggcggtagcggcggtggtgagcaccacgccgatgggcagggcccgctgagtttgggctttgccgctgtatagttcccatagggggacgctgtttttggcacccaggcttatggccttcgcggtgtcgatcacactgccgccgcccacggccagcagcagggtgatctttttttccttggccagccgccggccttcctccgcagtggaaagggccgggttttcctgaataccgccaaagagggtgaccgtaaggccgtgagcctccaaatcggcggtgagtctgcccagcaggccgctgcggcggatgcgatcgctgccgtaaagcaacatgacgttgggaccaaagggggcagagagcgccccggcatgggtttccgcatcccggccgaagattacctgggtgggaaaggaaaaggtaaagtttttcatggaagtatcacagtcaggccatcttgataagcacggcggtacccatgccgcctccggcgcacagggtggccaggccgtatttgccgccccggcgtttcaactcgtagagcagggtgaccaccagacggctgccggtggcgcccacagggtggcccagagaaatgccgccgccgttgacgttcagcttgtcctcgtcgatgcccagggtgcgctggcaggccacacactgggcagcaaaggcttcgttgatctcgaagaggtcgatatcggacacggtgaggccagccttctccagcaccttctgggtggcgctgatggggccgatgcccatcaggtcgggggaaacgccggtggtggccacagcgactacgcgggccaggatgggcagtcccagctttttggaaagctcctcctccattagcagaacgccggaggaggcgtcgttcatgccggaggcgttgccggcggtgacccggccgtcggccttaaaggtgggcttcagcttagccagcttctccagggtggtgtcccggcggacgtgctcgtcggtagtaatgacggtgttctccctcttgccatggacggtgatggggatgatctcctcctcgaatttgcctgcgtcaatggcggcggcggcacgctgctgggagcggagggcatactgatccatgtcctcccgggtaaccccgtaggcatcggccacgttttcggcagtgatgcccatagaggggcccacgcccaggttggtcagggagtcccacatggaatcccgcagctccatgtggccgtacttcttgccgtagcgggcgtcaaacaccataaagggagcggcgctcatgcagtcggcaccgccggccataatgcacttggcctccccggccatgatctgatagaagcccaactgaatggaggacatggaggaggtgcagttgcggtggacggtgattccgggcaccgtgtcggggaggccggccttgatggcggccacgcgggccaggttgttctccaaataggtgcgctggtagttgcagccccagatcacatcgtcgatgagggcggggtccacgccggagcgctggatcagagcctgcatcaccgggatggacaggtccagggcggtcagggtcttgaactgaccgccgatggtgccgatgggggtgcggcaggcggatacgattgcaacatgattcatacagaataactcctctcaaggtgtggtgggattggttctttgaatataaactgcaagtcagatgccaacaattttgcttgatttttaggaataaacctcccacctaacactgcgatgatgcggggatgcaacaagaagggggtacaagcaggtgtgcttgttccgaaaatgcaatagcggaggagagcaaagctgtaaaacccggctgcgggacggaaaacagacgggtgggcatggtggacaatgtgatgtatatcaggagtgtaccggttaagagcaacgtccggtttgtggagcgggcagagcgggtcatcgaggagtacggcaagcaggccgccacccctgacgaagcccgggagctcttaaacctgaacatacaggtgtatttatttaggaagaatggtggtgtccaccggtggacaccaccattcttcggtccaacctaaacagcgcgcgcatgacctgcggcttggcccagaggccggaataccgggatctgatgactgccgcctccaagctgaccggcgagcgggtaaaccgctccacccacaaccacagcgtaagggggcgggaggccgtgtgtgccggcgtgaactactgcggcagccccggatgtgacttggtgttggtggtgcgcggctaccagataaggtgtgcggatatcggatgggtaacagggcggaacgtcctctatctctggattgcggaggagttcatgtagctgcgataggacagaagtccgcatcaaagacggccaagaaagatgcagagcggtacccatccgtccacaaagcagcctgtggcgggctggtgcgcattgcggctggttattgacaaggcgctatttgaccaggttcaaacgcgcctgtgcaagcggaagcagtgctatttcagcaaggtgaactgcggggctctcttttgaaagcaggcgaacagcaggattccctgcctttgctgtcacccccataatgtatttgtcagacatttagagcaaaccaatgcttttttaaatagtgattatggtttcatgcatttcgcacaatttaaaagtatgatataataatatacctagataatgcggtgattagcggaaagggtaggtggccatgcaatcaggaaaaggcgttgttcatctgacagaactggaaagcggggactataaaagtatctgtgaaaacctttacgacgggatacacatcaccgacggtacgggtaccattctgttcattaacaaggcctatacccgtacaactggaatcctcccggaggagctgttggggcggaaggtatcggaaattgaggcggagggaatcctttacaccggctctgtaacggaacgcgtgctggctcaaggtaagagaatcaactctgtggccacgattcatcgtttgaataaagaagtactggtgacagggacgccggtgtttgacgaggagaagaatatcaggctggtagtaaccaacacacgggacttcccagagctgaagcggttggaggctcaactattggctttggaggaaaagcaggaaaaagcagttcaggaactggcctatctccgcagccagcaggcgggcgataagcagacgatctaccacagcgcggccatgcgggaagtgatggaaattgtgcggaaagttgcgccgacggatgtcacggtacttatcacgggggaatctggtacgggtaaggaactcatcgccaacgagatttatcagaacagcgaccggtgcggcaaaccctttatcaaactcaactgtgccgctatccctgctgaactgttggagtctgaactattcggatatgaggagggggcctttacgggggccaaacgaaccggaaaagcgggcatgttcgagttggccaataccggagttcttcttttggatgaggttggggatatgcccatggcactccaggccaagctgctccgggtacttcaggagcgcagcctggtgcgtctgggtggcagcaagacgatagatttggatatccgggtgattgcagccaccaataaggaattgctgacacaggtgcggcaggggaggttccgggaggatttgtactatcggctcagtgtggtgcctatcgaactcaagccccttcgggagcgtcgggaggacattccggtactggccaggcacttctgtgagctgtatcggcgtaaatacggaaaagagaccgaactctccccaaacgccgtggcagagttagccaagtatgactggcctggcaacatcagagagctggaaaatctggtggagcggctggtggttaccgacagtgtgggtgaaattggtggctgccaggttgcgtcggcgctgaatttttccggtaccgcggtaccggaggctggccctcaaagggccagcctcaaaactcaactacagacctttgaacgtgaattgatcctcggagctctggagcggactggttcccttcgcaaggcggcggccagcctgggggtagagcattctactcttgtaaaaaaatgtaagagactggggattagctccgcaaaacggtgatttttttgaccactatggtgaattttttccgactcaaggaatataacatttttaaatttctataatcagcataacttgcccaagttttctggtctacatgtggataaagtacaagggttgtatagggaggagagagaagggcctggtgattattttcaccaggcccttctctctcctccttctcctgtaccgctataattccttgcggctcagtagattccgggaaatctataaggaatatataaaattggcacgaaaattgcggaagtaaattagtaaatttgtaggaggaggcaaaaccatgagcgagctgaagaacaagacgatcatcactgtggccactacgggcgcctggcccaccaaggccaacaaccccaacgtgcccatgaccccggaggagatttccgaggacgtgtacgcctgctggaaggccggcgcggccatcgcccacctgcacatgcgggacgacgaggggcacggcaccatggacaaggagaagttccgcaagaccgtggagctgctgcgcgccaaccaccccgactgcgacatcatcctgaacatgaccacctccggcgacatccacgccgacgacaccacccgccagatccacctgaaggagctgcgccccgagatgggttcctatgactgcggctccatgaactggctgcacacctccctgttcctcaacccccctgccttcctggaggagctgggcaagaacatgcaggagtggggcgtcaagccggagatcgaggcctttgacccgggcatgattgccaacgccgcctactacctgaagaagggcgtgctgaaggccccccttcacttccagttctgcatgggctgcgccaacggcatccccggctccctgaagaacctgatctttatgaaggaaaccatggagtccctgtgccccggctccacctggagctgctttggtgtgggccactgcgcgttggagatgctgtacggcgctgtggcactgggcggccacatccgcgtgggcatggaggacaacgtgatgtacgccaagggcgttctggccgagagcaacgtgcagttcgtggagcgcgcccgccgcgtcatcgaggagtacggcaagcaggtcgccacccccgccgaggcccgcgggattttgggcttgaagtgaaaaaaggaagtcgagcagcatgaaagaaatcaagaacattctcatctgtggcgcgggcatgatgggcaagaacatcggctatgtgtttgcgtccaaccccagcttccaggtgggcatgtatgatctgtaccccactgatgtggaggcgggcatccgcaccaacaccaggcagctcctggacaagggcgtcatcaccgagcaggagctgagcgaccgtctctcccgcatctcctttaccaacgacatcgacagcgatctggtgaagaacgccgatctggtgatcgaagccgttttcgaggacatgaagatcaagcgggagaccttcgccaagctggaggcgcgctgccgccccgacaccatcttctgcaccaactcctctgtcatgagccccagcgagatctccgccgagctgaagcaccgtgagcgctttgtgggcactcacttctggaaccccggccacctgatccccctggtggaggtggtcaagtccgacgcctccagcgacgaggtggcccagacggtgatggaggtgctccgctccgtgggcaagaagcccgtgctgtgcaaaaaggacgtgcccggcttcatcgccaaccgcatgcagcacgccctgtggcgtgaggccatctccatcgtggagaacggcatcgccgacgccgccaccgtggacgaggcggtgcgctactccttcggcctgcggctgccccagctcggccccatggagaacgccgacatggtgggtaccgacctgacctataacatccacgactacatcctgcgggatctggaggactcccacgagccttcccccctgctcaagcagctccgcgatgcgggcaagatcggcttcaagaccggcgagggcttccagaagtggacgcctgagcaggtcgcccagtccaacgccgagctcaatgagtatctgattcggatgctctacggaaagtaaggaaagtgtgttccgcgactcacatgccatagatagaacgagagaatgagaaaggaagcgatcccatgtcgaaacagccccaagcagcagcccaactgaagggcactccgctgtggcgtatgagcaaaaagttcaatttcgccgcagagaaaattattccggactcttttgtgttctgtatcatcttgaccttccttgtgttcgtgctgtcccttctcctgtgcggcaaaagcccgctggagcttctggtgggatggtgggacggcctgagcagccagtttaccttggctttccagatgggcattatggttgtcgtgtgcgccacctgcgcccgcagtccacaggtgaaccgtctgctgaacaagatgtccagcatggtacacagccggactacggcactggtgctgatgatgatcttcggctatgtcacctctatgatgaactatgccttctgcaccatagttactcccatcctcgccatgcagcttgccaagcatgtacgcggcctgcacttccccatgatggtggctggtggatatacctgcatgattctgggtcagtgcctggggccttccgccaccctgtattccaatctggctactgagggcagctcttatgctcagattgtcggccagaccatgagtgtggctgagacttgctacaaccccatgaatatcatcctgtttacggttctggcaatcgcatttaccgttattgtcgtgtttacccgccctggcgaagacgagctggtggagctgcgcgatgtagccacccaggccgatgtggagccaaagagctataagagcaccaaaaaggccgaaacccctgcggaaaagatgaacacgttccgccccattatgtggctggtcggcgccttcatctttgcgtatgccgtctactcctttgtcaccaaggggtttctgggaagcctgaacatgaattttgtgattttcctgtttgtgggtgtcaactgcttcctcttccctgagccgcatcagtggatggaggcccacacagactccatgcatctggccacggatatcatcctccagttccccttctatggcgctatcatgggcatgatgtatctggacggcggcttgggttctgtgctggtcaatgctatcacgtctgtcgccaccgctcacaccatgccgatctttaccttcctgtcggcctgcctggtaaatctgtttatcccctctcagggcggacagtttaccgtgcagggaccgctgattgtggaggctgcaaaggccatacccggtaccgacctggtcaactgcctcaatgcgtttgtgctgggcgatgagtgtacgaacctgcttcagcccttgtatgtcatccctgccctgtccgtagttggcatgaagctgaaagatgtatggggctttatggcatttatctgcgtgttctggattggcatcacctgtctcggcctgtattttatccccatgtttgtctgaatgaaacgcctcatcacgagttaatgctgggaacatacccgtgctgttgcacccccttatttgagtggcaactagcagccggtgaatgctcctgctgtctggctggcgcttaagtatcggcactccttggaatgatcaaaaaacgtttatagcccttctcaaaaagcagaaccccgtcagaattcacagattctgacggggtttctttcgcggcctgattcctttccgtttttgtctgacccaaatgggatttcagagcagtctccacgtggctttggccgcctggcgctgggagaccgtggtgacatgggcgcagggttccggggtaaaccacgcagagaagtccccggacagccccacccgctttagcacttggtgaagcatatgcagaacactgtccggggaggccggcacaccggcaggacttcggtttccttacctccgttgatacgggtgatctgccgcttaacccggaggtcacccctctccaaatcaatgcattcccatttggagcccggcagtcctcaccgacagagtccagtggctggttctgggtacaccaatacgccgcccttttttgctttccgcaggagggattgggggtgctttaacgacagaggcttcatcgcctggtgctccagcctgggcagggtccagcttttcggcggggtggcggggaccagcctttgcgctctgaccaagttcattacagaggaagtgatctggcggatattttgtactatcttgggacgcaggcctctgggctgttcctacgctcaagccgttctatccgtccctcgggcagaaggtccttgtagagcttctccagcgggcacctctcaacattgggcctagattgtcaatatagccctcagccaaaggtggatacgggcttctgcccataaaagttgtctaacgaccgcccgcggtaagttaaatgctccgctatcccgccaagtggtaaaaaacagcgcattcacagcaagcggcgaaaggcaggcttacagaggcggggcatctgcataggagtcccgatagcgacggcgatactccgccggggtcaagttatagtttaactcaaaaattttatagaactgtgtaatattactgtaacctacctcttggataatctcattgatgctccgctgggaggcgatcagcagcttttgagcatgggccagccgtagcagtgtgacataggacttgaaggagatctgcatctcatccttgaacaaatggcgaaaataggactcatttaaattcagatggcttgccacctgagagagagtcagatgttcggtgtagtggtcgttaatatatacctgggcctcagcaatctttggactaaaattggggacatgctggacgttttccaacgaactgcgggcttgagacagggccaaaagcacctgccgcagcagaatgtccaattccatttggtagaaaggactccgcttggcatacacctgataggccctgcggatgagttcgcccagccagtcggcggccgggtcgtcggcatggatgcggttttgaaaactcagggggttatagtttagaaaacgcagatactggctgtctactgcttggctgccaggagcagagatagccgagggaaggaaaatcagaaagaggtatcggcagtcctgggttccgtcagagatggctacgtggctctcgtagttattagagatgaagatgtcacctggcttcacagggtagaccttgttcagataaacaaatttccctgttcctcccacgcacaggccgatctcgtggtagcggtgccagtgcatagggtccttatttcccatcacttgataggggaacagatggatggggaaggaggggtcaaattcatattcccagttaaaacgtttcgtggcgtgcacctcccaacgcggcgacagaatagagctcttggagttctgacggggaccaactggggaaagaaggaaaaacatatttaaaaatacaaaaattgatctataaaggaaggatttatcctagtgcttaagtactatgatagcacagacctgtaaaaattccaagaaaccagccggaattgttataaaaagtaccggaaatgggattgattctatcggaagtggattgtaacatatagacaataagagcgcagtttcattaagaaagtttgatgttattgtgctccgatattgaaaggaagtgtatggaatgaaaaagtggatcgcgttgctcctgtcctgtgttatgctcctggcgatggtagccggctgcggcggcacccctgcagagagcccgagtcagtcgggcggcgctggtgaaactgccccccaatccgcggcgccggacggtgaaaccaagacttacaaggttggcttctccaacgtctgggtgggcaacacctggggcgtacagtgcgtcaacgagttggaagcctatctgcgcaacaatgagcagatctccgagtactatatctacaatgccgataacgacgtaaacaagcagatttccgacatcgaggatctgatcgccaagggcgtggatatgttgattctccagccgatctctgccgaatccgtggcggcagtggtagaagaggcctacgacgcgggaattgtggtggtaaattgtacctcccccctgtcggatgctaccgataaatacaacgtgtctgtggtggcccgggattacgacttcggctacgtgggcgccaagtggctgtgcgaggagttgggcggcgagggcaatattgtctgcctggatggcatggccggcctgtccagtgctgtgctgcgcatgcagggtgcccaggatgcctttgccgaataccccggcatcaatgtaattgcctccgagtatgccgactgggactatgctactgccaagcctgtcatggaaaacttgctggccgcttatgatgacatcgacggcatctggtcttcgggcggtgatatgacccgtgcagccatcgaggtgtgggccgactccggtcgggactggatccccatgatgggtgaggactgcaacggctttctgaaactgtggagcgagtacaaggacgacggcctgtcctgcattgccacctccctgccaacttggctgtttgcttacggtgccgagcttggcctggagatcctgaatggtacctatgagggggagaaggacattatcgtggagattcccaccattaccaatgaccaagtggacgactatgttcgctgggatctgtctgacagcttctggtgtggcaccaaaatgaccgaggaggatattgtggctctgtacggaaacggaaacgacggctctcagggccttactggcgagggtgtagctacagatcactgatggatcactgatggctgaagagaggccggagcccacacacattaccggagtgcatgcatagccgtggaaggccggcttccggcatcactgggaaagggcgagaagggtgacctgatcgcctctttcctcacctcgtagcgggaggatgagcgtattggaacaggactatctggaattcttacatatcacaaaaaactttcccggcgttacagccctggatgacgtgtccatgtcggtacataggggagagatccacgccctggtgggtgagaacggggcgggaaagagcaccctgatgaatatactgggggggaacctccagcccaacggaggggagctccggctggatggtcatccggtaaaaatttccagccccattgacgcatacagaaagggcattggtttcgtccaccaggagtcaaacctgctggagaacctatcggtgtgtgaaaatgtgtttctggggcgggaacgggttctctccctggggcgcaccgaccggaaaggcatgtgccgggagatccgggagtgctgccagcgcttgggatatcaattggagccggaaaggccggtagcggaactaaacctggctgagcggcaaagtgtggagatcgtacgggctctgctgggcagcccccgtgtcctgattctggacgagcccacagccgctctggcggaggacgaagtggcccggctgtttcgaatcgttcgggaactgcggcaggagggggtgtctgtgctatatatttcccaccggctggacgagatcatggagctggccgaccgggtaacggtacttaaggacggcaagctggtgggcaccttggagcggggggagctggacaaagagcgcatggtcagtatgatggtgggccgcgttattgaggacatctaccccgaccgcagccaggtgcagttcggcccggaactgctgcgggtggaggggctgaccctcccgggaaagctggagcacgtgagtttctccgttcgggccggcgagattgtggggttgggcggcttggagggacagggccagcggacggcaatcagagctatttttggtgaccagcggttttcccaggggagtatctctgtggagaatacccctctgaaaagcggcggaattgccgagcgcatccgcaatggcgtggcctacgtcacccacgatcggcggggggaggggctggtgcttacccagtccatccggaagaacagcgccctggccgccttgcggcggctatgcactctcatgggcctggtaaaggaggacgaggagcgaacccaggtggccgaacagatggacagtctccagatcaaggcatcctctatggaggagttggtatcccacctatccggaggcaaccaacagaaggtgatgctggcccggtggctgatgacgaaacccagagtgctcatcatcgacgagcccaccaaaggcatcgacatcggtgcccgcatgtccatctatcagattatccaccagcttaccgaggcggggatcggcattttaatgcttaccagcgatatggtggagctgattggcctgtctgaccggaccctggtgttctatgagggtaagatcgtcaaagagctgtcccgcggcgagatcactgaggagcgggtcatgaaggccgccagcggcatgacggaggagtaggcttatgaaacaactggaaaggatccaccgcaaacttgccgccaccccccaactcagcagtgtgctgaccatctgcgggctgctgcttgtggtgttcgcctccatgtgcgtgtactcggagagctatcgttccgcctataatgtcaccaatgtactggtacagtgtgttccgctggcgtgcgtcagcctggggcagaccctggtcatcatcagtggcggtatcgacctgtctgtgggttcgaccatcagtgtgtgtaccgccattgccgcccgcctcatgggcagcgacaacccggcgcaggtgttcctgggtgtggtagtggtgtttgcctttgccgccggcgtgggtttggtcaacggtgcgggagtcaactatctcaaggtgccgcccatgattaccacactgtgcaccagcacgattctggagggtgtggcactgtggatactgcccgtggcggggggcaaaatcaacgccgatttcgcccgggtgatctacaagaagtgggacatcatcagtatgccgctgctcattctggtggcgctatttctggtgatgcgctacctgctctatcgcacccggacgggcaccagcctgtatgctatcggccgcagcagaaccattgccgcctctatgggcatcaagaccacccgggccagcatgaaggcatacgtgctggcggccctgtgtgccgcggtgacaggactgctgctggcctcccgaatgcgggtgggggaccccacctgtggggccaactacggtatggattccatcgccgccaccgtgattggcgggacttccctggcgggcggtactggactgctatcaggcacagtggcaggagcgctcctcatcggcatgctgtccaatgtcatgaacaacctcaacgtgaaccaattttaccagtacgtgatgaagggagcccttctcatcgcggccatggtggtttactccatttcagatcggctggaggtgcgtcgccgtgcgtcataatctgctgttgaaccgctcgagggggactgcctccctccagccgctggtgttgctggccatcatcgtggtgatgaccggcgcccaggctgttctggtgcccggctccctgacggtggagcagatgctcatcatctcacgccaagcgtctgctctcggcatcatcaccctgggtcaggcggcggttattctggtggggggcatcgacctgtccgtgggtgccaccgtcatgatggtaaacatcttctgcatatcggcaatgcagggcagtgatgccaatggtccattggggctgctggtgtgcctgtttatcggacttgccattggtactgccaacgccttcggcgtgctgtttctaaagattgccccctttgtcatgaccctgtgtaccactaccatctgcgagggcatctgctacgtttacacccagggctcaccgaccggcagcgcggccccctttatacgtgccctcgggaccggccgcctgttcggcatccctttttccacgctgatctggctggctctggcggccgctatgtgggtggtgctgcgctttaccgccctgggccgcaggctgtacgccgtgggcggcagccccaaggctgcccgactcagcggcatcgccaatgtccgggtagtggccggggcctatatcttctgcgctctcatgtccgctgtggccggcctgatcctgaccgggtaccacaacattgcttccctgaccctggcaggggactactccatgaactcactggctgcggccctgattggcggcaacgccattgagggcggtcggggcggcgtttggggtgtggtgctgggctcctttttcatgatgctgctcatggctatcctgaccatgctgggcatcagccaggtgggcaagctgatcattcagggctgcatcatattagcagtggtggctgcccagcaactgtggaaaaaggactgaaaggagcgggcaaatgcgcatcggaatcaatcaattctgttttccagccccctgcgacgtgtcggaggccctgcaccgggccaagggactgggctatgactgcatggagatctgcctgaccgccgaccggaagcccggcccggcggtggggagtgtcaccgatgccctggatatcagcggctatttcaaccggctgctgcacgagcacgcaggggaggcggagtttctccaactgcgccgcatggcagaggaggtggggattcctctatgcagcgtgggcggcatcatcagcttctccatctatcccctgacagcccgggagccggaggtcgtccaaaagtccatggatgcagtccggcggatgctggacgcagctcaggtgctgggagcggcctctgctctggtgatcccgggtgtggccactgaggatatggcatacgaggaggcctacaccaccgcccaggagagagtgtctgaactggccgactatgccccgtcggtgggactgatgatcgaaaatgtctggaataacatgctgtatagcccactggagctggcacggtttgtggatgagatggggcggaagaatgtgggcatctgcttcgacatagccaacgcccggcgcttcggctacccagagcagtggatccgtaccctgggcggacggattctggaattccattgcaaggactaccgcatgtcggtggacaacatcaacggttttaccaacctgctggacggggatgtaaactatccggcggtgatggcggctatccgggacatcggctttgacggggatctgattgtggagctgatcccgccggcccatcacctggtggagcgcaccctccgccatgcgctggagaccctgcgggagctgtgtcaaatgaatggaaggaaaggatgaaaacaggatgaaaaaatacggtgtcatgattgtgggaaccgggtgggtgtccggcgagcacatccgggcttttgaaatgacggagcgggctcaggtgacggctattgtctcccgcagccgggagaagggggaggccaaaatgcgggagtacggcctggagggccgctgtaaggtctacaccgactatcaggaaggtctaaaggaccccaatgtagacattgtggtcatctgcacgccaaacgatatgcactgtgagcagaccattctggctgccgaggcggggaaacacatcctgattgaaaagccggtggccctcacctgggaggatacgaaacgaatggatgaggcggtgcgcaaggccggagtcaagacgctggtgggctatgttctccactacaaccccttgttcgtcaccgccaagaagattcagaaggacttcatcggcgaactgaagtacgcggagaccgactatttccaccgggttatgggtgatattccctgctatcagtggacgtgcaaaaagagcgtagggggcagctccctgctggccggcggttgccacgccgtggatgccatgcggtggtttatgcaggacgaggtggtgtccgtctacgcccagtccagcaaaatgcgcacggatctcgagtttgacggtaccatctccattatcctgaaattcaagaacggtgcggttggtaaggtgggcagcagctatgacttcatcagtccctatgtgttcaatcttcacctgtgcggcaccaagggcaccctctggaatgaaaagttgtggtcgcccggccagatcacggagcagcgggattacatggaattgccggtgctcacccctaacagcggtgatgtgaagcaccaccccttccctgaagaggcagcccatttcctggactgcatcatccacgacagggagacagactgccctatgtccgatgcggtcaaaactcaggaaattgtctttgccgctgacctgtccgccgccaccggcgaggtcgtacatctgcctttaaaataaataaaataataaacttcgggaataaccatacattcattctttgcagtcataaacctgtcggaatccatgggctctgacaggttttgttttgcgtttgtccccttcttaggctgaattttgctttttgggctttacccaagccgtaatccgtacgggattttggagcagtcatgactggagactgacagagagcggaatgccgccatggctgcctggcgctggcaagcggtggttgcgtgggcgtaagcgtctaaggtgggctctgctgaccggagctgcttcaggagaccacctgagtctgttcgcaggccaagctggcccacacgaggtcaactgccgttcaaaactccctgtcatgggtatgaccttgccctcagactgaggccgacgtatgggatttggggcccttgccgcacttcaagtgccccgttcagcgtttcactgcatccagttcccaccggcattattttggtgcaaagcatgcggtgttccaacagttgcgtttctctgaaaaagaagtatataatatacaaaaccgtttcaggcacgaatctacgcggcaacagggggtgggacgcgatgaccttgcgggagatcatgaaaaccaatgtcgggcccgaacgcttagaaccatcattaccccaggagacggagattcatcatctgcgtccagaggtggtggatgaaggcgtggtctatgaggttgtgaatgaactgggggataaggtgggggagctggcaggcagccaactggcctttctggtccgccgtgcggtggagctggacctgaatgaactgctcaacgccatcgaggacggcgtggtagtgctggaccgggaaggtcgaatttgctatgaaaatgaggcgtacagccgcatcattggagtacccatgcgcaagaccatcgggcgggatatgcatgtcattgagccggatgctctgctgcttcgggtgctggagagcggaaagcccgacgcccgaaagtggcaccgcatcaaatcggtggggaaatatgtatctatgcgtatgtttcccgtgtggcggaacggtgtggtggccggggccttctccatcttccgggatgtgacggaactcaaccgtcttggcatggaagtggaacggatcacccaggtggccgaggaattgacgagccagttggatgtagagctctccaggtttcagatgattggacaggatcctcaatttcgcactcttttgtcccgtgctgtcaccgccgccaaaaccgacgcgacggtgcttattcggggggaaaatggtgtgggcaaggagggctttgcaaagctgattcaccaagccagtccccgaagaaataggccttttataacggtcaactgcgctgccatcccggaggcgctcattgagagcgagctgttcggctatgaggagggctcctttacaggggcaaggaaaggggggaagctgggcaagtttgagctggcccagggaggtaccctctttctggacgaggtgggggatatgcccctgataatgcagagcaagctgctgcgggtgcttcaagggggggagattgagaaagtcgggcgggaagaaaacgtggcggtggatgtgcgaattgtggcggccacaaatcagcccctggaggaactgatagaacaaagacggtttcgggccgacctgtactatcgcctcaatgtggtgcccctctccataccgccgttgcgggaacggcagggcgatattctccctctggcctatcactttctggaccgctacaacgaacgatatcagaagtcggccgttatcagccgaggggccgcacaggcgctgctgtcctatgattggccgggtaatgtacggcagctccaaaactgcatcgagtcggccgtcattctgtgtggtcaggaggagatcgacccggccgacctttctctgggcacgatcgccagaccggttgaggcggcccagcccgcagatacgcggcaatatggaaccctgcgggaagagaccatccgttttgagggacagttgctgcgggcagtgctggagcagtgcggcggagacagggatgagactgcccaccggctgggcatcagccggcgcacattttaccgcaaatggtcggaaactcagccgtgacaaaaatggcacaagagacaaatttgacaccaataaaaggacagatttgacacaggcggggtagtcctgcgtatcatacgcaggactaccccgcctgttttcctaggggcccaagggaaagtggcagttggtcaggagttggcacgcaagttgcttttttgtgagtgtccaaacaaacacaagccttcacacattttatttaaaagaaaggggcaaaagcatccatgaagagcagcagctattccggatttttcaaactctctgttgaggagcgcatgaaggaggtggccgagttctgtacactgacgccggaggagcaggccatcctgaaggaggctgattccctggacatggacaaggccgaccacatgattgagaatgtaattggccgctttacgctccccatgggcgtgggaatcaatttcgtaatcaacggcaaggattacgtcatccccatggttacggaggagccatccgtggtggcggcctgctccaatgcagccaagatggcccggcctggcggcggcttcactaccgactataccggcagtgtcatgatttcccagatccaactgctggacgtgcctgcccccttctacgccaaggggaagatcctggagaacaaggagaagatcgccgagatctgcaacgccagggaccccatgctggtgaagctgggcggcggcgtgaaggacgtggaggtccgggtgctggactccctggtgggcccaatggtggtggttcacctgctggtggacaccggggatgccatgggcgccaacgcggtgaacactatggccgaggccgtggcacccttcctggaggagctcaccggcggccgcgccgagctgcgtatcctctccaacctggcagaccaccgaatcgcccgcgcccgcgccgtcttcaagaaggacgccattggcggggaagaggttgtcgataaaatgatcgccgcctatgcctttgccgccgcagatccctaccgggcggccaccaacaacaagggcatcatgaacggcatcatccccgtggtcattgccaccggcaacgacacccgcgctatcgagtccggtgcccacgcctacgccgcccgcagcggacagtactcccccttcgcaacctgggagaagaacgccgacggcgatctggtgggctccatcgagatgccgatggccgtgggcctcgtgggcggcgccaccaaaattcaccccgccgccaaggtggcagtgaagatgctgggcgtcaagaccgccggggagctggcccagatcattgctgccgtgggcctggctcagaacatggccgccatgcgggctttggccaccgagggcattcagcggggccacatgtccctccacgcccgcaacctggccgccaccgccggcgccaccggagagctgctggagaaaattgtaaagcagatggtatctgaaaaaaatgtccggctggagtacgcccaggagctggtcaaacagtatcagaagtaaccggagggaggcacgcgtatgttagccattctggtgtccctggcgctgctgatcgttctcaccttccgtaagatcaacatcgtggtggtgggcattgccgccgccgcagtcatggccctcctatccggtcagccggtggtgaccgcagtcaccgatacctatatgacaggggccgcccaatttgtgagggacaacttcctgctcttctttttcagcgtcctgttcggaaaggtcatggaggagacaggggcggctgcctccattgccaaattcttggctgagctgttgggggagaagtttgccatcctgggcgtcattttctccggcgcagtgctggtctatggcggtgtcaccactctggtggtggtgttcagcctgtatcccattgccctctccctgttcaagaaggccaacctgccccgctatctgctgcccggcgcgattgccggcggttgctttacctttgcctgcgcaaactttcccggcacgcccaatctggtcaatgtgatccccaccacctatctggggaccaacaccatggcggcccctctggtgggcgtgatcaccggaattgctgtcatgctcatggtgtgtgtttacttcctgtgggaggcaagtcgggcccgggcccggggggactgctttgtggaggacgaggccactacccagagcctggtcaaggcggcatccatggtgcggctgcccagcccgatcatcgccatcctgcccattgtgctcatcctgatcctgctcaacgtgttcaagcagcatgtggtcgtggccatgctgggcggcatccttctgtgcgtggtgctgttctttcggaatgtccacggtgtgctggacatgttctcttactctgccgaaaattcggccatcgccatcatcaacactgcggtggtggtgggcttcggctcggttgtgcaggcctctcagggatttcagaagctgctggatttcgccaccagtctggaaaatatcccgcccctgctggccttcggcctgatgaccaccattctggccggcgcctgcggctccggctccggcggtttgggtatcgccctgtccgccatggcggacaaatacatctccctgggcctggccccggagatcctgcaccgggtgggctccgccgcctccgttggcctggacagtctgccccataacggcgcggtaatcaccctgctgactatctgcggccaaagtcacaaggagagctataagtacattttcttccccacggttgtctttaccctggccggcatgtttctctccattgccctggggaccgtgctctatcccatctcataaggagttatatcatggaactaaaattgcctgaacagattgacgttatcgacatcaccatgcgggacgggcttcagaatgaggaacactatgtgcccctggaggccaaactctatctggctgacaggctgatcaaggccggctttaagcgcctggaggtgggctccatcagccatgtggcctatgtgccgcagtttaaggacgtagacgagctgctgctcaagcttcccaaggacgtggatgtggagtataccgttctggccctcacccccaaggccatcgagcgggtgggcggcctgctggatcggggggccaagatcgaccgggtgctcacaggccagattgccaccagcgaagcatacgccatgaagaacatgcgccgtacccaccagcagctctttgacgaggcagagaagaacgtgaaggccctccacgatatgggcatcaagagggtggctggcaacatcggcactgtgttcggctgcccgatccaggggaaggtatccatcgaacgggcctacgaatttgtggatcgtatgtttgatatcggctttgacgaggtagagcactccgattccgacggtatcgctacacccagggacattgcagactacttccaagtcattttggaaaagcacccagaccccgcacggcactccttccatatccatgatattcgcggcatgggcatcgccgggtactacgcagccatgctggctggtatccgcacctttgactgcaccgtgggcggcatcggcggccaggtggcaaactttttggatggtgtgccggttaagggcgcgggggattactactttgacacctgccgcaccggcttggtatccaccgaagactttatcactatggtcaatggcatgggtatccataccggcgtggatcaggagaagctctacgctctcggccgcaatctggaaaagatgctgggccgtccgctttactcctttaccagcacggtgcgttccggtttgggagcataacagaagccaccggcggaggtctttcggtttgtatgggactgggctggagactgaagttctaagcgcagggacacccggagcgtatatggcgcggttgcccgtcggtgtccgctgctcaaaacagctcggtatagattttgagcacacgagtctcgtccagggggacgaagctgttgtccatcaggcggccctggccagtgatgacgctatgggtaaagtcccggaggtcctgcctggtgacgccatactcgtggagggaccgttttggaagaagctggttgagcagctcttctaggcggtcatatacggcttgggtgccgcagcccagaaggcgggcgagaaattcattcattacggcaatttctccatcttggcggagctccagatagtttttcagcacaccggtgaacatggcgtagttgctctcgccgtgggccacatggtattttccacccagcggatagctcattgcgtgtaccgccgcgcagccggcggtgccgaaggcaatgccggcgaagttggatgccaccaggaaatcatccagcaggatatgcagggcctcacggccctcggacacgaggcgctggtagccatggagaatcatttcgatggctttgtatccgaacagcttggtgtagggggtagccctgggggacagggaggattccaccgcatgcaccagggcatcaatggagctggcggcaaacacgccgaagggcagcccctccagcagttggggaatgagcaccgcgtggtcggcatacatggccgggctcaccagacccagcttggtgcccagacgggtgcgggcgatgatggagaggttggtcacctcgctgcccgtgccgcaggtggtggggatgagcaccagctcccgccgcttatccagggcgggggccctgtcaaacagggtgtctaccccctcgccgctggagactgccaggatcttggcgatgtcgagcactgtgccgccgccaatggcaatgacacgggtacagcccattctggccgcgtcggccagaatggcgtctaccatcacatcggtgggttctccggcgccgtattcctcctgatagatggtgtgaaccggaagtcccatctggccgaggtagggctcgtagatgtatttattagtcagaaccagatcccgttctcccggatgaaattcctttacaaagtccagacaggtctcaaagcggtgaagcgtggggcggattagaagttctaccatggtgtttctcaaatcctttcaagcttggtttgtctgcaaaacagatgtggtatctgttgttgtctgtatgcaaaatatatgccaaattgcacccgctcagaaattctgagcgggtgcaattttacagcaggccatattttttgagcttgtactgcaatgtccggcgggagataccaaggtattgggcggttttttcgcggtgtccgccgtgcagacggagtgccatttgaatgcggagatactcctcattgaggcattccgggccggattccggggagggaggctccagctgaagcatgcctgtgggaatctggttgattttgaccacggatgactcgctcataaccaccatgtgctctacaaggttgcgcagttcgcggatgtttcccggccatttgtagtgattcaggatttgatagacgcggcttgaaaattccttttgaagaccgtatttctgacagaagtggtctaaaaagtagtcggccaggggagtaatgtcctcccggcgctctcggagaggcggaatggtgatgggaatgacgttaagacggtaatacagattcatgcggaacgttccctccttgacacactgagcgagagccacattagaggcgcagatcagccggaaattcacggcccgcggtttgactgagcctaccggaataaccgctttggtttccagaacccgcagcagcttggcctggagagacagcggcatggagtttacctcatcaagaaggagggtgttgttggcggcggcttcaatcaggccgatctttccgccggaggcagccccggtgaacgcacccttctcatagccgaagagctccgcctccaatagggattcggggagagaggtgcagttgatagccaccatctgcttttttctgtaggggctgtgctggtggatatactgggccacgatctccttcccggttccggattctcccagaaggagcacggaagcgtcgctctgcgccgcacgtgcggcctgcctcagaacgcccaccatggcgggacttttggcaatcacctctctgcggtcgtcccaattgccgcgtattcctgtagcaatggcgttgatggccttggcgtggctgtatttctggttcatggcatcaacctggatctggcaggagatggcgtatacaatttcaccctgcgcgttgaaaataggggacacggttaccagacggcccacctgtttcccgtcggcagaaactgtaacatgaatctgcgtgacagcccgcttctcgtggtagaccttgtctacgacgctctccttgtagagtccgcttgcgatgaagtcatataccgtgtgatttaagtagtcctgacgggttcgccctgtgtattgcaggagcgtcttattgacaaacaggtatgtccctttgttatcaaagatgataattccaacatccagattatccaggatgttttccagcccgggcagattgcttgccatagcttccagccctccttatgcgttctgctcctatgcgtttcccctttaaaactatcaaatggagggcaaaaaatcaaccacaattgtagtgagttgcacaggcgcaattggaactgcacattgaaatacaaggattcctgagtgagcatttgcacaaaaattgcattttcatgccctgaatgtgcaattccggcgggaagtcgtgaatttgcctcgagaagtggccgaaacaggggggaaaaacagggggatacgggctggcatccggtttgcttcctaaggtggtcagacacgacctatgtcctgtcacacgattttagcaaggagaaggaggactgcaattgatgaaagcggcaattatgggcgctggagcaatgggaaccgtcttgggtgcctttcttaccagaaacgggttcccggtggatctaatcgactcctatccggcccaggtggatgcactcaacgaaaaaggggccggcgttgttggctgtgcagagctgactgtcccggtccgtgcactgctgccggagcagatggaaggggtctatgacttggtgtttctgatggtcaagcagaccaacaatgaggcgagccttcgggcgctgttgccccatttgggagagaacagtacggtatgtaccttgcagaacggagtgccggaattagctgtggccgagttcgtcggccggaaccgcacagtaggcggagcctgccgttggggggccacgtttgtggagcccggtatctccgagctgaccaacgccctctccgcccgcacggttctgtttgagatcggggagatcgacggacgtattaccgaccgcatccgagcggtggccgaggttttgggccatatggacaacggcaaggtggagattaccgacaacctgatgggggcccggtggctcaagctgatgctcaactgctgcatgagtggcctgtcctcggccttgggctgtacctttgagtcggtaatctccagtgaaaaggcgctggcctgcacctcctatcttgcggctgaggtggtccatgcagcgcgggccgcgggcttccagctaacggataccaacggactgaataccgcagagatcgccgacttccaaacgaaggaggagttagagcggtccaagggatacatctaccgcaattactatcccctacgcactgccaaggccagcatgttgcaggatcttgagcgggggaaaaagacggagatccagatgattaacggttatgtcggcgctatgggccgcaagtacggtgttcccaccccgttcaacgacctggtagtgaagataattactgatatagaggagggccgccgtagagcggaattcggcaacctggctctgtttgtcctgccggagttgcaataagaaagagacaaaaaggaggaaaacctatgtcctacgtccgcaacgacagcctgatgtaccaaatgccggttcatttcgggccctgcgtaactccccgacagaacaaagaggggaagcgctttatctatgaccaggctacgcgactgaccaagcatactattgtctacgaaagtgatccggaggccctgtccgctgtcctgccccagcggttcgagctggctgccccctacgtcatcatcaatatgaacatgctgcgggacgtggcttggctggctggacacggatacaaccttaccggcgtctctgtgcccacccgtttccatggagaaaagggggtggtggaaggcaacctgcttctggttatgtgggaaaaccatgccgaccccattattaccggccgggagcagctcggttacagcaagatatttgcctccatcgacgacatccatacgtacgggggggtatcaaagacggagctgacctcctggggattccgctttctggagctggagtttgatgccaaccgccagccggagaatctggaggagctgaaacgggtgctgaataacccggatagtcagggcatcatgcactataagtacattccacgtaccggcggcggcttcactcaggcggatgcggaatatgtctgcctgaatcctaaagcagccaagctgcctgacgacgtaaagaagtatccggcggatcagctgacctatatgggcggtcaggtgcgctggcatatacccacctgggaggatatgcccacccagtaccatgtggcacaggctctgggcagtctgccggtcaagcggatcgtcggcgcggtacgttcggagggctataccctgggcgatctttatgggcagaccaccgtcatgtgaggcctgcggagaagcaaaagcaaagagaatgaaggagcgcattaccacggaaggagtgattgtatgtcccccagcgttatcagcctgatcggtatcctgttgggcatggtcatcttggttttcctggcattcaaaggctataatgtcattatcgtttctgttatcgccgcactggttgtggccgtttttgccggcaccgacattctgccgctgattatagactcctatatgaccaagttcgctgactttgcaaaaaataattttatgatctttctgcttagtgccgtctttggaaagctcatgggcgattccggagcggccgacaccatcgcctactccatgctgcgcgtggtcaaccacgttcacagccagcgaaccaagcagttggtcggcggtctgatgatcaccgccattgtagcggttctgacctatggcggcgtcagcctgtttgtcgtcatcttcaccctgatctccatcggccgcaagctctttgaggagctggacatcccctggcggcactaccttaccttccacggcatcggttcagctacctttaccatgaccatgctccccggtacggcagcgcttcagaacattattcccacgcagtatctgggcactacgccaatggcgggggccgccatcggcctgaccggcgctgctatccagattttactgtgtgttctctgggcagcctttatactcaagcgtgcccgcgcccggggtgagggcttccgcccctccggcgaagcagtcaaggccgcctaccgggatgaggatgaaaagaaagccgccgcaggagaaagccaggtcggcatacctctgctgctggccctgattcctccggttgtcctgcttctggtgctcaatgtctgcaagctgcatgcggttatcgcgctctcctgcggcattctggtatgtctgatcctgttcggcctgatcctgcgccgcctggataacctcaaggccactctggcagccggcgcggtgaattccatttccaccatcggtaccacatgtgctgtagtgggctttggaggcgtggtggctgcggtctccggctatcaactgatcctgggctctctgaccagtatcccgggcccggccattttcaagctgattatcgccgtgaacgtggcggccggcctcaccggttcctcctccggcggcctttccatcgctctggaaaacatgcaggattacttcctggggctcggcttgtctcccaacgtcattcaccgcattggcgccatgtcctccggcggactggactccatgccccacgtcagcggctttgtcaataaccttcaggtgtgccgcctgaatcaccgccagtcttacccctcttatgccatggtctgtctggtcattcccatcgtcacaacctgtgcctgtgctgtactgctccaactgggtattctgcctgctgtttagtggatttagaaaaaatggatttgaacatttgcagaaaggagtctatattgttatggagctcaatctgaacggaaaagtcgtcgttgttaccggcggctccagcggtatcggggaggaaaccgccatggagtttgcccgggagggctgcgaggtgaccatcgcctcacgcagtgagaaaaagctggcggaagccgccgggcggttcgaggtcgagggctttcaggtccacacccaagtcgtggacgtatccaagccggaagatatcagcgccctgggcgagaaggtctttcagcagtttggccgtatcgacgtgtggatcaacaacgccggagggaatatcaccaagcccttcctggagctcacggtggaggactggaactttgttatcagcaccaacatgacttccgtattttggggtacccatgtggcagtcgactacatgagacggactggcggcggcgtcattctcaatacctcatcctacatggcgcttattcctgccacacagaagattgcctacgcagctaccaaggcgggcattgtgaacatgaccaagacgactgccggtgagctggcccccttgggtatccgggtcaactgtgtggtgcccggcctgattcagacgccaattgcggccgagcgtatcgctgccaaccgggaaaagctgtgtgcccagattgcgctacagcgcttcggagtcccctctgatgtatctcgtgtttacacctttctggcgtccgatgctgcggcattcatcaccggcgccgcaatcgaggtcagcggcggaaagctctgtgtccaggatatcggcgctccctggggaaagcagatctgaccgaggaaggcaaatggtaaatttgtttctttatcatctgcttgtataggacagcctccacagatgctccatttgacagatggctcttacttgtacggaagtcaaagttataaatactctatatttgaaaccagagagaagcagccgggatgtgtgtgttccggctgcttctgtcagattttaaatttattcactggctttctttgcattctggcactaccccaaaccgtgaaccctacaggattccggagctaaccgagagcggacgcccctcattccccggccgcatggcgctgggaggtggtggccgcgttggtgcaggcgcctggggggagccacgctgacaagtgcccctgcgtcccggattgcgttcctggtgtccgcccagtcaactgctttttttgatgagcggcttatggacgtttggagcgtgtagacgcttttcagacccgaattagtggtggggctctttacaaacagaagtgcctatattatcataggggacatctggataatagggagggtttttgtggaacgtctcacttatacggcgctggaacaggggagatatgacggatacctgctgcggcaggcccctgagcgggtactccaattcggtgaaggaaactttctgcggggattcgcagaacatttcattgacgtgatgaacgagcgtacagactttcagggtaaggtagtggtggttccccccgcctctgccggaaagaccggccgcatcaacgatcaggaggggctctaccagctctgcctgcgggggcggcgcaacggggagacggtggatcagtgccggatagtgagttgtatcagccgggcggtggacgtgtttgaggagtatgacgcctttctccgcacggcccataatccgaatatgcgctttatcctctccaataccaccgaggcaggaatcgtctacgagccgtccagccggatggacgaccgcccccccgcagggttcccggccaagctcgcacggctgctgtgggaacgctaccagaccggactgccggggtacatcatttttccctgtgagctcattgcggacaacggcgggacactgcgggactgcgtactgcgccacgcccgggactgggggctggaagcgggctttttccgctggctggaggaggagaacgccttttgcagcactttggtggaccgcattgttaccggctattccccggagcaggccggggcggtggcggaggccacaggcctggaggacaagctgctggatgtggcggagcccttcgcccagtggattattgaggctccggagtgggtgcagggggagttcccggcggagcaggccggtctgcccgtgcgctttgtggccgatcaccgcccctaccgggagcggaaggtgcgcattctcaacgggggccacactgtcctgaccccggcggccctcctctccgggcacacgctggtgcgcacctgcatggcggaccgggggctgaggaacttcctggatggggcgctgtttcaggagattatccccacactctccctcccccgggcggagtgcgaggacttcgcccgggcggtggaggagcggtttgacaacccctacgtggaccaccgcctggtggacattgccctcaattccgtctccaagtggcgggcgcgggtgctgcccagcgtggaggccttccaccgccggcagggggcgctgcccctccggctggtattttcttttgcggccctctgcgccctctacagccggggagagggggaggggtgcccagtgcgggacgagccggctgtgctggatttcttcgcccggcgccaggcggacggaccggaggcgctggtcgccgcctttgccgccagggtggacttctggggccgggatctgacggaactgcccggcttcgtccccgccgcggggcgggccatggcccgcatccgggccgatggcatggccgcggcgctggaggcctgcgggaaggaggcgctgaaatgagccgctgcctgcgtattgcgccaacagacaacgtggccgtggccctggagccggtggcggcggggatccgcgtggcggtggagggggcttccgttaccacccgggaggacattccccaggggcacaagctcgcactaaccgccatccccgctggggcggatgtgatcaagtacggctatcccatcggacgggccaggacggagatcccggcccccctgcggcctcgctcctttcagggctaccgccgggcggacggccgggtgggaatccgcaacgagctttggatcgtgcccaccgtgggctgcgttaacggcgtggcccggtccatggcccggcgggtggaggactatgccagggggcgggtggacggagtacacgtctggtcccacccctacggctgctctcagatgggggaggatcaggagcacaccagggccatcctctgcggcctgatccgccaccccaatgccggggctgtactggtgctggggctggggtgtgagaacagcagcattgccgtgctgcaagagcggctgggccgctgggacagccagcgggtggctttcctggagtgccaggccgtggaggatgagctggccgagggggagcgtctgctgcgggagctggccgaccgggcggcagcggaccggcgggagccggtgggggccgatgagctggtggtgggactgaaatgcggcggctccgatggcctttccggcatcacggccaatcccctggcgggccgggtgaccgaccgggtgatcgccatgggcggctccgccctgctggcggaggtgccggagatgttcggggcggagggggtgctgttccggcgctgcgccgacgagggggtgacccgggccctgcccgcgctggtggaggagttcaaggactacttcacccgccacgggcaggtggtctatgagaacccctcgccgggcaacaaggcgggtgggatcaccaccctggaggagaagtccctgggctgtgtccagaaagggggaaatacacccatagtggatgtgctccactacggggaaactgtgcgccgccgggggctgacggtgctccagacaccgggcaatgacttggtgtccgccaccgggctggcagcggcgggggcccacctgatcctctttaccaccgggcggggcactcccttcggcgcgccggtgccaaccctgaagctggccaccaacaccgctctggccagccgcaaggccggctggatcgactacgacgcaggcggcctggcccagggggacgcttgggagccccacatccaggcgctgctccaactggtgctggacacggcctccggcgcccccacccgtgctgaggccgcaggctatcgggagatcgccatctggaaggacggcgttactctttaaccgatgtgggagcagataaaaatccccgccgcagattctctgcggcggggatttttgcgcactaaaaggaacagtgaatcatggtattgatggcctcctgataggagagctgaatgtgctcggacagcaaccggcaggcatcttccgggcggcgctctaaaatggcattcaggatatcaatatgctcccggttactgacctgataacggcttggacgccaggctgtgatgcggatgaggttgagatattccgtgaggctgcgcatgagctgggaggcatattggttgtgaagtgtgtcaaccagcttcaggtgaaattcgttgtccagttcaataagcggcgcagccgtctggcccgcgtttccggcctcgtcgtcctgatgctggagcagcagcgtgcgcatgtccaccgcccactggagatccacctggtgaaagcactgatggagaatcagaggttccagcagggagcgaatttcaaagatatcatggatgtccttgagcgtggggcggctgatttcaatccctttgcggggatgtatatgaaccagcttgtcctgagccagggcaagaaccgcctcccggacgggagtacgtccaagccccagcagcgcctggagctgcgcctcattgatgaattgtcccggggtcaaatctttttgcagaatcatcgtcttgatctggtcatacgcgacctgcgacagactatcccgccgtttatccaccactgccgccattggcatatcctcctgatactctatgtgatatatgacagacacatagaaaaatggctgtacttacaacatcgttggtgtcattataccagcatcttttccaggggtcaaggctttaaagtggggaaaaatggataatttttgtgctttatttacaaaatttaaggatgggaaatggctatcttggcaaaattatcggtttatgtcttgacggatggagggaactgtgctacattttgggctagagatatatcacaaatatattataaaacagattgaactcctgcggaaagcagggcggccggcgggcccgcgcatcgggaaacggcggactaggaaggatggaaagccatgagaccattcctggatgaggattttctgttgaccagtgatacggcgaggtatctataccatcaggtggcggaacgtctgcccatattggactaccactgccacgtgagcccgcgggagatcgcggaggaccggatcttccacaacctgacccagctctggctggagggggaccattacaaatggcggctgatgcgggccaatggtgtggacgaacggtatatcaccggcgatgccggggattatgagaagtttgaggcttgggccggcgccgtggagcaggcggtgggcaatcccctgtaccactggagccatctggagttgcggcgctacttcggttacacgggacacctgacggcggccaacgcccgccaggtgtgggagcactgcagcgccgtcatcggcgggggcctgagtgtgcgtgagatcctgcgtaaatccaatgtgacccttttgtgcaccactgatgatccggcggacaccctggaatggcaccagaggctggctgccgaccataccctggaaaccaaagtgctccccgcattccggccggacaaggcggttaacgtggaaaaggaggacttcccagactatctggcccggctctccgccgccgcaggggtggacatcaacggatgggggagcctgctggccgccctggataaccggatggacttcttcgcacagcacggctgcaaggtgtccgaccacggcttggacaacctgcggtacgccccggcccgcccggaggaactggatagcgtggtcaggcgccgcctggcgggagaaaccgtgacggaagaggaggtgcggcagtataagtgggcgctgctgacccacctggcacggggctacgccaagcgggactgggccatgcagcttcacttcgccgcccagcgggacaacaaccaccgtatgcaccgcctgctggggccggacaccggctacgacagcatcggccctggggtgaacctgccggcactggctgctttcctggacgggctggatgagacgggggagctgccccgcaccatcctctattccctggagcccagcgacaacgccgcgctggtggccctgatgggctgcttccaggggcccggtactgcggggaggctacagcacggctccgcctggtggttcaacgaccacaagccggggatggaggcccagcttaccaccttggccgcaggcggcttgctgggcaactttatcgggatgctcaccgattcccgcagcttcctgtcctacacccggcacgagtactttcgacgcatcctctgcaaccttatcggccggtgggtggaggacggcgaattccccgatgaccccgccgcgttggagcggctggtggccgggatatcctatcgcaacagcatccactacttcggtttcgagcagtatcacttacggggggcagatacggtatgagtatgatcagcgtcaaagggcttcagaagagctttggcaagcacgaggtgctcaagggcatcgacatcgagatccagcccggcgaggtggtggccattgtgggcccctccggctgcggcaagtccacctttctgcgctgcctgaacctgctggaaaagcccacagggggacagatcctctaccacgatgtggatctggtcagcgccgacgccaggagcgccaacaaggtgctcctgggtatgggcatggtgttccagcagtttaacctctttccccacctgacggtgctggacaacatcatgctggcccccgccctggttaaaaagcgggataagaaggagtgcgagagccaggccatggagctgctgaagaccgtgggtctggaggataagcgggacgcctaccccaaccagctctccggcggacagcagcagcgcatcgccatcgcccgggccctcgccatgaggcccgaggtcatgctttttgacgagccaacctccgccctggatcccgagatggtgggcgaggtgctggacgtgatgaagaagctggccgccgatggtatgaccatgttggtagtgacccacgagatgggctttgcccgcgaggcggccgaccgggtgattttcatcgacggcggccgcattgtggaggacagcgagcccgaggagttcttcgcccatcccaagaacaagcgtcttcaggatttcctgagcaagatgctctgattcaaaccattcaaggaggaagcaaacatgtctcagatcaaggtggcccgctacagcggcgtcaagtacgaattcgtggacggctatgcccgtgtgccggtgctggagggggagtttgaccaggcccacttcgcccactgcgccctgcagcccggctgctccatcacaccggaggtctactccgtcaccgagcacaaccagctctttatcttcaccaagggcaagggctatgtgaccaccccccgtcaggcgtggaacatcagggagcccggcgtattcgtccctgagtttgacgcggagcgcttcaccatcacctgctctgcggacagcaagcagcccctggagtttctccacatcatcaccgagctgagcgactacgacaagacctgcctggtggagtcccgcatggtactgccccggttccgcggtatctctgagggctggacctacgacgaggatttcaaggacaacgacaccaccacctccattatgctgctggagcaccgcaacctgggccgtctgtctatgggctgcgtccgcggcaccggccccatcgagatcggacagcacatccacaacgagctggcccagtggtatttccccctgcccggctccgagttcatctacaccgccggcggcgaggaagtaaagatgaccggcggcgacctgtccttcacccccaccggcttctggcacggaagcaaggtggaggccggcaggcagtgcgactacatctggtttgaaatgtgcatcgacggttatcccggcgagatcaagtaagccaattcacattgactcaaaggcttaatttattgtaaaggggaatgtaccatggctttggttaaaatttcgaagggcgccgacatccgccacgagtataccgatggggtgtcccgggtgcctgttctggagggcgcctacaaggatgcggcagtggagcgcatctcccttcagcccggcgcggagctctcgcccgccctctattccaagacggagcacaaccaggtgtttctgatcaccgccggcaagggctacatcgccaccccccgccgcgtgttcaacatcacggaggtctctgtgtttgtgcccgactttgacaaggagcagttcaccttccactgtgcggccgatgccaaggagtgcatggagatcgtccatttcgtcaccgagctcaacgactacgacaagacctgcctgaaagaggcccacctgaccctgccccggttccggggcgtgtcccaggcgtggcactacaaggaggactttaccggcgccgacatccagcagatgatgatgatcgagcaccgcaacctgggccgcctgtccatgggcgccaacttcggcaccggccctaactacatcggccaacatatccacaacgagctggagcagtggtacatcatgctccccggagcctccttcacctacaccgctgaggatgaaaagatccacgtggagggcggcgacatcaccttcaccccccacggctcccaccacggcagcgagtgcgccgaaggcgagcggttcgcctatgtgtggtttgagctgtgtgagaacgggtatcccggcgagattaagtaagccatgagggcgacctggccccttttgggctccaacggcccgtacagccgcgtcccgcttgccgcgtttttggaggcggaggtacggcttggcctggacggcgtggatttcgtgccacagacgccccacttctggtgcagccacacgggacatgagtccgccgctcccctcagggccgccttggcggaggcggggcttcctgtccgggtgctcacgccgcccccctaccgctactccctcaccgctccgccggggcggcagcgggaggccaccttggactactaccgggtatgcatcgccctggccgccgagctgggggccggacggctggtgctgggggcggcgggggcctgctgggatatagagccggaggctctgcggcggaacgccgccggactgctttccgagctgtgtcctcaggcggaggccgcgggtgtgcgcctgctgctggctccggtcatggggccggagaccccgcttattgcagagtctcctgtgctgggcaggctggaggagctctccgagctgctccgccgggtggacagccctgccctgggggtgtgcctggacaccaacgttatgagcacctggggcgacagcatcccccggtggttcgagcggttgggggagcacaccggcctggtgcgcctgtgcgacggaaactaccacggctggcgggcctggggcgagggtgtgctgcccatggagcgctaccgggcggagctggaggcggcgggctatgccggcccggtgtccctgctgctgccgggggagcgctatgccggccggccctcctggccggaggagcgggccctggaggtcctgagaggaggggcggaatgagaggcatcaaacgcagtcagctggtcaacatgaaccagcactaccgccgcttttccatggacttcttcctggattgccagcagcgcctgggtatcgggcagattgagctgtggtgcggcgccgcccacttctggctggatcacaccggctatgacgatatctctgccctcagggccaagctgagggcccacggcgtgcgggtggtgtcggtcaccgcccccagcattgcctaccagtaccagtatgccgcccaggagcccgcccacctggagtactcctttcgatatttttccaacgccatccatctggccgccgagctgggggccgaccgggtggtggtgaactccggttggggctaccagggagaggacgagtccgccatgtggaaccgctgccgggatcacctgggccggctgtgtcaggtggcccagccctgtggagtgacactggtcatggagtccctccgggacgacgagagcaacctggtctgcaacctggagcgggcccgccggatgcaccgggaggtgggacaccccagcctgaagatgatggtggacaacattgccaccggcgcggcgggtgagactctcggggactggttccgggcctttggagccgagctgatccacatgcactttttggatggagatccctggctgcataacgtctggggggatggcaataccgccctggcccagcagattcagaccatgaacgaccaccactataccggatatctggtgcaggaggtggccgacgagcactatttttccgatccctatgccgccgaccgccggaatcttcgggttctggagcggtttgtggaggacgattgacgttattttccggcagatgtctccgccggtcaataaaaatcagaaaaggaaaaggtgaatcaaatgaagctgaagaaactcgtacctgcggccctctctcttgcactggtcctctctctggccgcctgcggcagccccagtgagccctccggctccacgccccctgacaccaatcctcccgctaccggttcggctgtccccggcacggaggctcccgcggccgacgactccctccagaaggttctggacgcgggcaagctgaccatcgccgctgagggcaactgggtgccctacgtttacaacgaggatggcaccggcgagcttaccggctttgaggtggatatcgccaaggagatctgctcccgcctgggcgtggagcccgacttccagatctctagcagttgggatcctgtggaggccggcatggactccggacgctatgactgcatcatctgcggcgtgaaccccaagcccgagcgccaggagaagtacaacatgtccattgcttacgccgagaaccccttctgcctggtggtggccggtgacaacgaggagattaccagctttgccgacctggccggcaggagctgcgccaacgccctgaactccaccgccggtgatctggcccgcaaggcgggcgcggagctgtccgacgcatccctcaccgccgccatggatctgattgtctccggccgcgccgatgccaccgtcaacaatgtggccgccgtagaggagtacatgaaggagcgccccgacatgaacgtgaagattgccgctatctatgagcccgaggagggcgaggagtggatcatccagtccgcagtggccttccagaagggcgccgacaccctgaccgagaaagtcaacgagatcctgcaggagatgatcgatgacggcacctgctacgacctgaccgttcagtactttggccagtccgtggccgacagcaccagcatctatcagaagtaagctgaccccagcacttttccgccggggggccgccgcaggcggtcccccggccctatgaacactatttctaaaggaggcgggccgctgtggataatacccttcagttgctcatcgattcgttctggccgctctttaaggccggtcttaccatttcggtacctctgatgctcgtttcgtttatcctgggactggtcgtggccttcgcggtggcgctgatgcggatgtccaaatggaagcccttaaaagccatttcctggttctatgtctgggtcatccgcggtacgccgctgatcgtacaaatcttcatcatcttttttggcctggcctatgtgggcatcatccttgatcccatcccggcggccatcttggccctgactatcagccagggcgcctataactccgaggtcatccgtgcagccctgggctccatccccaagggccagaatgaggcgtgcagggctctgggtctgaacaagtggcagaccatgagccggatcatcgtcccccaggccgccctggtggccgtgccctccctgggcaactcctttatcagcctgctgaaggacacctccctggtggcgaccattaccgttcatgagatcttccagactgcccaggccatcaacgcggtcaagttccagccgctgctgctgtatatcgaggccgcctttgtctacctgattttcagcacggtcctgacccaaattcagggcatgctggagaaaaagctgggcaagcatctggtggataccagagtgtgatgagagaggcgcaaacatgttacatttgaatatgcaaggtctgcaggaccgggcggcctgggcgcaagccggtatccggctgccccgctacgatgtggctgccgtacgggcccgcacctgggaggcgccggtgtggctccactttggcgcgggcaatatcttccgggggttcctggccgcggcccagcagactcttttgaataccggcagggccgacacaggcatcctggccgccgaatcctttgactttcagatcattgaccaggtctatagcccctatgacgccctgagcctgctggtgcgcatgcgcgccgacggcagcgaggagcgggaggtgattgccagcgtggccggcggcctcaaggccgactgcgccggccctgactgggccaggctgacccgggtgttttgcagcccgactctccagatggccagcttcaccattaccgagaagggctacgccctaaccgatctggagaaaaagcctctgccggtggtggagcgggatttgaccgccgggccggagggaccccgtcacaccatgtctatcgcggcggctctgctgtaccgccgtttccaggccggaggcgcgcccattgccatggtgagcatggacaactgtgcccgcaacggggagaagctccgcgccggggtgctgtccatggcccggggctgggcggagcgggggctggtagagcccgctttcctggactggctggaggacgagggccgggtgagcttcccctggtccatgatcgacaagattaccccccacccctccgagcgggtgcaggaggagctggggcgcctgggtgtggcggacatggccattgcccgcaccaacactggcacccttatcgccccctttgtcaacgcggagatcacggagtacctggtgctggaggacgccttccccaacggacgccccgccctggaaggggcgggggtgtatctcacggaccggaccaccgtggagaaggcggaaaagatgaaggtgggcacttgcctcaaccccctgcacaccgctctggcggtgtacggctgcctgctggggtatacctccatcgccgccgaaatgggggatgcagatctcaaggccctggtggagcagattgccgccgagagtctgcccgtggtagaagatcccggtatcctcagccccagggcattcattgacgaggtgctccatgagcgattccccaatcccgccatcccggatacaccgcagcgtatcgcagccgacacctcacagaagctgcccgtccgttacggcggtaccctcaggcgctatgcacggcagtcggagcaggcattggccggactggagttcgcccccctggtgttcgccggctggtgccgctacctgctgggggtggatgacaggggaaacgccatgcctgtcagcccggaccccatgctgccccagctccaggcccacctgaagggaattgaagtgggccggcccgattccctggcaggacagctccgccccatcctgtccaatgcagccctctttggggttgatctgtatgcagcaggcctgggggagaggacagaagagatgttccgggacatgctggccggcccgggggcggtgcgggccaccctgcaccgcaattgtgcatgtaaacagccataacagaaatagaggattctgttccgcccttcagacggcagcagggcgggaagcgtaaggaggaaacagccttgaagatgacatttcgctggtatgggagccaactggatcccataccgctgcgatacatcaagcaaatccccaacatgagcggcgtggtcacctccctgatggatctgcccgccggcgcgctctggcccacggagcgcatctcagccctcaaagaggaagtcaatgccgctggcctggagatggaggtcattgagagcgtcaatgtccatgaggacatcaagctgggcctgcccggacgggacgcgtatatcgacaactaccgggagacggtgcggcggctgggccaggcgggtgtaaaggtgatctgctacaactttatgccggtttttgactggacccgcactgatctggccaagccgcggcccgacggctccacagtcctggcctatgatcaggcagtcattgaccgcatcaccgacccacaggccttcgcggatcagatccaacagggggcaggggagtttgagatggcgggctgggaaccggaacgcatggcggagctcaagcgcctgtttgcccaataccggaatgtctcccatgaggacctgttccgcaacctgaagtatttcctggaggcagtgattcccgtctgcgagcagtacgatgtgaagatggccatccaccccgacgatcccccctgggatatcttcggcctgccccgcatttacacctgccgggagaatatgcgccgcatcgtggagctggtggacagcccctataacgggctgaccttgtgctcaggctctctgggctccagcccctgtaacgacattcctgccctggtacgggagttcggcggagagggacatatccactttgcccatgtgcgcaacattaagttcaccggccccggccggtttgaggaggcggcccacctctccggcgacggaagcctggatctgtacgaaattatgaaggcctattacgatgtgggcttcgagggctacatacgccccgaccacggacgcatgatctgggacgaaaaggggcgggcgggctacggcctgtatgaccgggccctgggcgccagctatctgaacggcctgtgggaagcgattcagaagaataacattcagcgtaatggacaaaacggcgccgcggctgtgtagccggacgggaaaggatatggagtatgaatcccattttggaacagatttgccgcattggcatcatcccggttatcgccattgacgatgcgaagaaggccgtccccctagcccgctccctggtggagggagggctgcctgcggcagaggtgaccttccgcacctgtgccgccgaggaggccatgcgggcgattgcggctgaggtgcccgagatgcttctgggtgcgggtaccgttttaaaccatgaacaggtggaccgggccctggcggccggggccaaatttattgtcagtcccggcttcaaccccgataccgtgcgctatgtaaaggccaagggggggctgatcctgcccggtaccgctaccccaggcgagatggaacaggccatggcttttgggctggaggcggtcaagtttttccccgccgagcaaaacggcggtgtggccaagctcaaagccatcgccggaccctataaggctctgaaatggatgccgaccggcggtgtcagcgccaaaaatctgatggattatctgtcctttgaccaagttgtggcctgcggcggcacctggatggtgaaaaaagacctcattgaggcggagaactgggccgaaatcacccgcttgacccgggaggcggtggataccatgctgggcttcagcctggcccatgtgggcatcaactgcttggacgcccaggcgtccgagcgcacggccaggactatctgcggcctgttcggcctgcccttccgggcggggaacagctccaaccacgcggggacggcggtggagtgcaccaaggcccccggccccggcgtccacggacacatcgccatcggtaccaacagtgtggagcgggccatctatcatctggagcgccgcggggtggcgattgaccacgccacctgtaagaccgatgccaaggggcgggcaaaggcggtctacctggagggagactttgggggctttgctatccacctggtgcagaaataaggagggacgtaccatgaacaagcgcgttgtaacttttggcgagatcatgctccgtttggcccccaatggatattataggttcttccagaacgaccagttgcaggccaccttcggcggcggggaggccaatgtagccgtctctctggccaactacgggctggattccgtctatgttaccaagctgcccggccacgccatcggccaggcggcggtcaacgccctgcgcagctttggcgttgatacctcccatatcgtccggggcggagaccgggtgggcatctatttcctggagaagggggcctcccagcgggggagcgtgtgcatctacgaccgggcccactccgccatccaggaggcccagcctgccgactttgactgggacgcaatttttgccggggcggactggttccactttaccggcatcacgcccgctctgggccccaatgtggtggagatctgcaaggacgcctgccgggcagccaaggccaggggagtcaagatctcctgcgatctgaactaccggggcaagctgtggacccgggagcaggcccgggcggccatgagtgagctgtgccggtatgtggacgtgtgcatctccaatgaggaagacgccaaggacgtgttcggtattgaggctgcggagaccgacattactggcggcaagttaaataaggaaggctacaagagtgtggccaggcagttggctgaccagttcggctttgagcgggtggccatcaccctgcgcagctccatttccgccagcgacaacgactgggccggcatgctgtacgatggggaacactactgcttctccaaggagtatcacctgcgcatcgtggaccgggtgggcggcggagacagctttggcggcggattgatttacgccctgctggctggaaaggacagccaggcggccattgaatttgccgtagcggcctccgccctcaaacactcaattgagggagattttaaccgcatcaccgtggcggaggtcgaaaagctggccggtggagacggctccggccgggtacagcgctgataccggtcatggggagcgcagacggaatgggactgctcacaaaatagcggagaaataccgctgggtcgatgctcaacaccgtacggcggaacgattcagaccggcgcagcgtttgaaaaggcactgtatttcgtagaaatacagtgccttttctctgcgttcccgaccatttgttttgtgccttcaagtctcgggcagatgcattgagaggcagaaatattgctgcaaataccgtgagaaagcacagccaagcctcgtttttgaaatgagaagcataatattgcgatgtcctatcggcaacaatttataccacgctttggacgacagagcgtggggctacctctaagatgcacaatctaatgatggatttccctatagtattgttgtataataaataaaaattcagggataaggatggagcgctatggaggagtatcgtattacaattgcagggcaaagcaaatatgaaattgaactctgtgccgtccagtgtggcagggattatagtgtcacaatctgcggtgggggccgtcatcatgtgggagctgcggcgctggggtgcgacgaatccggaacagtgggacacaaaatgcgcggcgctaccgtcagtgtgctgtgtgtgttcggacacagagacgacgaggcggcacggtgggcggcaaagtatctggctaccgagctgaaatgcaatgtcagtgtagcggtcggcatccacattgaccacgcggatggcagtgagatccaatgccttctggagaattgcagggaggcatgcagacaattcaaagaccgtgtgcgggcggacaggctgtcttaaagcgggtgaaagtggtggtagagtacggaggagaaccgttcagccgaatccaaatgagggtgacaggggggaggcatcagcctcccccctctaagcagggaatggtttgggctgcccctgccgcaagcccatctctcctggggtacatccctgcatctttatgacatgattctctcacagttttattttccacggttgtggcgctttggcaggttgtactttttgatcttgcgaaccagagtcgacagatcaatgccgagagtggcggcaatctcgctgagggtacggtcctcctgaagacgctgggccaatactgcggcctcaacctcctccaaaatgcagtgcaggctggagcccgccggtaccggcccctggggcgtacgctgtagccactgggcggtcatctcgtcgggcagatcctccagctcgagggtgtcgctccttgccagtacaaaggcccgctcgatgatgttgttcagctcccggatattgcctggccagcggtaggccagaagggccttcttgaaggcctggccaaacagcttcgcggttccctgctggcggttcaggcgcagcaggatgtgctcggccaggggcaggatatcctccgtccgctcccgcaggggcggaatgtgcacgggaatgacgttgagtcggtaatagagatcccggcggaaggagccctgggcaacctcttttttcagatcccggttggtggcggccacgacgcgggcgttcataggcaggggagcggtgccgccgatgcggtagaaccggcggtcctggagcacggtcagcagcttgacctggagctggggcggcagttcgccgatttcgtccaaaaagatcacaccgtctcccgccagctcaaagattccccgctttcccgtccggttggccccggtaaaggcgcctgcctcatagccgaacagctctgattccagcaggttctccggaaggttcccacaggagatcttgatatagtccgggctgcccgcaaagcggcagatcatgcggcaaaagacatccttaccaacgccggattcgccggtaatcaggacggtggagcggacgtggctgacccgcagggccagctccgccaggttgtgcatggccttactcctgcctacgatgtcgtagtcctccatcaggtggagcatctcattgatgcgctgaaccagctcccggttggccttctctttgacctgcatctcccggtcgtagtccaaataggtgatgtccatctgctggcggagctgcatcagctcggtcatgtcccgcacgttgcccaccgcgccgcggaatcgtccgtccgggctgtagacaggggagagggtgacgaggagaagccgctcggagtcggcctggtacttgatgagttcggagcgggtttcccggctctggaacacctccagcatcatccgcgagatgggaaacccctccttgacaagctggtggatgttgtgcccctggatcttttcatccggaagcccggtcatttcactgtaagcccggttgttgtagacaatatatccggtttcgtccgtataggtgaagccgtcggtggccgagtccatgatagccgccaggatctccggatccattaggcgtttgatattagcgccggacatggggcggaagcctcctctcttggccctacagcgcccccagcagccgccaccaggggagatagagcagaaatacggcgaaaagcataagagcggtatggggaatgccaacccggagcagctcatgggtggaatagcagcggtcgccttcacccagcagcagaattacatggtggaagggcagaagaaattggctgcacaccgcaatgcagatgagaaacatcagcggaagaggaggggccaccccggcaccgatggacatcagcccgggtactaccaccgacatggtggtgatgttgctgcccagcacggtgtggagcagtaccacggtcagcagaaccaccgctgcgtaagccggcgagaatgtctgtggaaaaacaggaacaaaaagggaaaacagccggtcggccacaccgcaggactttaaggttccaccgatggcaaaggccgctgtgaggaaaatcagcagcttgacgttgatggcctttacgtccggcaggcgcagcagccccagggggaacatgagcgccgtggcggctgccacaaccagagtgccggtaagggggtgaaaatcctcggtggcccaaagcaccaccacggccagcagaaagaccaggttgcgccgttccgacccagtgagctgaacccgctccgccgtctgtgccgggctgtgggggaaggtgcgcagcaccctgcggaacaggaaccggtagagaaggaccgccgccagcaggtaggccagggtgggagccagcatataggccgcccagacgccctcatctacggtcagaccggccatggaggagagggcgccattgagaataatatcgccccgaatcatggacatatttatcaaaatagagaaataataaaggccgaacaggagggcggtgcgcaaaggctcggacaggtttattctagcaaagtactcccggtagatcaacgaaaggataatgatgcgggaaaagggctggggaatgagaaacatcatggccgcggcggagaggaggagggagagcaccatacgcccgggggagcgggcaaagtgcgccagaagaggctggagcagcttgcccggcaggccgctgttggaaattccttgggaaaacagaaaagagacggtgatgaggacaaaattttctgacagggggaaggaaaagactgtctggaccggcgcgccgctgcacagcaaaaaggccgccagcaaaaagagagaggccgctgtccgctccaccaccccggtcacccaccacaggatggtgagcaccagggcggcgaggatgacggactgctgtagggtaaagccgagggggcgcagcagaagaatcagggcggggagcaccagtgtgagcacaaaaagaagggcgcgccggcggtttgcggccagcggcgccttgacccgggtttccataaacgtccccctcacagtgtcagccccatggggcccgcctgaaagatgcggtggtccatctcacgcagctccggggaaatcaggggcctgaactccatctgggccagaatatcctgctccagctccacgccgggggcgatttcggtgagcatcagcccatccggcgtcagcttgagcaccgcccgctccgtaaggaaggtcacatcctggccgcttttgaccgcgtaatcgccggaaaaggtgatctgctccacttgacggcggaattttttgctcctgccctcttgcagtataaccaacctgtcgtcccgcacctcctcctttaggccgcctgcggtaaaggttccggtaaaaaacacgcgtttggtattttgggagatgttgacaaagcctccggggccggtgcagcgggagccgaacttggagacatttacgttgccgtggcagtcaacctccgccgcgcccaggaaggacagatccagcatgccgccgtcataaagctcaagagtatcggccacggtatagatggcctcggcgttgaccgctgaaccgaatccagctccctccaccggcacgccgccctggggaccggactccagggagagggtgatgcgctgggcgatgccctcctcgttggccaccactccaaccccggagggaatgccgatgcccagattgatgagacagtcgggccgcagctccagggctccccggcgggcgatgagtttacggttgtccaggggcatgggcgggatggagtcggtggggcggcggagctgcccgctgagctccgggcggagctgggccgcgtagctctgcatatgcagggccgggtcggtattgaccaccacatagtccaccatcgggtggtgaacccgtacgctcttgggcggcagagagccacggctgacgatcccccgcacctgggcaataacaatgccgccgctgttgtgggtggcggcggccagttcggcggcatagtcgcccacgccttcatcctccatggacaggctgccgtcctcgtcggcccaggtggcccggatgaagcaggcgtcgatggggaaggtcttgtaggccagataatcccgcccgtccagcgaaactaactccacgatgtcccggccctgagcccgggttttttgattcgccttgcagccctccacccggggatcggcaaaggtgcccagccccacatgggtgagcaccgcgggcttgtggccggcgatcgcccgccacaggtggagcatcacgccaaggggcagggcataggccgccacctggttggtgccgatgagctcggcgatctcgggcgggttggcaaagtgcccggccatcacggtatccagcaggccaggagcccggagccgggccagtccgcggccgtcgggccggttgctgccgggactaatgccgcataccgccgtcagggctctggggcttcccaggcgctcataccgttccgctagggcggatagaagctcgtccggagccgcataggcgccgaagccgcccaccccaagggtcatgttatcttgaatcagagcagccgcttcctcggctgtgatccgctgcgccacatcacatcatcctttctgtgttccgcgccccgcttaccgagcggggccttcgcccatggaatcagcaagaggcatgccaatatggaagaatccattataagcggtgcgggagacagggggcggcccctccggccgctgccgcatacagcggcgttcattgcgcataaatgcctgttttttgcgcccggtgcccgtcacaaaagcgcctattcgttgcagctcaacgaataggcgcttttgcgcaatatgaaacctaaaaatgcgcataagtgcatgtttttgatggaggatgccccggctaaatacgcatttttctcaaaaaacaggcaaaatggggcgaaaaatgctgaatggaggagttggccctgcgtttgctttaagaacagaatgtctccggcggttttacccttcacgccggggcaaacgaacgtcatcctatgacgagaacgtgtagaggagcgatattatggcgaggagaaaagtgattatcacggtggcccagacgggcgcgttccacggcaaggaggcaaatcccaatatccccctgaccccggaggagattgcggcctccgcgtacgactgctacaatgcaggtgcggccattatccacattcacgcccgggatcaagagggcttgtccaccaatgatcccaaggtatacagcgccatcggctcgggcatccgggccaggtgtaatgccattcttcagtactctaccgcccccgcaaaccgggagggaacctgcgctgaggacggcatgaggctgctgtacgaccccaacctggtcaagcctgagatgtgctccctggactgctccctgatcggcacgagctggggggaccgtacctttgtctacgagtggtaccgccccttcctgctcaagtacgcccggaaaatgcgggacatgggcattaagccggagctggagtgcttcaaccccgagagcgtggaggacgtgttcaatgtactggtaccagccggcgtgctggaggagcccgtctcactctcctttgtcatgggtatggaccgcatcagccagggctccatctccttctccgaggagaacctggacttcatgatcaagaagctgcctaaggaccgctttgtgaacttttccaccatctccatcggtgccaaacatcacgttcccggcatggcgatgaccgtcctcaagggcggcggggcccgggtgggtatggaagacaacatctactacgcccccggagagctgctcaagagcaacgcccaaatggtggagcgggccgtacgcatcatccgcgagctgggcatggaggtcgccacccccgacgaggcccgcgaaattctgaagctcggccggtaagcccaatctgacggagaggaagagacgaatggaaaaacagaaattctatatgccggcctccctgttgatcaaaattctggtctgcctggcggtcatcgccgccttctgggtggctccgccggtggcgcccctgaccgccgtcggtatgcgggtcatcggtatcttcatcggcgttatcctgatgctgtccattgtggatacggtgtggccggctatgctggccatcgtgctgctgggacagagcggcgtatgcaccgtcaatgaagccatcgcgggctccatcggcaactggatcatctattttgtgctgatgagctttatcatgacccatgccctcaacgagtccggttttaccgaccggctggtagccaaatttatgagcatcaagctggtcagcaaaagcccctggatctttaccatttccctgggtgtgctcggcatgctcctggggtgctttatggatcaggtgcccgccaccgcctttatgctggcgtttgtctcccgcatctacaaagagctgggctacaccagtcgggatgcctatccccatgtggccaacatcctcacagtgttcggcgtcaacattggcggagccatgacccccatctcccactccttggccattctgggcatcggcatttatgagggggccacaggggagagcctgagtctgttcagctatctggccttcggcgtgcccacgggcctgatcctgttcgttctgctgtgcgtcgcggtgcgcctgctgacccgtccggatatgtccaaattcaaggacttcaagattgagaacgtcgtcaaaaagcagggccccatgacgctgcgggagggtaccactgcagtggtgttctttgtgaccgttatcatgtggattctgcccggagtgcttaagatgttcagcgacaccgcttgggtcaatgctttcaacagcttcggcattaccttctgggcgatcctatccgtggtggtaatggcggtggtccacattgacggcaagcccctgctggacgtcaggactgtggtcaaccagagcatcaactggggcatcctgattttcatcagcatcggtgtctacctgggcagcgccatgagcgccgattccaccggaatcgtggccgccattcagcagaatattacccccctcacccaaagcgtggcgcctgtggtggtgatgtttgtcatcgccactgtctccgtcctgatgaccaactttgcttccaatgtgtccactatcacggtaatgacagcggtgggtgtggctctggcagccagcagcggcggagccatcagcgcggtgggcattgccctggtgacaacgatgtgcggctcatgcgcctatttgctgccctcctccttcgccaccattgccatgctccacggacacgagtacagcagccgcaaccagatatatctgttcggcattatcatgattgtaattacatctctgatcattggattcgtaggatatcccatcggctgcgcgctgactgggagctgagcctctgtcatctgtgctctgaagacataagctggaatgtagtccccggattgaaagcaacccttcaacagggccgccggtgtttcaaagaaccggcggcccctttctatcccgtgacaaaaagggaatacccccagctggggaagcggtcaatttattgcacgaaccaagtactgtcatatcaaaggcggacatacagaagacactctataagctggatcacaacacatttcggcggcgatggatgagtctgcgctgttttgagatgcggtattatggataacgcaaaaaagatgctcatcatgcgccacgggtttaaaagcattacctttagcgcatataaggagcggctgctaaagctgttccggatggctgccgaccgctcccaactggtggacggccggtggtacaaccagcagatacagtacactcaaaacgacgtgagtatcatcatcagaagttcgcgcatcaccgtgtccaaaccgctcaataagtcatgtgaggaggggataatccgtatgctgaaccgcagaatccagattaacgtgcacctcaagccagaggagctgtgatttatgttacttgatatatacggcagggcaagtctacattgtaaaaaaggctctgataggatcggctgcatccgccggcggccccgcatggttcgaagacccaaggtttaaatctcctctctgcagcataaaacccgtcggaatccttggattccgacgggttttatgctgcccgctgccagagtgcctggagaggatatccctgccgggcatcgactggaaacaatgtgctaaaccatattgaggtaattgtagatggcagtcatgaaaattgcgtcccgaatgctggtcagggggctgatacccagcagctctttgattttcttgacccgggctgccacagtgttcttgtggagatagagcagctccgccgcctcgctcaggttcatactggtttcgatcagcgcaccgatggtctcacgaaagatggactcatccatatgctcccggatcaggcgtacatagatgtccaacagaggggccatggtctcggtggagatctggctcatcatgtattcggtcaggtagtcggctagaaagtacaccttaagctctttcttctggcggtagcggtacagccacatgatatcctcatagatgcggccgtaataggaaaagcggttctggaccgtgccgcagatatagcggcttttctgtccgggcacctgagattcaaaccatgcatcgatttcttcgatacacaggcggatctggttgcggtaggtggccaccgtagtttcgtcaatctgcttgaagagcaggagcaggttgccgccgatacagaacagcaggtcgttgggagaatggctgggggaattcgggtagtcctcggcaaagcgggaaagcaccagttcggagctctcgcaccccacatactcaataagaaggggatagcggttgacgtgctcagtgatacccagttcagcggcctgggagcggatgcgcatgatgttgaccgggcggtccacaaagagaaggcgggccagatggctcatggcgccggtggaggcagtggggaggaattcacgctggagttcgtagtcgtacagcgattcaaacgacagcttgatgagcttggccagggacattacggtggatggatcgccggagacgccgatgacgcccaccgggatcaggttctcccgcagcagcaggttcaccccaggcgaagtcacgccggggagatcctcggtcagatcctcggtgacgttgatgctgatgttgttggtgatcatgcggaaggcggtagcgtggaaggtgcccacacgctcttcactgcacgacgcaatgatgataccgtgctcattcatgatgttgatgttgtagtcggtctgggagcggatgcgtcggataaactgctcagcaaaggcctggttgatcatgggcggcacctccctttttgccctttattgtaccatagctgggcagaaagcacaactgattgggtatccgggcatgtgaaaaggcgcctgaaagggcgccttttcacatagaggtttagtctaggcgggcgccgttttcgttcatacgggcgcggatttcagcgccggacagctcacgcaggggcagatcccgccggatggacaggtcggccgccagcgcggcagcgtgtccatattcaaagcactgggcggtgacccggcagcttgccagggcctggtgctcggcgcacaggttgcgcccggccacaagcagatgctcgccggtttccggaaccagggagccgtagggaacctcgtagtaatcgttgatgagccagaacaggtagggcgttttaccggcgtggagttcaatgggccaggggcagcgacagatgccgtcggagcgcttgcgggcatgggccacgtcgtcattggtgagccgcgcaatgccgcggatgctgcgggtttggcggacgcccacttcgggagagcagtcgttgataaagctgtgctcacagccgggaatatgctcccggaagaagcgggcgtattcctgtacctggcggcggccgacgatctccgcctcagtgtggtcctccgggttgcatacgttcagcgcccggccgtcccggccggtcagtagggtagtgttcatcagcagttcaccgggccggggagtaggaaagacccagaccttgacccggggcagatgccagccctggcggttggcctcgtggagcagctccgtcacacagtcgggactgatagtgtccggcccccagtagtcggagaagcgcgccgtgtccaccccgcccaagcggaacatggcggtgggattctggatggtgccgttgtcccccatggtgtagccgccccccgcccggtagatcagatctgcgtcgccggtggcgtcgatgagcaccttggcgcggatctgggccaggccgctcttggtatcaattaccaccccataaaaaaaatccccctccttgatgacgccgaaaatattggtatgatagaggatgcccgcccctgcgcccagcaccagctcctcggccacttctttatagacctggggatcgtgggtgatgagataggtcttgccgtagagctgcgggggcgtcacgccgccccgggcgcgcatggcctggagaaactcctctgtaaagccgaagacggtctggcgggggccgtcggcttccggcgtgtcactgcacagaaatgtaccgcagaccgtgccggaaccaccggccactgccgcgccccccagaaaacccagccgctccaccagaaggacggagcgcccctgccgggcggccatggaggccgccgcaatgccggccggcccaccgccgcagaccaggacatccacctcgtcatacagcgggagcgcacagtcggtgtggtagataacggtatggcgaaattctttcaattgcttcacctcatgttctgcgccggtcggggcgctctatgttgtatatccagtatgacagatctgactgctgggcggaatgtgccgctgacacagctttgcaaagcttttctatggagctggaacaaggagggaggcagccgctgcggcggactggtataaatcagtgccgcagtcattcttttggcacaaaactttgtgaccgcgacacattaggcagggtggggggccgtgctatacttgaggtatgcagaggcgagataacggccgtcaggccgtaccgacaagcaaggaggaattgctgccatgtggaagtattacaacccggtggaagtggtcttcggcaccgggaagctggatgagctgggacagcttatggccgagcgggggctggaccgggcgctgatcgtctccgatcccttcacccaccgcagcggcgtggccgcgcggctgaatgagtgcgcgggcggccgcgtgctggacatcatctctgaggtggagcccaatcccacctgtgacaacgtggacgcctgtgcccggcgggccagggagctgggggcccgggccatcatcggcctgggcggcggctccgccatggactgcgccaaggccgcggcggctgcggccgccatggactgcaccggcctggagctgctgcgggggaggcccgtcaccgatgcgctgcccctcattgccgtgccaaccaccgccggaaccggcagcgaggtgggctggggcgcggtgctctccgaccacgccgccaacgccaaaatcgccatcttcggcagccccatgttcccccggctggccctggtggacccggtgctgacctacaccgtgccccccgccgtcaccgcctccaccggcctggacgtgatcgcccacagcctggacgccatgtgctcggtccgggccaacccggtgtccgacggcctggccgtccgggccgccaagctggcctttgagaacctggaggccgccttccgggacggctccgacgccgtggcgcgggagcggatggccatggccagcaccatcgccggttatgccttcagcaatacgggcaccaccggcagccacgcctgctcctacctgctgaccgccaagtaccatatcccccacggcgaggcctgcgccctcaccctggatgcctggttccggaaggacgcagcggtgcgcccgctgctccacaccctcagccgcatgatgggcttcgccgacgccaacgcggccgccgaccggttggccgagctgaaggagctcaccggcatgcgcaccaccctgaccgccatgggcgtgcccgatacgcaggaggccctcgacgagctggcggccaacgccgccgcgtcgggcaacatggcaaacgacatctgcaaggccacaagggaggacatcgcgtccctttttgcgtccctgcgctgagaaaaggaggaacggatatggacaacctgacgccgtggaaagaggcgctgaaggaacggacgctgtacggctgctttgtgacctacggcctgccggacatcgcggaggtcacggccctgatgggctttgatttcctgctgctggacaacgagcacggggtgatcgagcagagcaccctggcggacatggtgcgggcctcccagctgcggggggtgcccgcggtggtgcggtgcaccatgaaggagtacgaccacatccagaaggccctggacttcggcgccaacggcgtgcagctccccctggtgaacaccgccgaggacgcccggcgggtggtggagctggccaactacgccccccaggggcgccggggcaccgcctacctcccccgcgccgcccggtacggcatggtggaggacaagcgggcctacctgaggcaggccaacgacaccaagctggtgtgctgccaggtggagacccgccaggcagtggagaacctggatgggattctggaggtggacggggtggacgtctacttcatcggccccggcgacctggccgcctcctacggggagcccgccggcagccccaaaatgctggagctgaccgagcggatgatccgccgtatcgtggccgcgggaaagaccgccggctactacgtgggcacgcctgaggcggccagacaggccgaggagtggggggcccgctatctggtcaccgcggtcaaccagtacatggtgtccggcggcaggagcttcctgagccaggtacgcgggggcggggcggtggccgcctcctccgcgtactgaggaggcccccatggaggacatgcacctgattctccgctggcacggggagaaggaccccatctccctgcgccagtacgcgcagattcccaacctgtacggcattgtcacctccctctatcatctgcccctggggcaggtgtgggaccgggcggaggtgctgcgcctgaaggagcagatcgaggcccacggcctgaagtttgagcttgtggacagcttccgcattcacgaggacatcaagcagggctatgcctccagggacgccctcatcgaaaactaccggaaaaacatccgcatgctggcggagtgcggcatccggatcatctgctacaacttcatgccggtctttgactggacccgtaccgatctggcccatgtcctccccgacggctcggactgcctgagctttgaggaggaaaaggtgcgggccgtggacccggagaggggcattgagctgcccggctgggggaccaaccacactccggcggagctccaggccctgctgcacagctaccggggcatcggggaggaggagctgtgggacaactgccgctatttcctccgggcggtgctcccggtggcggaggagtgcggcgtcaagctggccctccaccccgacgacccgccgcggcccatcttcggcctgccgcgcatcgccaagaacgccgcggactaccggcgcatcctcttcacccccgacctggacagccccagcaacaccatcaccttctgctgcggctccctgggctccggcgcggacaacgatctgcccgccatgatccgggaattcggttccagggggaagctcccctttgtccacttccgcaacgtccagctggagcccagcggcgacttttacgagtccggccatcagaccggctgcggcagcagtgacatgggggaggtcatgcgggctctgtgcgatatggatcagcccttctatttgcgccctgaccacggccggcgtatctgggatgaggcgtggagcattagagaggtgacggacgccgacggtacccagcgggtagagcatcggccggacggctggaacggcgtcaagcctgcggcgggctacggcctgtttgaccgcgccctgggggcggcctacgcccaggggctctatgagggcatccgcagggagcgggccgcccaattgacaaaggagtgagtacattgcgtaaagtgatttcccggcaggaggccgcagccctggtgcaggacggaatgacgctgggcatgctgggcttcgtgaccctgtcggttccggaggagctgctggtctccctggaggagcgctttctggccgagggccacccaagggatctgaacgtgttctacacctccgccatcggagacggcggggaacatggcgccaaccacctggcccacgcggggctggtgcggcgtatggtgggcgcccatgtaggtctggctcccaagctcaaccctctgatcacgggcaaccagatcgagaccttttgcgcccctcagggggtgctggttcatatgtgccgggccatggcggggcacaagtgcggcgtcattacccacgtgggcctcaagaccttctgcgacccggaggtggaggcatgctgcttcaacgacgcggccaggaaagcccacactgagggccgaggcatcgtccagagcattgagatcgacggccgccggctgctccactacaagctgacgccccccgatgtgtgcttcatcaaggccacctacggcgacagccgaggcaatctgtccatggagaaggaagggctgtttctggagcagttagagatggcccttgctaccaagaacaacggcggcaccgtcatcgcccaggtggataccctggtggaggacaacaccctggacccccgcagcgtgaaggtccacggctgcttcgtggactatgtagtggtggggcggccggagtacagccgccagcactacttcgacgccgtcccctaccatccggagtggaccggcgaggtcagggtgcccatgggtgccctggagccaatggagctgggcatccgcaagattatcgcccgacggggcgccatggagctgcggagggactgcctggtaaacctgggcttcggcatgcccgacggtgtggcctccgtggccggcgaggagggggtggccggcgagatgaccctgtccatcgagtcgggcacactgggcggcgtgccagcccccggcaacggctgcggtgcctccgccgacgtggaggccattgtcaagcacaccgagattttcgacggctatgacggtggcagcatcgacatcgcctatctgggcgcggcccagatcgaccgccacggcaatgtaaacgtgtccaagttcgccgggcggatgaccggccccggcggcttcatcaacatcacgcagaacgccaagaaaatctgctttatgggcaccttctcctcggtgaaggacaccgatatccgcctggaaaacggacggctgaacatcgtcaaggactccaatgtggtcaagtttgtcccggaggtagagcagatcaccttctccggcgattacgcgcgggagaccggccaggaggtgctctacattacggcgcgggcggtattccgcctgaccgaccaaggcctgaccctcgtggaggtggcccccggcgcggagctggagcgggacatctatccactgatgggcttccggcctgctgtggcggccgatctgaaggagatggatccgcggatttttcgcccggaaaaaatggggcttgtgctccaggattgagagggaaaacacgatgaacagctttactctggatgaaatctatgtggggcagaaggcgtcggtcaccaagaccatcaccaggggcgacatctacgcctttgccggcctggtggacgactacagccccgtccacatcgacaaggcgttcggcgagcagagccccttcggccggtgcatcgcccacggcttcctgtccggcgccctgttcagcaccctggcgggcaattacctgcccggcgcaggcagcctctatgtgcgccagagcctgaactttctcaggccggtctacgcgggggacaccatcaccgccacctttgaggtggtcaaaaagggcgaggaggtcaccaaacccgacggcacggtaaagttcagccccggccgcatcgttatgaaggccaccgccgtcaatcagaggggcgaggtggtggtggagggcgaggcatgctctatggctgcccgggaaaaggtggattgcagccggttctgaatccgggggactagcgcaatagtgcccaaagaggtgcgcgcccttatgtgctgtatttgtggaaatgtattaaagacataagatagcgcctgattcttgtgttgccgtcacagtgcacatacggtgtgcccgtgtataataaagttatccggatgagacagcaactgtggaacgacaaacagagaaatgagggatcaaagcaatgttcttgaaaaagttcggggatctggctgcgggcgtattcttcctgattctttccatcgccctcttcctggcggccagcgcactgccgcccagcctgatggggggacttggctccgacttcatgccgaaggttctggccatcattacctgcatcctctccttctttcaaatccgtgccggattccgcaccatgcgaagcttccagccgaatgaaggagcggaggaggagaggccggagtacctgcgggtgctggccaccatcgcggcattcaccgtatatgtgtttgtcattgagccggcgggcttcctcctcagctccatcgtgtatctgtttgcacagatcactatcctggcgcccaaagagaagcggggcatcaaagggatcatcctgttcgcggtgatcgccgtcgtggtgtgcgtcgcggtttactttatcttccggttcggtctgaatgtcatgctgcccgccggcatactgggttaaaaggaggcgcaactgatggaaaccttatccctgattggaaacgcatttgccgggatgatgaaccccatgtccattctgctgctgatcgtcggtgtcgcggtgggcattgtgttcggctccatccccggcctgtccgccgccatggcggtggccctcttcctgccggtcaccttcgccatgcaggcccatgaggcgttcaccctactcgtggcgctctacatcggcgggatctccggcggcctgatctctgccatcctcatcaacatccccggcacctcctcctccatcgccacctgcttcgatggctcccccatggccaaaaagggtgaggcgggcaaggctctgggtaccggagtggtattctccttcctgggcggcctgttctccttcctggtgcttatgttcgtggccccttccgtggcgcagattaccctgaagttttccgccatcgagtacttcggcgtgtgcctctttgccctctctatgatcgccgccctggcgggcaccagcatgatcaagggactgctctccggctgcctgggcctgatcattgccttggtgggtatggcgcccattgatggaaccaagcgattcaccttcggtatcaacgaactgtcctccggctttgacatcctgcctaccctgatcggcatctttgccattgcggaggtgctggcctacgctgaagaggtcaaaaagatgggaaaggccactcagatcaagcagagctttaaaatcaagggcttcggattcacctggaaggagttcgtggggcagaagtggaacgcactgcgctccgccctcatcggtaccggcatcggtatcctgcccggcatcgggggctccaccgccggtattctctcctggatgaccgccaaaaagacctccaagcacccggagaagtacggcactgggatcatggacggcgtggtggcctccgagacctccaacaacgcagtcatcggcggcgccctcatccccctgctgaccctgggcatccccggcgacggtgtgacggccatgctgctgggggcctttatgatccacggcctcacccccggacccctgctctttgtggagtccgcagacctcatctacaccatcttcatcgcctgcattctggccaatgtggtcatgctggtgcttgagctgggcggcatgcggattttcgtccgtctgctgagtatcccaaagtacatcctgctccctgtggtgctggtgctgtgcaccgtgggtgccttcgccaccaacaaccgtatctttgatgcccagtccatcgtgatcttcggcgtgctgggctacctgatgagcaagtttaagctccccgtggctcctttcatcctcagcttcattctgtgcgacctgctggagaccaacctgcgccggggcctgatgctgacccagaacgactttttggctttcttcacccaccccatcgccgctgtgtttatggtggccgcggtgctgttcgtggtgtggacggtaatcaagcaggtgcgcaaccgcaaaaaggagactgcgggtgcggcttgagcccattgagatcgaaatcaatattcactaaggaggattttcccatgaaaaagagactgcttgcccttatcactggagccgctctggttggaaccctgctggccggctgcggcagcaccagcgggaacaccgaatcccctgatgccgccggtaatacaggctccgcctcaggcggagggtggccctccggcccggtatccattgttgtccctgccagcgccgggggcggtaccgatctgctggcccgtgttctggccgagaaactgacggccaagttgggacagtcctttgtggtggtcaatgtcaccggcgccggcggctccagcggcatcaaccaggttcatgaggccgccccagacggcaacaccatcctcttcttccacaatgccctgctgatcaacaatgtcaccggcgtgtccgactactcctacgagggcttcgctgtggggccccatgtggtcaccgacaatgccactggattctatgtcagcgccgacgccccctacagcacctatccggagctgatcgattactgcaaggagcaccccggagaggtcaccatgggcgtcgaggtgggcggctttacctacatgatggtcaagtcctttgaggcggccaccggcgtgcagtttaacctggtagatgtgggctccaactccgacaaatgtaccgcgctgctgggcggccatatcgatatcatgcccaaccagtactctacggccaagggctatatcgagtccggtgattttgtggccctgggcttcccggccgaggagcgcagcgcagtctatcccgacgtgcccacagccaaggaacagggcgtggattggctctacaatggatatgaattcggcttcttcctgcccaaggacacccccaaggacattcaggacacctttgataccgcagtggcagagctgatggaggacgaagaggtgcagcaggccatcctggatctgggcaacgagcctacctacctgtccccggccgactacgagagccagctggcggatatccaggccgagtacgaggagctgtgggccgcggccaacgcggcagcctgagctcctcccccacaagaacacatggactgcctcgcccgtgggcggggcagtcccatccgattgtaaaagaggtatgcggtatgaaacgggagatttctccttttattcgcctgaacccgaaggacaatgtggtggtggcccgccgggacgtgcccgccggcatggcagtggagagcgagggctttaccacccgtaccgaggtgcccgcgggctacaaggctgcggccagggacatccggaagggggagccgattctcaagtacaacacctgcatcggctttgcagcggaggacacccccgccggcaccatgatgcacagccacaacattgtctttgagcacgtggatctggattacgccttcagccgggactatcaccccaccgagctcctgcccccggagcagcgggccaccttccagggcttcgtccgccccgacggccgggtggccacccgcaactacatcggcattctggtggccagcaactgcgccgccaccgtggcccggaagatcgccaaccacttcaccccggagcgtctggccgcctaccccaacgtcagcggagtggtgcccttcgtcaccggcctgggctgcggcatggagatgaccggtcccttcatggatctgctccgccgcaccatcatgggctatgccaccaaccccaatctgggcgcggccatcgtgacggccctgggctgtgagcgcaacaacatcgacggcatgtttgagcacgccggtcttcaggagagtgagaccctccagaagctggtgatccaggacgtgggcggcaccgccaaggccgtggaggagggcatccgcagggtggagcagctgctgcccgtggtcaacgcctgccggcggcagaccgtctccgccgagcacctggtgctggccctggagtgcggcggcagcgatggcttctccggcctgtccgccaaccccgccctgggccgggcggtggacctgctggtgaaaaacggcggcaccgccatcctctccgagaccactgagatcttcggcgtggagcacaccctcacccgccgggcccgtacgccggaggtggggcagaagctggtggatcacatcaactggtggctgaagtacaacgagggcaaggactgccagatcaacggccgtgtcagcccgggcaacaacaagggcggcctggccaatgtgctggagaaatccctgggcggcgccaagaaggggggcgagaccgccctgaacgaggtgtacgactacgccgaaaaggtcaccgagcacggcctggtctttatgaatacccccggctacgaccctgtggccaccaccggccaggtggctggcggcgccaccatggtggcctttaccaccggccgcggctcctgcttcggcggtgtgccctcccccgtgctcaagctggccagcaacacccccatgtaccagcgtatggagggggacatggatatcaactgcggggtcatcatcgacggtgaaaaggatctggacgagatggggcagctcatctttgagcgtatcctccaagtggcctccggcgataggagcaagagcgaactgctgggtgtgggcgagaacgagtttgtgccctggcccatcggcgtgctggcttaatgggaggcggatatggattgtgactgggactttcagctcaagaaccccggcctggccagcagtgagctgaccaacggcttggcccgcaccggccagcgggcgctgctctacgccaccggcatggacgaggaggatatgaaaaagccctttgtggcggtgatcaactccttcagcgagatggttcccggccacatgcacatgcgggaactggccgagcaggtgaaatacggcatcctggaggggggcggcatcccccgcgaaaccggcaccatcgccatctgcgacggcctgtgccagggccactgcggtatgcgctaccctctgcccagccgggatctcatcgccgactccatcgaaatggtggtgcaggcccaccactttgacgccatggtgctcatccccggctgcgacaagatcatacccggcatgctcatggccgccgcccggctggacatccccgccatcgtggtcaccggcggccccatgctgcccggcaacgtgggcggcaaccctctgttttgctccagtgagctgcgggaattccccggccgggtggagcaggggagctgtaccgtggaagagatgaagaaggccgaggaggccgccctgcccaccgtgggaagctgcgcccacctgggtaccgccaactccatgtgtatgctcacagaggtgctgggcatgtccctgcccggctgcggcaccgctccggcggtgtccaaccgccgcaagcgcatcgccaagcagtccggccggcaggtcatggagctgctgcgccggggcatcaccccccggcaaatcctcacgcgggaggctttgctcaacggcgtggcgggggccatggccaccggctcctccaccaatctggtgctccacctgctggccatcgctcacgaggccggcgtggagctgacactggacgacttcgaccgcatcagccgggaggtgcccttcgtatgtaacctccagccctccggcaaataccccatcgtctccatggacgcctgcggcggcattccggcggtgctgaaaaacgtggagcccaagctccaccgggacgtgatgaccgtcgcaggaaagaccctgggtcagatgctggacgccgtggagcctgtggagaacgacgtgatccgcaccatggagcacccccagaagccggagggcggcattgccgtgctctgcggaagcctggcccccgacggggctgtggtaaagcagtcgggtgtcaagccctccatgtaccggttctccggccgggcgcgggtgttcaattccatggaggaggcggacgcggcggtgagcgccgggaccattgagaagggcaccgtcctggtcatccggtatgagggccccaagggggggcccggcatgcgggagatgctctccaccaccgccctcatcatgggccggggtatggacgaggactgcgccttggtcaccgacgggcgcttctccggcgccacacatggcccctgcatcgggcatatctccccggaggcggccgctggcggccccatcgccctggtggaggacggcgatgaaattttcattgacatcgcggcccgccgccttgagctgaaggtctccccggaggagcttgagcgccgccgggccgtctggaagcctctggtcaagccacgcggcccggctctggccaaatacgccgcccacgtcagctctgcggaccgcggcgccattatcgagctggagaaatagcgcctgtcagtgagtgggttttcgttgagaccagaaccccgccggaatccttgggttccggcggggtttcttttccttttcagattcccacatatgcgcgacgcatccggagtccaaaagcgcctccgcggccaaccataccggtacttgtatggtctcatggctgacataccatcggtggaataggtaaagttgacagaagtgcaggcgtgaggcttgccgctgtgttgggtctatgctatgatagcgggaaaggagcagaactgtttatttgcaaagcagaggaggctgaaggcgtggacaccaaggaaatcgccatgcgatggctgagtgaaaatttgaactatgtggattctgtcaccgtcattgacagcacggggagaattattgcaaagcagaggtttaatccacgctatacggatgaagagaatctggctcataatcagtgggcgctgggcaagaacttgctggagctcttcccctctttaagtccggaagacagcacgctgctgcaggttcttcataccggaaaaattatatacattgaaaatcaggaggcatggaatctccagggcaggaaaacggtatgcaacaatctgaattttccgattatttttcggggcaaaattgtaggtgccgtggaaatttcacgagacatcacacatattgacaatcgtattcaccccgtaccgcccagtcagactccgcctgccccccgcagtgccgcggcccgctacagcttgaccgatatcataacccaaaattcagggatgctccgtttaaaggagacgattggaaaggtagccaacagcacatcctctgtattgatttgtggagagacgggaaccggcaaggagttggtagcgtcctcgctccacaatgccagctatcggaaggccaagccttttgtggcggtaaactgcgccgctctgcccgagagtattttggaaggactgctttttggctcccggaagggggcctttaccggggcggaaaaccgaaaaggcctttttcaggaggcggatgggggaactctgtatttggacgagattaactccatgccgctcaatctccaggcaaagctgctgagagtgcttcaggaaaaacaggtcatgccgttgggaagtacacagcctattgcggttgacgttcgtatcgtctcctcctccaactgtccacccgatgagttggtgcggaatggagaattgcgtcccgatctgctgtatcgcctcaacaccgtgacattggcgattccacccctgaaccagcggccggacgatatcccgttgctgtccgagtatttcctttataagtacagcagggtgttaggccggccggtcccccagatggcccaggagacgattctttttctgagcaattgcagatggcacggcaatgtgcgggagttggagcatgccattgaagcggcactcaatgttttgggagagggaagcgtgctctctctggagcacctgcccgcttatttgaccatgagggagcctccggaaattcatcagaagaatacggagccaacgctttcactgccggaaactatgggcttgtatgagaaaaaactgattttgcaggcattgatgtcctgtggcggcaaaattgtggaggcggcggcacttctgcagatcccgagaaccacgctgcagtataagattcgtaagtatgggttaatgattgaatgacaaaaaattgtcatttaagacgaataattgtcaataaggcgacgttgaaccgtatacaacctatgattgagagcgacaggcgacgaaaattcgtcgcctgtcgctcttataacattgattttttgcttccctgtgatcttaatatgagaaagatgctgttaatttccctgataatgtaaatttatttggcacacggtttgcactattaaaagaaagaaggaggtaacccggtgcattatggaagcctgaaccatcatacgtgaagaataggaggttcttatggaagaagtcatcaactatggctggctgtctctcattccggctgttgtagcagtcgtgctggcctttgccacccgcaacgtagtgctctccctggcaatcagcctgttcctcggcatcatgatccaagtgggcgccaacccctggctctccctgcagcacctgttcagcgactatctgtttgtcgatctggcgacagacaacaatccccagacgatcgtaatgatggcgaccgtgggcggctttgtagccctgatcgagaaatccggcggggcacgggcatttgcaaaggccgtggcaaacagcgtcaacagcaaagtaaaagcgcagctggcggcctggctgggcgggctggtcatcttcttttccgactctggcaacagcctcattctggggcccatgttccgccccatctttgaccgtctcaaggcatccagggcaaagctgtcctatattttggactccacctcctcaccagtctgtattctgattcccatcaccggctggggcgtctatatcatgagcattattgcgaccgagtttgaaacgctcggcatcaacggctctgacgcctccaccttcatggcggcgattccctatcaattttactccattctcgcactcttcctgattccaattgtggcgtttggcagacacgactttggattcatggccaaggcggaggagcaggcgcgtctgggactgccgcagaacatctcggacgacgaggccatcctggtatccgatgacaagaaggtgtctccctggaatatgatcctgcccctggtgatcctgttggggaccatcctagtgatgtttgtcagttgggggttcccgttccagaacattcccggctccaaaatccgcattgctctgacctccggttatctgctggcctctatcgtatgtatgattatgattacggcccagaagttgatgagctttaaggaaaccttcgacgtgttcatcggcggtattcaaaagatgggctccgtcctggtcgtcgtggtcctggcctggggcgtgggctctgtctgcaaggatcttggaacctctcagtttattgtggattccacgctggggctgatcactccgcatgtggtacccgccctgctgttcctggtgggcgtcattatctcctttgccacaggtacttcgtggggggccatggcgatcctgcttccgatcggcatcaatatggccgtcggttttggggtgtccatccccatgacaattggcgcggtgctgtccggctgcctgtttggcgaccactgctcgcccatttccgatacgacggtgatgtccgcaatggctgccggatgtgatctgctggagcacacccgtacccaactcccctatgcgggaatcgcggcgctggccagctttgtggcctacctgattctgggcttcaccaatgcaaatatctggattatgctggtggtcgccctggctctgctgatcgtattttacctcctctcctgcaggctgtggggagtgaaggccgcggagtccaagtaacaacgcatgagaaaaaggagtatgattgcgatatgacagaagcggagcgcagcaaatatgacggccgggatatggtcattctgaaccgtcatacggaggacaccattcaggaggacaagctttccttccccatgcagatggaaaaccattttgcccacgtccgcatgctttgggagcagggcatactgacacacaaggaggccagagccatttctgcggctctgcgtaagctcctggccgcgggaccggatgctacaggccgccggccgggcctaacggatctcttctccaatctggaggaatggctgattgaggaactggggatagaagtaggcggaaagttccacaccggccgttcccgcaatgatatgaacttgaccattgaacgcatgtataccagaaagacactgctggatatgtgtgaagcggtttccttcctgatggataccctgctccgaaaggcagaggagcacaaaaataccattataccgggctatacacaccactcacagcatgcgcagccggttacacttgggcacttctatctgagtgcgttcgaaaactttgcccgcgatctggagcgcctgctggcagcctacgaccacaccaacctgagccctatggggggcgcggccatcgccacgactggttttcccatcaaccgggagcgggttgccgagctgctgggctttgacggcctgcttctgaactctatgaacgccacgtccagcctggatttcgcctatgaggcggccagcgccatgtgtatttttatccagaatgtgggccgaatggcggagagcctgctgttgtggaacatgggagaggtgggcatctcgcgcctgaatttgaagtactgctcctacagcaccatcatgccccaaaaacgcaaccccgtggccctggaaacacttcgctattccggggaatggagctatggcgccctgagtacgatgttcaacaccatgaaagcctatacgccaggcaatgggcgggagcccggctttgtggtcagcctgtactatgaaatcgcgcagagagttatggacagcgcctatctcctggaggggattgtacgcactttggaggtggatcgggagcgcgctttggatatgacccgcaaaggcttttccaccatgaccgagctggcagacgagctggtacgcagccagggcctgtcctttgcggccgccaagaagctggtcggcaggctggtgcttctggcccatgaggagcatatcccctgtgaggcaattggccgggacctcctgcaccgggcgggcctggaggcgcttggggtagaagtggacatgccggaggaactgctgcgtgccgctctggatcctgtccagaatgtggaacgccgcagccttatcggaggccccagtcctgcacgtgtggctgaaatgatccagtggggagggggacggctgaaggagctggacagtcaatggaaggcccgaggggatcgactgaagcgggcctccagccgattggaggagctgaccgatgcattaattagggaggaggagtcatgacgctgtcagaagcctgtgcacactttattcaacatccggtaccgctgggcgaggaggaggtctacctctgcacccgctccatcctggatactgtgggggctatggtccttggcagccgtaccggggtggtagaaaaagctgcgcgggttattccgcgggccgggaaagccactctggcgggaattggcggaggcttttccgcgcgagatgcggcgttcctgaacggtatcagcggccacgagctggagttggatgacacctccagctccaatctggggcaccccaccgtggctgtgctgcccgctctgctggcactgggggaagaattgaacagccctggcgaagaactgatacgtgcattcgccgtagccaccgaggtggagtgcaagctggggcgtctttgcgctcacgccctccacgagcggggatggcatgccagcagtgttaccggtattgttggagccgccgcaggcgccgcgtatcttttgaaactgaaggaaaaggaactcgtaaactgcctgggaattgccgcctccatggcggctggtgtgcgggagaacttcgggacggataccaagtcgcttcatatcggcaaggcggctgcggatggacttctggcggcctgtctggcccgggaaggctgtaccgccgcctcctccgccctggacggccgggagggctacctctacgagtattccgggcttcgccttgacccgtttggttcagactggtacaagaccctgggaaaccgatacgatgtctgcacccccgggtttgcgattaaacagtatccctcctgtagcagtacccaccgtgcagtggatgcctttgttgatttggcgcaagtacatcattttcaaccagaggacatcgcctccatccgggtggaactgagtgcggccgctctgcgtgagctggtgacgcccgaacccagaaccggagatgaggccaagttcagcgttgggtttcaggtggccctctatttgagcgggttggacaacatgccggacaattatacagagaagattatcttccggcccgatatccaacggattataaaagccactcatctttgccatggggagcggtatgatgcgctcccagtggatatgggagtaggacctgccttcgtatccgtcaccctattggatggcacagagtaccatacagagcgcatttatcccgtgggacaccggacagatcccatttcggatcaggcgctggaggagaaattcctgcgctgtacccgcccggtattgggtgaggagcaggcgtgtgtgttatgcaggaccctctggaagctaaaggatgatgccgttgccaatctcatgcgccagaccgttcccattctccgatgacccgaatcccccggctcgttctgggccgggggatttgacatatcccgtataatctaaaatgagcgaataaggaaaggagagccacatatggactaccggatcgaacgggactcgatgggggagatggaggttcccgcggaccgctactggggtgcgcagacccagcggagctatcagaacttccagatcggcacggagaagatgccggaggagattgtgcgggccttcgggattctgaagaaggcggcggcgctggccaaccacaggctggggaagctggacgatgaaaggctgggcctgatcagccgggcctgcgacgaggtggtggcggggaagctggacgggcacttcccgctggtggtgtggcagacgggcagcggcacccagtccaacatgaacgtgaacgaggtggtggccaaccggggcaacgagctggcggggaagaagctgctccaccccaacgaccacgtgaacatgtcccagagctccaacgacaccttccccacggccatgcacattgcggcggcggtggcgctggaggacaagctgctgccggccattgacgggctggtggagacctttcgccggctggagggggagaacggggacgtggtgaagagcgggcggacccacctgcaggacgcggtgcccatcaccctggcccaggagatcagcggctggcggaccagcctggagaaggacagggcgatggtggagctggcgctgcccggcctgcgggagctggccctgggcgggaccgccgtgggcaccgggctcaacgcccccgcgggctttgacacggccgtggccgaggcggtatcggagctgacgggcaagccctttgtcacggcccccaacaagttccactccctcaccagtaaggacgagctggtgttcgcccacggggcgctcaaggccctggcggcggatctgatgaaaatcgccaacgacgtgcgctggctggcctccggcccccggtgcggcctgggggagatccatatcccggagaacgagcccggctcctccatcatgcccggcaaggtcaaccccacccagtgcgaggcggtgaccatggtggcggtgcaggtgatgggcaacgacgtggcggtgggcctggcggcctcccagggcaacttcgagctgaacgtgttcatgccggtgtgcatctacaacttcctccagtccgcgcggctgctcaccgactgcatccgctcctttaacgaccactgcgccgtgggcatcacggccaaccgggagaagtgccgccacaacctgcacaactccctcatgctggtcaccgccctcaacccctacattggctatgacaacgcggccaagaccgccaagaaggcccacgccgagcacatctctctcagggaggcctgcgtcagcctgggcttcctcaccgccgagcggttcgacgaggtgttccaccccgaagagatggtctgagcgggccgcagaaaggaagaaaaacgtactatggacgtcaatcaggaatccctcaagctgcacgaggaactgcgggggaagatcgaagtggtggcccgcaggcacatcgagacccgggacgacctgtcccttctgtatacccccggcgtggccgagccctgccgggaaattgcaaaggactatgagaagtcctttaccctcacccgccggagcaatctggtggcggtgatcaccgacggctccgcggtgctgggcctgggggacatcggcccggccgccggtatgccggtgatggagggcaagtgcgccctcttcaaggagttcggcggggtggacgccttccccctctgcgtggacaccaaggacgtggacaagctggtggagaccatcgccctgatctccaagagcttcggcggcatcaacctggaggacatcgccgccccccgctgcttcgaggtggagcgccgcctgaaggaggtgtgcgacatccccgtgttccacgacgaccagcacggcaccgccatcgtggtggccgccgccctgctcaacgccatgcgggtgaccggcaagcagatggggcagatgaagatcgtcatcaacggggccggcgccgccggcatcgccatcggcaagctgctcatctccatgggcttcggcaatatcgtcatgtgcgacatcaacggcatcatctgcgagggggatgaggggctcaacgccggacaggaggagatctcccacatctccaaccggaatcacgagcacggcgctctggccgacgccctgcggggggcggacgccttcgtgggcgtgtcccggcccaacctggtgacggcggagatggtgtccaccatgaaggacggcatcgtgttcgccatggccaaccccaccccggagatcatgccggacgaggcgaagcggggcggcgcggcggtggtgggcaccgggcgcagcgatttccccaaccagatcaacaacgtcatggtcttccccggcatcttcaagggcgcgctggccgtgcgggcccgggagatcaccgaggggatgaaaatccgcgcggccagagccctggccgccctggtgaccgacgagcagctcagcgccgactacatcctgccctccgccctggacaagtccgtggccgacaccgtggcccgcgccgtcgcacaggaggccagagagcagggcattacacgcgcctgaacacaagatttcgacgggttaggcagagatggaaaccagtgtgtatttcagcgatacaaagtcggggcagcaatggccagtgggcgggaaagccaggcttttttatcggtcggtaaaaaatacaggcggataattgttctatataaacaaatatcgttttgcaataacgaaaaatgttgacaaggaaatgcggtggacctataatcagaagcagaaagagacgtgatagacaatggaagggaaagaaaagagaggcgtaattgtacaatcggtcgcacgtgcccttacaatgatctcctgcttcgcaaatgatacggaactaggtatctctgaaattgcagaacggatggatctatccaagagtacgacatacggactggtcaatacattgacggcttttggatacttggaacagacagagaacaaaaaataccgcctgggtctcaagctttttgagctgggaaatcttgttcagtcccgcttggatgtccgcatggaggcgcggccctattgccagctgctggcggacaaataccgaaccacggtccacttggctacccattctgagggagagatcatctacattgacaaagtggataacagcagctcggttgttgtctactcacagattgggaagcgggcccccatgtattgcacgggcgtaggcaaagcgattttggcctttctgcccgaggagtatatggaaaaatatgtcctgtccaggcccctgataaagatgacagagcataccattacgacaggagatgggttgctgaaggagctggagcaggtacgggagcggggttatgcggtagacgatgaagagatcgagcccggccttcactgtatcgcagctccgattttcaatcacaagcgccagcctcagatggcgatttcgatgtcctttccatacggaagaatgtgggatctggattgggagcaggccgttcgggatgtcctatattatgctaaacagacatcggagcgcctcgggtacattaaataacaaatagcatgaattttttgaagggaacgaacggttcccttcaaaaatagctattattacgaacgtagttcggtaataacgaaaaggagagggatatgagagacatccgggatgatctttttcggagcatatacggaagacggttccgggcagctctgaccgcagagcgcgccggcgtattggccggcacggaagctgcaaaggcccaggcggatgagctggggatcgaactggagctctgcaaggcggatggagaggaactgatgcacggggagcgcatcggcactctggttgcggcggccaagcaggtggccctggcggaggagcgcatgatcggcgccctggcgaaggcaagcgggattgctactgcggcccgtacagcggtcctgatggcggatggacgcgccgaaattgtgtccggttcctggaaaaagatgccgccacagatcaaggagcttgtacgcggtgctattttgacgggtggagccaactgccggattgcagagcagccgatgatctatctggataaaaactatattcgtatgttgggctccatcccccaggcgttggccgcctgtgcatctttccacgagtatacaaaggtggtgcagctccggggagagagcgccacagttgcctgggagacgcaggctgctgtccagggaggagctgatatcctgatggtggataccggagcgcgggaggatctggaatgctgcctgtccgaactggcggctatgggctgtcgggaacacataaaagtggcatttgccggcaatgtaaagctgacggatattccggagctgtcggagcgggccgacatcctctgcattgggaaagaaattgtagatgccccgctgctggactggaagctggatgtgatgggggaggagtgttgaagcatgggattgaacctgctggaaaagacggagctctgggtcaatgaaattacactggccaacgccaatctgagcgatatggcggacgcggtggcggagcagcttggtctggacaagggaaaggtgatggtagtggatgtgcggccccgccacatcacctttgacgtgctggaaaggaatgtcccgcaggctgggattatgggaaaggagcgggcaattttgtcggcgctggccgccctgcccggggtgtgcctgacagacaaatcctatattcactccaacgggattctgggcctcatctgtgcggatgtggaggagcctgaagccgtattggacagagtctccaatatgacgcgggaaattcaggaaaaggtgtccaggcgggcaattgtttttcccactggatttgagctgaaacaggggatgattcaggacaccaacaccccgtttctcaagcatgagctggaagagcggggctattacgtaacagttggggaggtcatggaggataatgtggaggatgtggtggagaaactggatgacgcattgtcccaggggtttggcctgattgttaccaccggcggcgtaggggcggaggacaaggaccactcggtagagggggtctgccgcatggatcccacggcggcaaccccgtatattgtaaagtttcagcagggaactggccggcatgtgaaggatggcgtccgcatcggtgtgggcgtagtgggccccagccgtatggtagcgctgcccgggcctcacgacgaggtaatgtgcgcagctccggttctgctccggggcctggaggaaaactgggataaggagaccctggcggaccggctggcggcggcgctggcagacaagtggaggcggaaagggatggggcagcctcaccatcacaaccgtggacaggagaaaggatgaagaatatggaccataaacaggctgcgcagatgctgtgggaggcggagcaggggcggtaccagattgacatgctcacgcagacccatccggagatgacggttgaggatgcctatgccgtccagctggagaatgtccgccggcgggaggccgccggggaacgggtggtgggcatgaagatcggcctgaccagcgtggggatgcagcggttgctccatgtgcatgagccggattacggccacctgtttgaaaatatgctgctgctggagcgggagccctgcttggtgtcagggctgatccagcccaaggtggagggcgagctgtccttctgcctgggcaagtccctccaggggcccgggatcaccgtggcggatgtgtacgacgccaccgaatgggtgaccccttccattgaaatcgtggattcccgcattaaggactggaagatcaggctgcccgacaccatagcggacaacggctcttccgcacggtttatgctggggggacggatgatgcccattggtgcggtggacatgcgcctgaccggcgtgactctggagcagaacggggtgctggtgtcgtcgggcaccacggcggaggtgtggggcaacccagcggcctctgtggcatggctggccaacaagctggggcaattcggcatctccctcaaggcgggctccatcgtcatggcaggtgcggtgactgcggcggtcccggccaaggcgggagacgtgtttacagtcagcttccaggggatgggcagcgtcactgtgcgctttgtggatgaaccgggccattccgcgccgtcgggcggcgtgtatgacaaatagatggaaaaccagaaaaggagatcagcatggagagagtcaaagttgggatcatcgggcccggcaatattggcacggacctaatgtacaaggtaatgcgcagccggaacctggagatgaagaccatgacgggcatcgtggagtcggagggaatccggcgggctgcgggcctggggtttcagacctccatcgaaggcgttgaggcagtggcgagggacccggaaatcgggattgtctttgacgctacgggagccgctgcacatatgaagcacgcacccatcctcagagaggcgggcaaaattgtgtttgatatgacccctgcggcggtaggcccctttgtggtgccctgtgttaacctggaccatttgcaggagctgaatacggacaactacaacatggtcacgtgcggaggccaggccacgattcccatcgcttacgccatcaatcgggcggcggactctgagtatacggagattgtagcctgtatctcctccaaaagcgccggccccggcacacgggccaacatcgacgagtttacccagaccacctcgaaagccctccatgtggtgggcggagcagaccgctccaaggccattatcgtcctgaacccggcggagccgcccctgatgatgtccaacacgatctactccattgtgaaaaacccggacgaaagggccattgtggagtcggtcaaccagatcgtcagggaggtacaggcctatgtgcccggctattctctgcgcgtaccgcccattgtagatggcaataaggtgacggtgattgtgcaggtggagggggctggagattttctgcccaaatactccggaaacctcgatatcatcaacgctgccgcggtagccgccgcggaaaaggtggccgccaggatgcggaaggagggcaagtaagccatgagtctggacaagaacagaaaaatacatattgtggatactaccctgcgggacggcagccacgctgtgagccacagctacacggtggagcaggtgaccgccattgcctccgggttggacaaggtgggagtggacatcatcgaactctcccacggagatggcctggccggctcctccatcaattacggattttccgccacgccggagatggagctgatccgggcggccagccaggtggtcaggcgcgccaggctgggcgttttgctgctgccaggcgtggggaccattgaggatctgaaggaggccagggccaatggggcacaggtcgtgcgtgtggctacccatgtgaccgaagcggacattgccatccaacatctgaaggccgcccgagagctcggcatgatgccggtaggctttttgatgatggcccatatggcgcctccggaaaagatactggaacaggcacagatttttgtggacgcaggcgctgagtacgtcaacattgccgattccgcaggctatatgaccccggatgatgtgcgggcaaggatttctctgctggtggagaagctgcccattcctgtgggcttccatgcccacaacaatctggggctggcggtggccaacgcgctgactgcggcggagtgcggcgcggattacattgatgtaacctgccgggggcttggcgcgggcgccgggaatgcccaggcagaggtggtggccggggtattccagcggctgggctactcgaccggcctggacttctacagctatatggatctggcggaaaacgtggtggagcctatcatgcagcggccgcagatcatcaagagcgcgccgctcatgctgggctatgcgggcgtgtattccagctttctgctgcatacctaccgtgccgcagaaaaatttcacctgaatccccgggacattttggtggagctgggcagacgcggcatggtaggcggccaggaggacatgattatcgacgtggcccatgccctctctctggcgaaaacagagtgctgaatctgtcgaaaggacagtggcaaaatcgaattgaaaaaggagagaccagcatatgaagcgggtaaccatcatggcgcatgtggcccccgacatctgccgtggatgccgggtctgcgaaaaagtctgtcccgtctatgccattcatgtcaccaatcggaaggcggcggtggaggaacccgactgccgggggtgtgccaactgtgcggaccgatgcccattccatgcgattaccatggtcaagcgggaagagccctttacggttggtgtggatgtgagccggtttgatgcggcgaagatcctcgccctgtgtgaaaaggcccacttccatccacagcaggttttgtgctattgcgtcggcgtccgggcggaggaagtggccgctgccattctggatggagcggacacgccggaggaaatctcgtcccgcaccggaatccgtaccggttgtaccatcgagtgcatccagcccattctacgtctgctggaggccgccggcatccagcccaaacccaacccggacggctggcaatggtatggagagacggtcaccgcctggaccatgccggagaaggtcaagcagaaatatgccagccgaggcttctattttgacgaggaccggaagctgctggaccaggtggccgccaccaatcaggagatttaggagaggaggtaatcccatgtgcaacgagaatttgaagcacgcccccattatgcccattgccgctaaaccctcccagtatggtattgatccatccctggtgaaaaggcgcgtggccgaactgcccggcatgtgttccctccggttggccgaactgtttccagagctgcccccggtgatctatccgggcgggcaggatgcactggacaagctttaccaggtggccatggaggagctgcggaaggtggacatgagcttcatcaagaccggccagtcggtcaacatcctggcttctcaccacggcttcaccctgctgggcggccagccctacgccatcctgatcaaggccacccgggatgccatcatcgaaaagaccggctgtagggacgtgcgcctgcgggccggcgtgggtatgcgcttccgggagacggaggagtatatcaggcgctatcagctggacgagtacttcggccccggcaagaccaagggcgtggcccctattgatgagggcatccctatcgagacggaggtgggtaccctctacggtatcaaggctgtctacgacgccgactggattgtccactgccaccacaccgatgtgcgggaggtccacttccaccggcaggtggacaaagcggtcaagcccttcggcatgtcctatgcccgcatcgagacccgctccacttaccatcagaacctgggcccccgggccgccaacttcaccgcccgggccatctttgagagtccctttgtccagagcaaatttgcctttgcgtccttcctgaacgtgggtccccatggcgtcatcggtgtagatgcggataacgacctctatgccgtcaacgaccgggccacctttgttggctgccagctttatggaaaggtgatgaccctattcggcaagattgacgagtgcatcgccgtactggacttcccctgcccggtaccatacgtgttctccgccggcgtcatctacgccaacttcactggggccaaccaggatctctacgacatggagggcacccccctgccgccctatacctggtacactgaggccttttacaagagaaacggcaagccgatcctgaacgatatcccgccgctgaacccggccatcaagatgtgcgtgcacaactacgcgtggaccggatacccctccgcctttttctccgaccacattcccacggtggtggtggggcaggagcaggctgacctgttcgacatggagcctatgaacatcgagtatatgtcacacgcggtggtagccaagactacggagagcgccatggacttcgcctataagacgacaggcacggataaggtgatcatttttgacggtgccatgggcgggctgaactgctcagagtccctggcggatcttctcatcacaaaggcgccggaggtcagcaaagaggtggacgaaattctcatgcccaagtggttccgccagcggggcgtggatgtctccattcttaagagcctggctcaaaaatgagtaagcagacaactcggaacatggaaaggacatggtactctgctgtaggaatgagggttataacggcaactgtccaggcaccttttaaaggtgcagaacagttgggtgtcatcctgccgctccagagtcccggcctggtacaaagtgtgttacgttgtagtgtgctgagagcacattccctgtaactgtgatctgaaaattgcccatgatatgggcttggcagcccatggatcagtagatctccaaaaggtatttaccgcctgctggagaggtacggcccaaacgctacggtggcatatgtgccttatggccgctggaccgtactggatattgaagagaagaaaagagggaaaacagcatgggtgcagacactactgaaaaaaagagcggtttccgactgtttgaaaagggatgcggatttagagcgggagcaaaggacttgctcaaatataccaacgggtcgaccctttccagcgcgattatttctactatttttggctgcacaggtccttgtctcgtgacgattgcggcctccgaggcggctggctttaccacggcagagactgtgtcctggatttttggaatatatgttttcggcggattattgggggcaattatgtcgctctactataagatgcccatatccggagcattttccataccaggtgccacattgatggggacagcactggcaggctatagttttcaggaggcggctggcgcatttgtcatcgctggcgtgattgtgttgcttttaggcgtgacgggcttaataggaaaagtgatgcgctggcttccgctgccaatcgttatgggaatgattggcggatgcatgctcaagtttggtacacaaatcgtaacgggtataaataccttgcccatcgtatgcgggttggccgtgttggcatttttgttggtaccacgcgtaatcaaagggtttcctggagtcttggcggctctcgtggtaggggtcattgcggcgattgtcacaaactcctttgccggtgaggtaggagaactggtatatactccccctatgcttgttgttccgcagtttaaccccaatttgattctctcatgctccctgccgcttgcagccttggtagttggagcagaaaacgcgcaggcaatgggcgttttaaaggcccaaggctacaatgtaccggccaatgcaatgacagtagcatccggtatcggcggtatcatttccggcctagtgggtgcgcacaatgcaaatattgcagggcctatgaccgctatctgcgcatcggaggaggctgggcccaaggagggacgctatgcagcctctttttggaatggcgtcacattcgcagcgtttgggctggtgggttcttttacaattgcatttgtatcttttattccctctgaactggttaacgtgctggcaggtctggccatgcttaatgtactgattcaggcattcaatgagggattcggcaccttgaaatacaaaacgggagctttctttgcgctatgcgttggcgcctctggcctctcatttttggggattggttcagctttctgggcactggtggcgggcgtggttgtctctgcaatatgtgaccggaaagactttaagacggattcggcggtggttgaacaggccggttgagcctcaggtatatctatctataggtatactggagaagggacagcatgcggacaccaccagttgctctacagaaacatccggcggtaacggcactttgaggaggaaaacgccatatgaaacagtatattccctgccgtattgcagcgcttcaggataagctgagggagcgtggactggacgctgccctgatctatgaccgggaaaatctgatctacttcgcggggatttcggatctggagggaggagtgctttgcgttccctcaaacgggacggcggagctgttttgtctctggatggaggcggagcacatgcgccgggagagcggcttaaaggtgacaggctacctatttccggcggacactcaaagcaccatggcggctaaatggctccacaagctgggattggagcggccccgtgtgggatttacacgctattttatcagcctgaaggactaccagtgcctccgggaggccgtgccgcagatgaaggtggaggatattgcggcggtctgctaccaactgcgcagcatcaagtgcccggaggagatttggcgcatccgtgcggcatccaaggcattgaaggccggaatggatgcggcactatcagttgtcagagcggggatttcggaacgggatgtgttggttgaggcggagtatgcaatggggaaagctggaagtcagggctcccctttccggatgcaggtgctgacccatagccgacagatgcagaagcatccctatgccggcgctgcgttgctggaggataacgcaccggtggtgattcatttgggagcgtcggtggagggctacaccgcaaaaatgtgccgtacggtctttctgggtacgccgccggaggcatgtgtggagatctaccgggtgctccggagggctcaggaaaccgcagtcgccagactgcgccccggcgtgacctgcggagcgctctatcaggctgctgccgactgtgtggagaaagccggatacggggaacactgggtgatggaacacattggctacggtgtgggtatccggcagtcagagttctatcccatcatcgcaaagggaagcgcggtccccattgaaaaaaacatggtggttgacttgctcctgcccagcatctatgtccccaatatcggcgggccccggctgacggatacaatccttgtaacggcccatggcgcagagtatttaaccgattatagccgagaaatttggttccgctgaacggggccttgtatccggctgtgaagtaccgcgtggggaagagccgattactgaagaaaaatgcgcaatgtgattaacgggctcttgtatcgttccgctgctccttgatgcgctgaatcggcctgcggcggtacgaatcaaactgaaagccattgaaattagggccgcggccgtcaactgtgtttcataaccaagggagcagcgaccgattcaccaaacgataaacccgccagaaactacggattctggcgggtttcccttttatagcacggcgatcaatctggtaaagtgtacgaactgaagctctgtgccggagcggaacagagggaactttagggcagatgaatattatactgcttaattttgcgggagatggtggagacattcacgcccagagcttcggcggccgaccgcatgctgttggtgtttcgaagcgcctgctcaatcaaggttttttcataatgtgaaacggcatctcccagggtagataccggctgcaacgcctcgtctacagtgtcctgccgcagcagatccagaacaacgctctcctgtaccacatcgccctcgggacagcacagcgccagatactccaatgcgttttccagctcccgcacattgccgggccagcgatagcgtgtgagaatgtccattgacttgggcgtgagcgtgatggaccgctgatatttcctgcggtagatttccaagaagtgttccaccagttcgggaatatcctctgggcgcgctcttagcggggggatctggatgggaataacgttgagccggtagaaaaggtcgctgcggaaggtccctgcggcgaccttttcccgcaggttgctgttggtcagggagagaaaacggatgtccagacgccttgccttggtactgccaacccgggtgatctcccggttctggatggcgcgcagcagcttggcctggagatccagggggaggtcgccgatctcatccagcagcagggtgccgccgtccgccagttcaaagaggccggccttaccgccggcgctggcgccggagaaggcgcccttatcatagccgaacagctctgactccagcaggctggcggggatcgcggcgcaatttactttaatgtaggggcggttgttgcgcagactgtggcggtatacctcgtctgcgaccacctccttgcctacaccggactcgccggtaataagcacggtggcatcggaagccgctacatgccggattttctcccagataccattcagcgccttggagtgcccaatcatggggcgggcctccagggtgctgctgttttcattgacggaggacacaggctcccgcttcctgatttcctcaagattgtggaggaactgctcaaaatcgccctgcagcagcttcagggtggacaggggacggctgctgaccaccaccttggatagggagccatccctgttaaagacgggaacgccgacggtatagcccatcaagggcgggtctgtcttataggttgtggagagccgaaagactcgcttccggttctgaatgacatcgcaactggcacccccggtgaagattctgccctcctgcacgatatcgaatacgtttcggcccaaaacatcctccggctggacgttggtgttctgactgtaagcagggttgacatacagcacattgccttccccgtcggtgacgaaaatgctgtggtccacatgctccacaatctcatggaagtccagattttccctctgaaatgcatgcagttcatccactgcttcagacagtacctgggcggcctgcccggataccggcccgtcctgccggcagagcgcctctaacttttctgcgatcgtgtcaagccgtatatgtctgtccattgaagcacctccacggaaaacgtcgctttttcgtccctattattgtaccataattacgaatattgtcaaaagtgcaattgtttcaggtgcgcaacacagatgcgcagttccgcaacaatatgctgatatcccacaaatgtcccgccccgggaagcaaaccgccgatcccttggagccgtaagcagaaaaaggagcagcccgcttttttgctgcttggcacgcgggttgctatagaaataggatgtcaagcggttctatttggcattggctcaatcaataccgaggagaaggagtacaccgaaccgttcggccatccgccaattgaggattttccagagtgggaaccggtgcacatcattctgctgggcaacaacgtgatgggagtggagaatgcaggaggtgatattgaaaaagtaaccgggccagcgctttaccattgcggccttcccgctgcgctggtatatgggggatggcacgatgattcgtatggccgccattacggatgaggagcacatcaatcgaaacgtccctgaccgtgtttgcaaatacggcgtgaactgatggccgcaccggctgacatgaaatttgaaatgggagggatatctgtttcatgaaaaagaaaattgcctgcgctgtattaggtgcgatgcttctgggactctcgctgaccgcctgtggaaatgcggacaacccgtccacgggagagatcacggagtccggctaccccaaacgggagtttattgtggccgccatcgactcccacgacaagacatcggcccacgaaattgagatcttcaccaatctggttactgagcgctccggcggcgccattacattcaaggtcttttacgacaatctgctgggcaaagccaccgacaacctgaatacgctcagctccggaattgccgacctgggtacggtgtgcaccctttatacgcccagcaacctgcctttgtcgcagatcacctactgcgtgccctttgcccctgatgaccccgtcctggctgcaaaattaatgtataaagtgtccgaggcgtaccctgagttttatgaggagtacgaaaaaaacaacgtggtatgtctgggctggaagggcaatgagccctacaaactctattccaaggggcctattgaagaactcgcacagctaaaggggaaaaaaatcactttgggcggcgtgtactacatcccctggttccaatccatcggcgctgtccctgtcaacgctgcggcggccgatctataccagaccatcaagaccggtgttgcctccggctccttcgtctatgacagcatctactgcaactacaagctctatgaggtggaagactactgccttcaggtcggcctgggcgcgcgcaataacaatgtgctctgcttcaacaaggacatgtgggagagtttggacgagaagacccagcagctcttccaggagtgcgccgacgaggccatggccgagttccaggactggcagcagagcgagatggacggctgggaacaggagatgctcgacaacggcgttacgatttccaccctttccgacgaagccaaggccgagtgggctgagacagccctcggctatcaggacaccctccagacctggattgatgaggtcacagcccttggctatgacggcgctggcattatgtccgcctacctgcaggccggggaagagctgggttatgagtggcactttgataccactccctatatacagtaagcccctgtaccgccggctcctgtgcgtgcgggagtcggcagagaggacagataaaggaggaacggcatgtcaaagtcaatgaaactatccgcgttttatgaaaagcctgagctcttgatgaagctcttcggctgggtctccgccggggtgatgctgtttaacatggtgctcatctgctgcgatgtgttcatgcgctatgcgttcaattcgccgatccaggggacgacagagatcgttaccatgctgatggcctgggtggcctatgccggcatgggctacactttgctgaagggacagcacatgcagcttggcgccgtgtacgacaggctgcacggccggatcaagcacatcttcagctttttcatctacctgctggccacaatcctgtttgttgtcatgatcaaagcgtcctgggaccagttctgggcctcctggctgatcaaagagaagtcggtggccgccgtgacggtgtatgtattcatcggaaagttcggctgtttcctgggctggctgctgctggccattcagggtgcgttcatgacggtatactgcgccgtcggaatcgccaggccaaaccaggtggaccccatcctgatcaaatccgagctcccctccgaggatgagctgggcgcgtttggtgtggaagggacgcagaacgcggaaaaggatggtgacggctaaatggaaggcggaatcattttggccctggtcggcatggtcaccctgatcgtgctggtcctgatgggagtacacattgcggtggcgctgggaaccgtgggctttttcgggctggtcgcctgcctgaacctgcccaaggcggtggccatggtcggcattcaggcctacagcggaattgcaacctttgattatgcagtcatcccgctgtttattttgatgggcatgctggcaaccggaatcggaatcagtacagagtgctacgacacgctggccaagtggctgggccgcattcccggcggcctgggcgtggctaccacgctgggatgcaccgccttcggcacgctgaacggctccgcgctggtcaccggctccgtgttcgcaaagatcgctgcgccggagatgcgccggtacggctacaataccaatctgacctatggcttgatcgctgcctccggcaacatcggccagtttatcccgcccagtatcctgatagtcattttcggcgccctgtcgggcgactctatcggccgcctgctcatggccgccatcgcccccggtctggcactggcgatcggcttctctctgtttaccgtgatcgcggccatcgtcaagccctccctgttcccacgggtggagcagcgcttcacctggaaggaaaagctggtttccctgaagaacctgatccccatcgcaattgtggccgtggtgatcatcggcggcatcttcttcggcatctgcagctccgcggaagccggcgcgatcggctgtctggtgttcttcctcatgggcctcatcaagcgcacccccttccggaagatctggcgctccatcatggacacggtggagaacatgaccatgctgtttctgatcctggcctgctccggcatgtttgccaagttcatgaccgtgtccggtctggcccaggcgctgaccaacctggtcacccaggcccacctgagccccatcgttttcatggtggcagcggtagtcgtgttcctgattctgggctgcttcctggatgcctactccagcatcgccctgaccatccccgtgttctaccccgccgccgtggcgctcgggattgaccccatgcagtttgacctggtggcaattctcgcccttcatatgggcggactgacaccgcctgtgggcctgtgcgtttactcggtcaaggcggtggcgcccaaggatgtggacgtcatgggcatattcaagggctccatgccctatctggcggttatgatcgtcattacactgctgtttatctttattccaggactatccacctttatccccaacgctatgtttacctgatcaggctccatcctcatttctgccattttgaaaggagttattatcatgagtaagaccattcttgtcgacctgtcccatcccttcggccgcggcaatcccctgtggccctccaacggcgacttccacatcgaccgtgtgcagcacatgcccatgcactatcgtctgcttcagaccttcaacgacttccacatgcacaactccacccacgccgactccccctcccacgtgattcccgagtctccttatacccacgagctgcctctggagaactactatggccctgcggtctgcctggatatccccaaaaagcactgggagctgatcaccgttgaggacatcgagaaggccgccgccaaggtggagggcggcatccaggagggcgactgggtcctcatctgcaccggcatgaaccagcgctggggcgagaacgacgactacttcatgtactcccccggcatgtccatcgagggcgcccactggctggtggaccacaaggtcaagggcgtgggcttcgatctgcaggcgctggaccacatcctctatacctacgcggcccagcacggccccggcccctacgtcccccgcatcgtggacgagtacaagaaggagtttggtcatgagcccatcgaggactaccccgagtgggagccggtacataccatcctgctgggcaacaacgtcatgggtattgagaacctgggcggcgacatcgagaaggtgaagggacagcgcttcatgttctgtgccttcccgctgcgctggtatatgggcgacggcaccatcgtccgcgccgtggccatcaccgacgaggaccatatcaataaggatgttcccgaccgggtgtataaatacggcgtatattgatccgcagccgaacagaaaggtaattggaggccatgatggcagacaagaagaaaattgcgcttctgggtgccggcaccatgggaatcggcattgcacagatgtttgctcaggctggccatgaggtaaaactcatctatgtgtatgacgataaggtgcgcgcccggcccagagagaccatggaggccaatctgaatatcctccgggaggaaggagtgcaggatggcggggcgatccccgccatcctggaccgggtcagttggaccgagtctcttgaggaggctgcggcgtttgccgatgttgtcattgagtgcattgtggaggatctggcagtcaaacaggactactttcagaagctggacgccctctgccccctctcgacggtcctgaccaccaatacgtccgccatcagcgtgacggagattgccgggaaggccgtccataaggagcgcatcatcggtacccatttctggaatcccgcctacctcgtgccattggtggaggtgatccgtaccaaatatgtctccgaggagacggtggccgccgtatttcagctaatggaggaggcgggcaaaaagcccgtcctcgtcaaaaaggatgtaccgggcttcctggccaaccggatgcagcacgcgcttttccgcgaagcgatctctatcgtggaaaatgggatcgccgaagccggggatgtggacgacgccatcaagtacggattcggtatgcgcctgggggtctctggccccatggaggtgatcgaccgcggagggctggacctcacctactccattcacaagtacttatttccccacattgagagctccgccgagccctccaagctgatggtacagctcatggacgagggaaaactgggctttaaaaccggagagggcttccagctctggagtcccgggcaggtcaaagcatccaatgagacgttgacccgcggtctgattcaggtgtcccgcgcgctgggccggctctaatggcctgaacgtcaacggcggggaatctccctggggcacccggtggacgccaccggttcccgcattgtgattacactgctgtatgagctcaggagccgcgggctgcggtacggcttgcccccctgcgccggcgtcatggggacggcagtggtaattgaaaacttggattagaaagagggaaaccgcatgaccacaaccaggcgtttgaatgacagcaataaggtgattgtcaccgccgccctcaccggcgcggtcaccaccaagcaggataacccttatcttccgactcagccaaaggagattgccgaggcagcgctgcgctgctacgaggcaggggccgccatggtacatatacatgtcagggacgacaacgacgcgggaagcatgcgctttgacaaatttgaagaggcggtgggcctgatccgcgccactggctgcccggtgctgctcaacctgacctcctccggaggacaggggttctcctgggaggagcgtatccgtcccttccgggagctcagacccgagatggcgtcttttgacgcgggtacgatgaactggcttcacagtgtggtatttatgaacgaacccaagttcctggaactgtgcggccaggagatgcgcgccgccggagtcaagccggagattgaggtcttcgacatgggcatgctcaacaccgcaaagcactatttgaaaacgggcgtcctcgatgcaccggcccatttccagctctgcctcggcgcgccgggcggcatggaggccaccacggagagcttggtctacctggtcaaccacctgcctgagaactgtacctggagtacctttggaatcggccggggtgcaaatgagattaccctggccgccttggcgatgggcggtaatatccgggtcggtctggaggacaatgtctattacaataagggggtattggcccagggcagccagcagtttatcggccgggtgaagcgggtggccgccgagttcggcagggtactggctaccccggaggaggctcgtgctattttgggcctgaagtgaaatccgcccttgtaaagggacggatttctctggttgagaagctccgatggcaggggctgcccgcagatggatagaacggttccatttgccgaatacagattcactgtgtgatagaggagcggtgcacagtgatgcacctgccccttcccacggcagaagctgcaaaacaaaagctccgccggtttcctgtggaaacggcggagcttttgttccatatatgtcccttacgacgacctgtaacggggggagggctgtggaagctgcgggtgatggagtctttacttcgtgcagggagtgtgcgaaaggtgagcggatggcctgtacctgaacagcattacagataagcgtagaaaatattcagaatattcggattgaaggagtcctttggggcagaaatggcatgctgagagacaaaaggtgaatcgcggcagggtcaattcccgtgtttaggaattggctggagagccccccccagtgcgatgccgagcccgccggaagaggagccgcagattccggccgggccgcgcttacagtttgagagccaggccggaggccttctccttcagcatgcgcccgcacagctcggcaatgaacgcgcccgcctcggcggggttggtgccgccgcggtggatgttggagactacggtgcggctggcctcagggatgcccacatagccgccgtaggtcatgtaggcgctcatggactcgccggtagccaggccggggcgctcgcccaggaggatcacggtgaccttggagcccagggcctcggtgacggcatccatggcgcccacacggccgtacttgatgaagaagggggtgcccacactgacccccgtgctgctcagcccttgaaggatggcgggcaggatgtcccggaggttggcggacactgaggtgctggacaggccgtcggacaccacaagctgcacgtcgggattgcgcttgcagcgctgctggagctcggccagagtctcctgagagaagcggcggcccagatccggccgggtgaggtacatgtccttggtctcacagagggtctgcacggtgaacaggcccatctcttccagcagacgctccggcacgtcggtaaacacggcgtccatggcggccgcgtgatccgcccggaaccgcaggtaggtgttggtgcggcaacggggcccggctcgccacacaccgatacgggccaccgttttggagcgcatgcggcggaactcctccgggttggcgggggtgggcacgtcgataatctggcggaaatctacggcggacaggtcgcggacctctccgctctccaccgcgccggaggccggggggacgggagcggcggactgtgcaccggcggtatcgcccactacctcggagatggctttcaggatgagctctctcagttgggtttcattcatatcagttccctccctctcactgtaggaaaatggaggcgtcgccggccagctcggtcaggacacccttttcgtcaatcaggccccgcttcatcatccactggtggaactccggcgcgggcagacggccggagagctcccgcagggtggcgttgtcgtggtagctggtgtcctggtaggagagcataatatcgtcgttgaccggcaccccgatgtagtagttggcccccgcggcgttgagcagcatggtggccatctcctgctcgtcctgggtaatggaggtgtggttggtgtagcagggggccatgcccatgggcaggcccatcagcttgcccatgaagtgatcctccaggctggcccggatcatctccttgccgtcgtagagggtttccggcccgatgaagccggacacgttgttcaccatgaaggggcggaaaaagcggccaaagccgtaggtacgggcctccagggtcatctcgtcgaccccgcagtcggcgccgatggacacctcggagccctggccggtctcaaaatagagcaggttggggccggtgctcagggcgtgctggcaggccagttcataggcctccgtgcagagctggcggctcacgccgaagtcgttgttggcggcctctgtgccggcgatggactggaaaatcatgctcaaaggcgcgcccttccgaatggcgtccatctgggtggtcatgtgggagagaaccaccagttgggtggggatgtcgttgcggcagataaagctgtagaccgcatccgcgatacgccgggtgctctccacattgttttccacagggttgatgcccatgcaggcgtcaccgcagccgtaggagacgccctccatcatctgaatcaggatctcctcggggtcgtcggtggggctgttgggctggttgcggaaggccagcacgcccggctggccgatggtggtgttgcagcgggtgatgtggtgaattttgctggcgccgtagaccagatccatggcggacatgagcttggccacggccgccgctacctcaccggtgaaggcccggcagctgcgtaccaggtcgtcccccgtagttttgtggtccagaatccactcccgcagctcgccgatggtcatgcccttgaagcgctggtaggtgggctggttgagtccatcgagattgacccgggtcacctcgtccttttcataggggacggtggggttctcggtcagctcgcccaccgtcagctcggacaggacgatcttggccgccacccgctccgtcacggtttcggcggccacgccctgaagccggtcggcggccttgggctcgttggccttggccaggacatccctgatgtcgcggaaggcgaaggtctggccgttcagtgtggttttcaatttcattctgctgcacctctcctttgcgccggacgccccctcggcgcccgtttcaagcttgtcaaatttggctgtttatgcaaaacagcccaggggcagcgcctgcgctgtccctgggctgcatcgcccgtgctctgtacgcgccgccatagcctcaggtcggcgcacgatttggttttactgctccagaaagtcgaaggagatccgcgtcccgccggggccgctctccacgctccactcgccggtgagcttctcccgcacgatcgtggaggccagctccagaccggcgcctccggggcgagggcggtccgcctggaagcccacgccgttgtcccagacggtgagctggcagagggggcgcccgctgtggagctcgatgccgatccttcccgcctggccggagggaaaggcgtatttcagggcgttctgcaccagctcgttgaccaccagggccaccgaggaggcgcagtccgcggacacaatgacgtcctcgccgcccacgtggatggtgacacggcgggcggagggcaggagggtctggagcatgtaccggcggatctgctccagaatctgaaggagggagaccttctcccgggagacctgtacgatgccgtccagcgtggcggccagggagagcagccggttggccgtatccagaagggcggtctgcaccggcggggactcggtcggatcacagccccggctccgggtgaggttggcgagcatctgaaggttgtttttcatgcggtgccgcagctcctgaagtgccgtccgctgcagggccagctcctcctctagctgccgctggcgggtgaggtcgtggatgatgagcgccgcccgggcctgcccggaggagagagggaggcgctggtactggagtacccggttggccagggccgtctcgtgcctgtcctggtcgcactcgctgagggcggcgggctgaatgttgttgacgggcatcccggccagagtgccgatgtaacccatccggcggtagagggctgtggccgccgggttgaagccgcagacccggtcctcctcatccaggaaaagaacggcgtcgtccagacagggggataccgcagcccagtccagagccccggacgcctgctccgcctcccgctccccagcgggcggcggctcctcggcggccagagcgggccgctcatagatgaggacgccgatcagccgcccctcataaaagaggggttccaccgactggacgatccggcggtcctccggcatggagaccgcccgcaccccggaggtggcaaccgccagacggaaggagcggtccaccgccggctcgtcccgccagtggatcagcatacccaggatggagctgcggtagttggaggggacggtttggggcttcgcctcacagaccacgatggcagagcgcccgctgacggtccggcagtcgatgaagacatccgcctgctcggcgttggccagggcggggagcagggcgccataggattccaggtaggagatctccgcgtccgtgagatccgtgtatttctgacagagcatccgcgtggcgctaatcatgccgctcctcctgctgggccagcaaatagctggcgacccgggccatagacatgcccttgcggcggctgagctcccgaatgtactggtaggcctcgtcctcgcgcatccccctggtctccatcagcaggagcttggcctgatcgatgggctcccggttctgacagcgccggctcaggtgctgatactccttgttcagcaggtagtactccttgctgcgcgcaatacacagctcgatggtaggcagaatcttctccgcctcaaaaggcttggtgaggtaccccgccgccccgcacgcctgtacgcgctcgatgtgctcccggtcgctgaacgccgtcaggataatgacacatttggcggcccggtccgccagaacctgtctggccacgctcacgccgtccagcagcggcatctggatgtccagcagcgccacgtcaggggccgacgcccggcagccctccaccgcctccatcccgtcacaggcctcgcccaccacccgatatccggggagcccctcaaaaaaagtgcgcaaggtacggcggacgccctcatcgtcatcagccaggaaaatggtggtcttgcccatcctggtcacacccatacgcctgtcctcccgttttacaaaaaagagcatcttgaagcgcacaaaaacgcctcaagatgctctccacgcatctgaagtcaaacccactcccgcccggaagtggagtacggcaggtttgctacacccggcataacctgacctttcgattgtatacgatattatataaaaaacccgcctttctgtcaaccgtaatttggaacttatggctgggataggagagaaaattgtgatattctgcctccgccatcttgacaggcggggggcgcgcggctataatgaacgccgacaagtgaatcagcagacggtagcgattgctttcattgggaatgcggtgagaatccgcggcagccctctctactgtaaggatgacaagcgcccagatatgtcactgtccggtacgccggatgggaaggcgggcgtgaggatgagtccaagccaggagaccagccgcctgcggtgtgtgcacgttctttcggtggggaaagctgtgcagcgccggtctgccggcctgtcatccgattgcggctcctctctggaaaacaggggggagtttttttgtgcatggattcatgcgtcagtcaatttgagaggagcatgaacatgaaaaagcgcaccctgtctctgctgcttgccgttgcctgcgccctgtccctggccttgtcgggctgcggcggcgcgcccgcgccggatgcccagacctccgccccggcgggcagcgaaacccctgccgccgtggaccagacccgcgagatcgtctttgccgcctcccgcgaccagtgccctggcgagcaggacgcctactacgcctccatgtccctgggcgtgtgggagcccctgatcaccaaggacgagagcggcaagcccgcccccgccctggccactgagtgggagcacaacgaggactctaccgtgtggaccttccatctgcgggagggagtcaccttctccaacggcgcccccttcaacgccgacagcgtgctggccaacttcgaccgcatgaagaaggggcccttcgagtcctccttctacggcatgaacatcgacaccatctaccccggcctggtctcctacgagaagaccgacgattacaccgtggtactcacgctctccgagggccagcccctgctggactacaccatggtcaactacggctccgccatcttcgagccctcctgcttcgccgaggacggcaccttcgccggcttccccatcggcaccggcccctacgtggtgaccgagaacgtgctgggccagtactgcgtcatcgagcgcaacgacagctactggggcacccccggcatcgccaagaccttccgcttcaaggtcatccccgacgccgagacccgctacaccgccctgcgggccggcgaggtccagggcctgtgcgatctgggcgccatctccccctcccaggccgcggagatcgacggcgatccggcctacaacgtgtccgtgggcgactccggcatcacccacttcctcaacgtcaacggcggcgccttccccttcaacgacgtgcgcatgcgggagggcctgtccctgctgctggaccgccagaccatcatcgacagcttctacaacggctacggcctcgccgccggcggcttcctgaactacacctccgccttctaccgcgagcagcccgtgcagcacgacccggagcggggcgccgagctgatccgcgaggtggtgggagaccaggaggtggagctgctgttcctgctgcccggcgtggacgccaaccgctatccctaccaggaggaggccgaatacatccagtccctgctggagaacatcgagggcactcacatcaaggtcagcatccagcagatggactggggcccctgcaaggaggagatggaggcgggcaactacaacctgtgcctcaagatccagggcctgccctccgccaaccccttctccctgttcaaaggctttatgtacaccgagggcggcaccaacatcagctacggcctgggctaccacaatgaccacgtggacgagctgatcgaggaggcggccgcctgcctggacgccggccgcctgaccgagatctacacggagctccaggagatctccgccgtggacttccccaacatccccgtgctgtactcccaggaggtggtggcctcctccagcgacatcaccggatatcaggccacggtgtacggcctgaccggcttcacccaggtctgctgggccgggtaaggaccgtgtgtgaaaataagcccccgcgaggcgggggcttattttccgtttctattctgtctccgaaggcggtggatcatggcaattctcaagtacatcggccgcaggctgctggtgctcatcccggtgctgctgggcatctccctggcggccttcctgctggggcgcatcgcccccggcgacccggtggacgacgcgctgttccgcatcggcattgaattccccacggaggaggaccgggcggatatgcgcgccgagctgggcctggaccggcccttgccggtgcagtacctggactggctgggggacgccctccggggggatctgggccgctcctacatcggcaacaaggacatcgcccaggagctgatgacccggctgcccatcaccctcaaggtctccctggccgccatgctggcggcggtggtgttcggcgtggggggcggcgtgctcatggcggcctgccacggcacatggctggatacggtgctcaaggggctgtccaccctgctgctgtcggtgcccggcttctggctggccctgtttctcatcacggtgttcgccgagtggctccacctgctgcccaccagcggcctggaccgggggctggcctccctggtgctgcccgccgtggccctctccgccgccaacgtgggctccacctcccgcttcacccggggcaacatcctggcccaactgggggagcagtacatcgtggtagccaacgccaagggcctgtcccagcgggcggtgatggtggggcacgccttccgcaactccctggtgcccatcatcaccctcatcggcaactacttcggcggtatcctgggcgggagcaccatcattgagaacatctttgccatccccggcctgggcagctatgtcctctccgccatccagaaccgggactaccccgtgatccagggctatgtgctcatcaccggcaccaccttcgtgctcgttacgctggccatcgacctgctctacattgcggtcaacccgaaaatccgcctacaggggggagaggcatgacaagacgccggaaacagaacatcaagctggccctcgtgtgcgccatcctgggggccattgtcctcatgaccatcttcgccccctggctggccccctatgatcccctggaggtgaacatggagctgcgcctgctggacccctgccgggcccatcccctgggcaccgacgccctggggcgggatgtgctcagccgggtgatctacggcggccgggcctccctgctgctggcggtggcggccacggcctgctccatggccgtggggctggtgatcggcgtggccgccggctactgcggggggattgtggacggcgtgatcaccgccatctccaacgtgttccaaggcctgcccggcatggtgctgatgatcgccctggtgggcgtcctggagcggggcacccggagtatcatcctggccctggtcatcacctcgtgggtgggcttttcccgcctggtgcggggggaggtcatgaaggtcaagagcgagatgtacgtcgagggcatgcgctgcctgggggcggggcacctgcgcatcgtcctccgccacgtgctgcccaacatccgcaccaacgtgatcctccagttcaccacccgggtggggcgggtggtgctgtcggtggcgggcctgagctatctgggcctgggcatcgagccccccacccccgactggggggagatggtcagcggcaccgcccgccggtacttccgcagcgccccccatctgctgtgggcgccgggcatctgtattatcctgctgaccctgtccatcaacctgctgggcgatctgctgcgggaccggctggacgtgaagcaggacgcggtgaaggagctgtgagcatggtaccggacattgaaattcagcacctgtcggtatgcttcgacaccgcccaggggccggtgtacgcggtcaacgacctgtccaccaccttccgggcggggcgcatctccggcgtcatcggggagagcggcagcggcaagagcgtcatgggtatgtccctgctgcgtctgctgcccaatacggcccgggtgacggggaagtgcttcttcggagaagacgagctctactccatgcccctgcggcggctgcgcaggctgcggggggcggccatcggcctcatcccccagaaccccggcgcctccctggacccggtgatgaagctccgccgccagctcaccgaggccatcaccacccacgggcgctggaagcggagggaggcggaggcccaggccgccgagctgctccgccgcttcggcttcgaggagccggagcgcatcctgaaccagtattccttccagatgagcggcggcatgaaccagcggctggtgtccgccctgggcctggcctgccggccggggtgggtgatcgccgacgagcccaccaagggcctggacgcagtgatccgcaaccaggtgtactccgtcctgcgccagatctacaccgagcaccactgtagcatgctcgtcatcacccacgatctggccctggcccggcggctgtgcgacgacatccgggtgctctacatgggccggatcatcgagcagggcacggcggaggaggtcatggagcggccccgccacccctataccgacggcctgatccgctccctgcccagccggggcatggtgcccataccacccccggaccccggacggctggagcacaccggctgccccttctacccccgctgccccagggccatggagcgctgcggccgggaggtgccgggggaggtcgcgctgcccacgggcgggaaggtgaggtgctttctttatgaatgataaggtgctggagctggaggaggtcagccggacgttctccagcggcgtgttccgcacccacaccgtccgggcggtggaccgggtgagctttgccctggagcgggggaaaaccttcgggctggtgggcaacagcggctgcggcaagaccaccctttcccgtataatcacccgcgtcctcaagccctccggggggcgcatccgcttcgagggggaggacatcgcacgcctggactggaaggggagccgggcgtaccaccggcgggtgcagatcatcttccagaatccggaggcctccctggacccctccatgcgcatccgggacagtctgctggaggccatggccatccaccggctgggggagagccgggaggagcggatggagaagatccgggccgcgctggggcaggtgggcctgcccgactacctgctctcccgctacccccaccagatcagcgggggcgagggccagcggctggtgatctgccgggccctgctgctggagccggaggtgctgctgctggacgagcccacctccatgctggacgtgtcggtgcaggccagcatcatgaatctgctgcgggagctccaggagcggctggggctgacgtacctctacatcacccacgacatcgagttgctggggtggatcagccacaccatcggcgtcatgcagagggggcggctggtggaggtggggagccgggaccaggtgatggaggcccctgtccacccctacaccagggagttgctctactcctacacccactgggagggaggcggggagacatgagggagcgggtgcccatgaccgacttcgcccggcagtgggcggagcacgtggcggccagcgcctccccccggatgaccgacgaccaggcggagcgggacttctggcacgccttcatgacacgcaagacctatgccccggagccctccgccctccaggtgctggagcgcctgcgccccctgctgcgggcccgcggggtggagaccgccctggaggtggggcccggctggggcagctataccctgaccctggcggagctgtgccgggaggtggcctgcgtggatctctcccgggacgtactggacttcgtcctccgggccggggcggagcgcggccgggacaatatcaccgccttccatgccaagtgggaggagttcacgccggagcggcggtacgatctggtcttcggctataactgcttctaccggcaggcggatctggccgactgcttccggcggatggaccgggcggcggacaagctgtgcgtggcgggcatgaacaccggcctggcccccgcctggctccatgagctggacgcggcgggaggtcgggtgagctgggagtggaaggactacatgtacttcgtgggggtgctctaccagatgggcattgacgccaatgtgatggtgctcccctttgagaaggaactgtcctacccggacaccggcgccctggtgcggggggagtgcgcccgctgcgcccccggcgcggtggacggggagaccgccagggccatcctgtgccgccatttcacccagaggccggacgggagctggtgcgcaaacgtgaaataccgcagcggcgtggtgtggtggacgccggtccaccggggctgagccgccccgcgtcatgcagaaggggcccggccgaatcgtgcgattcggccgggcccctttttgcctggagggccggggctcagccctggtccttttccatcatgatgctgaggatggtgcggtcagtctccaccatgccgggggtgctgatgcggcccatgttgcggatgacctgctccggggtggcggcgcagatgccgtcgctggggctgaccaccacgccgccgacggccaggtaggcgctcatgatggcggcggaggcggcggtggccagcttgagggcgcagccgatcttgccgccgtcgcagatcatgccggtcaggttggcgctcatgttgatgatggcggcgccgatctgcttgtcgtcgccccccaggagccacaccatggcggcggaagcggcggtggcggcggacacgccgcagccgcaggtggcgctgagcttgccggtgaacagcttgatgtagacgttgagcaggtgggagaaggccagggccttcacggtggcctcccggctggagcccaggtgcctggccatctccaccacggggatgatggcggtgatgccgtggttgccgctgccggcgctgctcatcaccgcgtaggggcagccggacatgcgcccctcggcgctggaggccacccgcaccatggtgcgggccatcaggctgctgcccatgatgtcggtggacaggtgggccttgagggtgtcggcgatgccgatgcccaggcggtgctccaggccgtagtcggagagggtctcgttcatctccgcgccctccagcataaaggccagctcctcctcgccagcggagtccgccagctcccggagctgggcgacagtcatggacttgagcttggcgtggagcgcgtcctcgccgccggcggtgtactccttctcaaagagcacctcgttgttggcgctggtgtagatgatgttggagtgggtgtcccggatggtgctgatgccgatgccccgggtggtgatgatctcggcgtgggcgtagagctggctctccccctcggcgatggtcacgctcacctgcttgtcctccaccagacggatggcctccttgctgacgatgctgttgatctcctccagcagctccagccccttctccgggttgcccaggcaggcacccagggcggcggcgtacttcaggcccacccgctggaagccggggatgcccacgctcatgccgttcttgtagatgccggggttgacctccatcttgatggacaccacctgtccgccgatggcgtggtaggcgtcggcggcgcagagggccacgcacacgggctcggtgcaccccagggcgggaaccacctcctggtgcagcagggtcagcatctcttccttgttcagttgcatcgttcatcgctccttttccgccggccccgtggggcggccaagtcttctgcctattttatcatgcaaccggcatgccaactgcattttttgccgccaaagccaaaaatccgcgaaaaaaagcggggatcggcttgacatggggcgggaaatcccgcagaatactattaaatcggttaaactggttaaagtaaatggccaaaaaggaggggagaaccccatgaaacaggatgtggcggttatctctctggacgcctacgccgggcagttttacgcccagcaggtccaggagctgttcggcgagcggatcaccgtctgctcctacagcgtgcgggacggctccatcgagcacatgccccgccggtacgacctctatatggtcaccaccgacgccttcgactccctgggagatctccaccagtacgtccccatcgacggggagatgatggagatccacgtcaccctccggtgggacgtggtgcgccgcctccagagcctgccggcgggcaagcgggccctcttcgtcaacctgagcgacaagatgtgccgggaggcggtgacccgcctcaaccaactgggggtcaaccaattggtattcgacctctaccaccccggcgcgccggagccggacatgggccagtatgacttcgtcatcaccccccaggagacccgctacgtccccgccggggcgaaggagatcatcgacatcggccagcgggtgtgcgacagctccaccatgatcgaggcggccctccgcctggggctggaggagctgctggagagcgagcggtttgagcagtaccagcgggaggtggccaccaatacctacagctttgaccgggtgttcgcccggggcctgcggctggagagccagtttgagatgctcatggagattctggatgaggggatcgtgggggtcaacgagcggggggaggtctttgcctgcaaccgcaagctggaggagatcaccggcatcccctgcggcgaggctctgcaccgccccgccggcgcggtgtaccccttcctgccctttgcccgctgcctgaaggagaaggccccccagcccgcccgggtggtgagcgccgggggagtcaacatcaacgtggccgtggccccggtgctgcggggggacgcctgcatcggcgccttcgccacggtgcagcggttcaacgatgcggagaaccggcagaacgagctgcgcagccagcttctccacaagggctaccgggccaagtatacctttgacgacgtggtgggacagtctcccgccctgctgcggtgcatcaccatattaaaaaagatgagtctcacccccctgccggtgctcctcatcggcgagacgggcactggcaaggagctgtttgcccacgcggtgcacaacgcctccccacgcgccggcggggccttcgtggccatcaactgcgccgccatgccggaaaacctgctggagagcgagctgttcggctacgaggagggggccttcaccggcgcccggaaggggggcaagccggggctgtttgagtttgcccacgggggcaccctcttcctggacgaggtggagggcatgagtaccgccctccagtgcaagctgctgcgggtactacaggagcgggagatcatgcgggtggggggcaaccgcattatctcggtggacgtgcgcatcgtggccgctaccaatgaggatctggagcgccgggtggaggagggcagcttccgccgggacctctattaccggctcaacaccctgcccgtcctcatcccgcccctgcgggagcgggagggggatctgctgttgctcatcgaccacttctgccgcaacattggggcctccttcaccctctcgcccgagctggagcggctcctgctggcctaccagtggcggggcaacatccgggagctgcgcaatgtagtagagtatttcagctacctgggacatactgtggtgggggtggaggagctgccccccaccttccactacctccccgccgccgcgcccccggcggagctgcccgccctggccgactgcccccgggaggacgcccgcttcgtgctggagcggctctacgaggccgaccaggagggccgcagcctggggcgggaggccatcctcgccgccgcccgggaggcggggctcccctgctcccagcaggaggtgcggcgcatcctggccgggctggaccgggcgggcctggtgcgggtgagccgcggccggggcggcacccgcctcaccccggccgggcgggccctgtgccgccggcaggcggtggagggcggagcggaaatggtttgaccaatttgaccgttttttctttctttgaccagtttaaacgcgccctgctgcatttctccgccgggtggtcctggactgcccggcgggtttctttctgttatgcataaaacagcagactaaattttaagcttatttaacaatgttttgccgcccggagcgattcggcacatagattgcttttatggtcggacagaatacagggccgggaagcccaggccaggagagaaagaaggatgatcccctatgaagtatgatttcgacaccgtggtggaccgcggcggcaaccgctccgccaaatacgacgagcggatgaagaagttcggcaccgaccaggtgatccccctgtggatcgcggacatggacttcaagaccgcccagcccatcgtcgacgccctcaccgctagggcccaggagggcatctggggctataccagccgcccggactcctattttgaggccatccggggctggcagaagcgccgcaacggctgggacatcgacccgcgcctgatgagcttcagcctgggtgtggtgcagtccatcagcgccatggtcaagctctttaccccggaggggggcagcgtgctcatccagaccccggtgtactccgagttctacgacatgaccgaggcgtggaaccggaaggtgctggagaatcccttcgtggaaaaggacggcaggtgggagatggactgggccgacttcgaggccaagctggccgaggccgacctcttcctcctgtgcagcccccacaaccccctgggcatcgtgtggacgccggaggagctgcgccgcatggtggagctgtgcatcaaacaccgggtggtcctgttctccgacgagattcactccgacctgatcttccacggcaagcgccacacccccaccgcctccgtctccgacgaggccgcccggtatgtggtcaccggcatctccggtaccaagaccttcaacctggccggcctgcaggcctccactgtggtgttccccaacgcccacatgaagcaggtctttgaccagttctggatgaacatggacatccaccgcaacaacgccttctccctcaccgccatggaggccgccttcaaccacggcgaggagtggctggagcagctgctgccctacctgtccgccaacttcgactttgtggcggactactgccgggagcacattccacagatcaagacctgcgcccccgacgccacctacctcatgtggctggactgccgggcgctgggcctggacaacgacgccctgcgccgcttcatgatcgagcaggcgggcctgggcctcaacgacggctgctccttcggccgcagcctgaacggctacatgcgtctcaacgccgcctgcccccgcagcgtgctggagcgggcgatgaagcagctcgaagcggcggtcaaggccctttgagcccacacaggactggtaaaaggaggtaaattccctatggcaaacctgcaaaagaagagcttctggcagcagtacggcaacctgattctcatcctcagcggcatcctgatcggcgccctcatcggcgtggtcgcccccaacttcggcaccaccatcaagcccatcggcgacatcttcctcaacctgctgttcacgatcgtggtccccctggtgttcgtgtccatcgcctccgccgtgggcagcatggccaatatgaagcgcctgggcaagattctgggcggcaccatcggcaccttcatcttcaccggcgccatcgccggcgtctgcgtgctggtgtgggtcaacctgttcagcccctcggcgggcaccaccatcgagctggtggccagcgaggtgggcgaggcacagaccgccggcgagctgctggtcagctccctcaccgtgtccgacttctccgacctgtgggacaagtccaacatgctgcccctcatcgtcttcgccatcctcttcggcttctgcgtctccgcctgcggcggcgagcagagccccatgggcaggctgctggccaacctgaacgacatcatcatgaagttcgtgggcatcatcatgctggtggcccccatcggcctgggcgcctacttcgccaacctggtggccacctacggccccgagatcatcggcgactacggccgctccatgctggtctactaccccctgtgcgccctctatggggtgatcttcttccccctctacgccttcctggccggcggccggcgcggcgtggcggccatggtcaaaaacatcctgcgccccgccgtcaccgcctttgccacccagtcctccgccgccaccatccccgtgaacaaggaggcctgtgacagcatcggcgtgcccaaggacgtcagcgatctggtgctgcccatgggctgcaccatgcacatggacggctccgtgctcagctccatcaccaagatcgccttcctctacggcgtgttcggtatggacttctccggcgcgggcacctatggcatggccattgtggtggctatcctgtccgccttcgtcctctccggcgcccccggaggcggcctggtgggcgaaatgctgatcgtctccatgttcaacttccccgccgaggccttccccatcatcgccaccctgggcttcctgttcgaccccgccgccacctgcctgaacgcctccggcgacaccatcgcctccatgctggtcacccgcctggtggagggcaaggagtggctggccaaggccgcggccgccaaaaagagccgggtctgagctccattcacctctgtctgttccatccattgattcattgataaaaggagaatctgctatgaccattatcaacaccgagcacgcccccggcgccatcgggccctactcccaggcctacgagaccaacggtctcgtcatcacctccggccagcttccggtgaaccccgccgacggcgccatgcccgagggcatcgccgcccaggccgagtggagctgtaagaacgtgggcgccattctggaggccgccggctccggctttgacaaggtggtcaagaccacctgcttcctggccgacatcgccgactttgccgccttcaacgaggtgtacgccaggtacttcacctccaagcccgcccgctcctgcgtggcagtgaaggctctgcccaagggcgccctgtgcgagattgaagccattgccgtaaagtaaggaggagacaagatgaaagtgaccgtgatcggcagccacctgtgcccggataccctgtacgccctcaacaagctggttgaggccaaggcggatatcaccttccagaacctgtccgccagcctgcccgacctgaaggcctatctggccctgcgggagagcagccccgtcttcgaaggccccaaggccaggggctccctgggcatcccctgctttgtgcgggaggacggcaccgtcaccctggagctggagcaggtgctcagctgagcggatgagagcagctgccaataaaccctccccacaaaagaatttgaagggaaagatcgtgtgaaagaaaaccgtccgggttgtctttcacgccggatcaaacgacttttcgaaccgttcaaaaggctccaaaagtccggcagcctgtcgaaaacacattttcaacaggctggaagggagcggcccccggtggggccgctcccttgtgcgtttttacaggtcgttgcggcacagatcctccagggactcccggcggactgccacataggactcgttgccgccccggagcatgacaatgggaggcctgggaaggcggttgtaattggaggccatggagtagttgtaggcgccggtggtgcataccgccagaatgtctccccggcccacgctcccgggcagcaggacgtgctcctggatgatgtcgccgctctcgcagcagcggcccaccaccgagcagggaaattcggcgggctggtccagcttgttggccagcaggcaggtgtagctggccccgtagagggcgaagcggggattgtcgggcatgccgccgtccaccgagacgtagtttttatagccggggatctccttgaccgtgcccacggtgtagagggtcagtcccgcgtctcccacgatgctgcgtccgggctccatgtgaatctcgggcagggcgatgcccaggcgggcgcaggcgcccttggccgcggcggccacctgggccaccttggcgtccacgtccagaacggggtcgcactcgacgtagcgcacgccgtagccgccgcccaggtcaagctgccgggtctggtagccatgggctttctccatgtgggcggcgaactccagcatgatcactgcggcccgttcaaatacgtcctcggcaaagacctgggagcccacgtggcagtggaagcccaccagctccacatggggctggcggagggtgaagagggtgatctcctcggcctggccggtctcgatggcgctgccgaatttggagtccaccttgccggtggcgatggcctcataggtgtgggggtcgatgccgggggtcaggcggagcagcacccgctgcttaatgccccgccgggcggcctccgcctcaatggccttgatctcctccacgttatccgccacaaaatagccgataccgtgatccatactgtagcggatgtcctcatcggtcttgttgttgctgtggaagtaggcctggcccaagtcgtagcccgcccggagggcggtgtaaatttcgccggaggacaccacgtcaatgcccatgccctcctcccgcatgatctcatagatgcgctggaaggagttggccttgctggcgtacaggggccgggcgccggggccgaagtgcctgcggaacgcctcggtatacacccggcagttggcgcggatccggtcctcgtccatcaggtagaggggggtgccgtactgccgggccagctccacggtgtcctgaccggcaaagagcaggcgcccgttagagacggtaaggttgtcgcagatcatgtctcatttcctttctgtttctctggaagatatcccgccccgcagggggccccggggggatgctatttggcgtgtctggccgcaatggccctgtccagccagtccttgccgtcggtgacgcgggcgacgatgtagcacaccacatagtctccggcggagttgatcattgtggccgggggatctaccaggttgccgatggccaccaggatggggaaggcaacctcaatctgctgggggaagaagatggagcagatgatgtactcaccgatgtagcctccgccgggcacgccggacatgcccaccgaggagagcaccgccacagccaccaccgccgggagcatggtccagggcatatccacgcccatggcccccaggacaaaggcgattttcagcacgcaggagaagcaggagccgtccatatgcatggtggcgcccatgggcacgaccatatcggccacatccttggggatgccggtgtcctccgcctcacgcaggttggtggggatggtggcggaggaggagcaggtgcccagcgacatgatggcgggccttgcgatgtgctggaacatagtcttgatgccgtgcctgccgccgccgatataggcgaagaggggaaaggcggtgaagatgtagataaagcacaggggatagtacaccaccatggcccggccataggcggaggccacgctggagccgtaggtggctaccagatccgcaaacagggcgaagaaggcgatgggggcgtaataggtgatgatcttcacaaaggccatcattacttcggtcaggccgtcgaggaacttgccgatgacgtggtcggggccgcccaccagattggtggcaaagccgaacaggatggagaagacgatcagcggcagcatggcgctgcggctcagcaggcccacaaagtcgtcggtggtgaagaagttcacgatcatgtcggcgagggaggcgtgctcgccgatggcctcggtggccatgtcggtccagggctccagcaccgggggaaccagcttcatgacaatgaacatgatgacggcggcaacggcgccggtgaccacgaaggtgagcacggtggtgcccatgatcttgcctgcccgtttccggctgcgtacgctggccacggagttggagatggaggcgaacaccagcggcaccaccacgcagaacatcatattgatgaacacggtgccggcgggcttgataaagtgaccaaattcaggaaagaaccagccggccacgcagccggctaccatggcaaacagcatcagggccaggaagcggtagttcttcataactgtggatttgtccataacaatacctctctttcttctaacacacagaactgccggtggggtatgcggcgtcacctcctctctcagtgtaccgcaccggcggccgctctatcactcaaaggggcagttcctcgtcggtgagctccccttttgcaaccatattggtgggcccggtcagaaagaggtgttccaccgtggagccgcggcgctccacatccaccaccagctcgccccccgtcatctggacggccaccgcccggccgctgaccgcgccctggagggtcagcacggcggccaccgagccggtgcccgtgccgcaggcgtaggtgaagccctccacgccccgctcaaaggtgcgctcccagatccgccccggtccctccacatcgaagaaattgacatttgcgcccttggggaaggcggggtgggcccgcagcttccgccccagggcgaacagctccgcctccggccggccgcgcagtcccggaatcggaaccactgcgtggggcaggccgggatctcccagctccacataggagcagggataggtcttgccgtccacctccacggggcagtccagccggagggtggtgggccggttgagttcgattttatactgccgccgggtgatgcgccggccggtgaccaggccagcggtggtctccaccctctggagctctccggccagcccgatctcatagccatagcggcagatgcaccgggccccgttgccgcacatctcgcccgcgctgccgtcggagttgtaaaacagcattcggtagtccccgccggactgcggccgctccaccaccatcagaccgtccgccccaatggacaggcggcgctcgcacagccgccgggccagggcgggaaagcaatccgccgacagcccctcctgtagattgttgaggataataaagtcgttgcctgcgccgttcattttccaaaactgcatcgaaggctccctcccgtcaaacgtgctccttgtctcattgcctatgcaagctgcatgccaggcggccaaggggggcgaagttcagcggttccaacaaaatatggccgtcaaattcagacagaatccgcaaaacatggggcgcaagatccagcatacccggaacctgggtgaaaaaaacgggaaagggagttcggattttcggactccctttcccaaaaacaggacgcgtttagtccagttggtattccttcagcttgccgtaaaacacggtcttggacaggcccagcagctccatggccttcacacggctgccgccgcactgggccagggtctgccggagaatctgcctttcctcccgcttgagccgttccttcagcgtgagcggggcgggcgctgtgccctccaggtggatgtgctcggcatagataagctccgactcggagagggccacggcgttctccagtacgttttccagctcccggatgttgcccggccagttgtaggccagcagcttgccaaaggcctcgccggacaggctcctgggcgggacgccgtacttctggggaatcttctccatcagccggtcgatgaggaagcacacgtcctcgggacaactgcgcaggggaggcagctccacagagaaggcgctgagccggtagtagagatcctggcggaagcgcccggcggccacctccgccctcagatcccggttggtggccgccaggatgcgcacatccaccggcacggaccgggtggagcccacccggcagaccaccttgttctggattacactgagcagcttggcctggatctggagggggatctcgccaatctcgtccaggaagatggtgccgccgtcggccgcctcaaaaaagcccgccttgccctgggggttcgcccctgtgaaggcgccccccacatagccgaacatctcgctttcaaacagggtgggggagatggtggcgcagtccaccgtgacgaaggggccgcggcggggctgggcctgacggatggcctgggcgaggaaggactttccggtgccgttctcgccggtgatcaggatgccgcagtccagctgggacagcttgtagacccggtgccggacggaggccggcagggtgtcgaagccgaagcgctccgcaaaggacgcctcctggggcgcgtccttgcgggcggtctcccggtaggtccgctcggccatcttgatggcattgttgcgctccaggatggtcacatggatatcctcaatgttccggaacttgacgatcactccgtccgggcgtccgccctccgccccgggcacggggagaagggtggccaccagctcaaagccgttgatctcgtactcccggtcctcaagcctcggcgcctgtccgttgagcacccgggcgagatcccgctcaaactgcgccccctcaaagaagtcgcggaagtgatagccctccacctggagggacagcccggcccgtttttcgctgtaggagccgccccggagcaggtggccgatgccctccctgcgggcggagtagcccttctcctgccagaacttcacccggccagtcgccccgtccagaaccaccatctgtccaatgcagcggaaatacccgatggtgtagacggtgtcccttaccgtaacggtgacgctgcggcgctcgatggagaggcggatcgggatcccctcacagacggtctccagacagaggctgtccgcgtcctggtctggcaggaacttgtagacgggccgccggctgggcatgtcgaagacgcctgccgccaccagccggtcgttgacgcggagcctgggctcccggatgccgatacgggcgagatcctccggccgcagcgccccgtcgtccgcgccgatggctgtgtcggcgatcagcaccaggtcgcccggctccaaccgcccggcggggtgggggtgctggctgttgtggtagaggccgaacctcaccttggcctgctggttgatatgggtgatgatgccatcccgatccagggtgaaaatggcatgggatgaggaatccatgagacattgcagaagatccatagcggtgctcctctccgggcgggccgggaaatcacctctattgtacgggagaaaggagccggtgtaaataccggatttggagggggttcgccgcctgtacgcagaaacgcacctgacttcggagggaaatcaggtgcgcattccccgtggggctcagcagcgggcggagaggacgcgcaggatgtcctctgccgggggcgggcagcccgggacgcgctctttggcgtagttgcagcaggcgccgattccaaggccgtcgaagggaatcccccgccagccctggccgatggctatgggtaggccttgtacgccgctggtgtggagggcgcgcaccaggcttgcgtagcaggccgagcaggcgcttctggcctggacggtgcgggtgagggcggccacggcgccggagggggcggggtagtccgccgccgcggagggctcgttgaggcgcaccacatctccctcctccagccgggtggagccggccccccaggcctcggccatctggatatagggcgcctgctccagggccaggcccataaggcggcagccgtaggcgtccagctgcacggggtcctcacccagcagcatccggcccgtggggacggggttgcccccctcctcaaaatccagatccccgcagaggctgtccacgatggtcagctccggccgcagggcggcggccagggcggcgatggggcgcatcagcccctcggagtggaagcgccgcttctcccggtcgggcaggcagcccttgcagttttttagggcgcaggtcatggcggtctggcagtggcccttgagcacgggcaggttgatgaggtagtccgcgtccagggcgcggcagcagatgtccatgggccgcaggggggtgtccacccggcgggtcttgtcccgcttgaggtcgaagaggggcacgccgtacttcttccccaccgcctcgtatcccgccgcccggaaggcccggccggtgtcgtcccccacccaggagccctcgatgatggagatatcccggaagccatggtcacgcagatactcgatggcgccggacaggacgccggcgtgggtggtggcgccggtttcgggggaggcggccaccaccaggttgggcttgagggccaccgaggccccggaggggattttgcacgctgcgccggcggactccatcagggcgcgggtcatggcgtgggcattggtgccaaagatctcatagatgcggctcattgcggcaactccttttcttgcgcggcgcactcgggacggaaataggcggcggccagggcgatgaaatactgggcggatttggacaggtagcgattgcgccggtagcaggcagacacggtccaggcgggatgggcagacaggcggaagcaggccacgtcctccaccccctggacgtagtaggcggggacgatggagcagctcagccccttctgtaccatggagacattggcccggttgctggcggtctccagaaagaggttgggctttcgccccgcccgctcaaacaggggggcgatgacctcccgctgggtggaggagcggtagatgaggcagaaggtcaggtcccagaggcactccgtgtccagcaccgtcaggggcgcgcccggcggcgcggccctggccgccagcggatggctgcggggcgtgatgagcaggaactcctcccgcaggagggggacgcaggtcagccccggaacctccccctccggcctggagatgaagcccagatccagctcgtccccggccagcatctccaactgccgccggacgctgatctcccgcggggtcactgtcacctcgggatagctctgatagaaccgtgggtacacggccatgaacatctccatgccccgctccggggcgaaggcaagggagagggtgccccgcctccggtcggcgatgtcgtggatgatgcggtaggcctcgttttttagctccagcatccggcgggcgtagtccacgtagaccctgccggcctcagtgagggcaaagctgctgcgggagcggaaaaagaggcgggtgcccagctcatgctccagcttcagaagctgctggtccagggcggactgggtgatgaacagcttggccgcggccttgctgatgccgccctcctgggcgatggtgagaatataggtcatctgtttgacgtccatggccgatcactccttgccggtaaaagggcgcgcccccggctccgcgtgggaaggtcgggggcgcagcgggggaaaggaaccactcagcggcggatgagaagcaccgccacgtcgttgacattggtgcccgtcgcccccgtgtggagcaggccgccgcaggcggccagggcgtggtaggcgtcgttgttcttcaaaacctcaaagatgcgcacgccctgcctggccagccgctcctttgtcccgccgtccacgaagccgccggcggcgtcggtggggccgtcggtgccgtcgctgcccagagagaacaccgccgtgtcctccagtccggcgatgccggcggcggcggagagggccagctcctggttgcgcccgcccaggccggagccggtcaggtgcaccacggtctcccccccggccaggaaggccagggagcgctccgtatcctggtgggcgcgggctacggcggccaggaaggcccccgcctcccgggcctcgcagtccaggctgtcggtgagcagcaccggctcatagcccagttcccggcaggccgcggatgcggcggcgcacagctcccgcacgctgccggtgataagagtctccacattgtccagaaccttgggcgtctcccgctccaggcactgggaggcctcgggcgacaggcgcaggccgtactgctccgcgatgcggcgggcatcggcacaggtggaggagtcggggtaggccgggccggaggcgatcatgtccagcggatcgccgatgatgtccgacaggacgatggagaatacctttgccggggcgcagtgctgggcaaaccgcccgcccttgacggcggagagccgcttgcggatggtgttcatctccacgatgtccgccccgctggccagaaggctctgggtgatggactggagctcctcctgggggaccagcggcgcctcgaagagggcggagccgccgccggagaggagaaagaggacggtgtcctccgccgtcaggccgtccgtgagggccagcgcctcctccgtggcggaaaaggtgtcctggtcggggacgggatgccccgcctcccggatgagcagggagccgatggggccctgggcatggccgtgcttggtgatgatgatgccgccgtccagccgcccccccacgcagtcgcaggcggcgcgggccatagaccaggcggccttgcccacggccaccagcaccacccggccgccctgaaaggggttcccctccagggcgcggcgaaccgccgcgtcgggctggacagcggcgatggcccggcggacaatctgatcacagtcgtttctcagtttcatgcgttcctccatggtcgcctcgcggagaggcttaaatcaggccggcctcagacatggtgcggcggaagccctccttggcggggccctccggggtggggaggctgggccggtagggcgcgcccacatcccggccgcggagcgcggccatgtccttggccgccacggggaaactggcgggatccatggccagacggacggggttgagcttgaactgggcctccaggctgccctggagatccccggcggcaaacttgttatagacgtcggtgatcagctcgggcatgaagttggccgcggtgcacacgccgcccaccgcgccgtggcacaggctggcgtacagcagggtgtccttgccgccaaagaccttgaagcccacgtcgcgggtacggcggatgaattcactggtcagagtgatatcgccgctggtgtccttcatgcccacaatgttctccacctggtgggccagggcgtccaccagatcggcggtgagggtgtagcccacccggccggggttgttgtagagcagcatgggggtgccggggacgctttcggcaatggccttgaagtgctggaacagctcgtcataggtgggcttgaggaacatgggctggagcacgctgacgccggcggcgccgttggccacggccattttggccagacggcagcacttctgggtgcggatggcaccaatgccaaagtagacggggacgcggccagcggcctgatccaccataatcttcaggccccgctccatctcgtcctcttctaccatatagaactcgccgttgctgccaaaggccagaataccggacacgccgcccttgatgacgtagtccacctggtcgcggagcctggcctcgtcaatgcgctcctccccgtcgatgggggtgagtatgggcaccacaacgcccttgataaaatccgtattcatgatcgatcacctcgcactcgtgtcgggcggccttacagggactcgatgccggtgagcttcttgtagtacttgataatggagctgtgatcgtcctggccgcagccgttgttgtgcagccactggaagatctcctgcaccgcggcggtcatgggcaggggggagcccacggtgtgggcgcagtccagggcgttgttcagatccttgatgtgcaggtcaatcttgaagccgggcttgtcgttgccctcgatcatcatgggggccttggcgttcatgacggtagagccggccagaccgccgcggatggcctggaacaccagctcggggtccacgcccgccatcttggccagggtcagggcctcggacagggcctggatgttgcaggccacgataatctggttggccagcttggtggtgttgcccgcgcccacgtcgccgcagcgcaccacagaggcgcccatggcgcccaggatgtccttgtactggtcaaagacctccttcttgccgcccaccatgaaggacagggtgccgtcgatggccttgggctcgccgccggagacgggggcgtccagcatctcgatgccgcgcttggccagctccgccgcgatctccttggaggccacggggttgatggagctcatgtcgatgaacacgctgcccggcttcatgtgggcggccacgccgtcctcgcccagcatgacggccttcacctgggggctgttgggcaccatggtcagcaccacgtcgcaggtctcgccgatctccgcgttggtggcggccttggctccggcggctacgatctcgtccacgctggcctggttcagatcgctgaccgtgaggtcatagcccgccttgagcaggttcttcgccatgggcttgcccataataccaagaccgatcagtccgattttcataatacatttcctccttaaaataatagcacagattggggtggataggaactataaaagcgggactcacgcgttggcgcgggccacgtttttggtgacaatcacatcggcgcccaggccgcacacgtcggccagggccacctgcccgacggcggtgggggcctggagacggacggtgttgatgacctccatcacccgaaagatctccttcttggggatggggcggctgagccgcacgctggccaagggcagttcgccgccctccaccagtacgctggtggcgatgttgcgctgggggtcggtcagctcctggcggacataggtgtctcccttggggcaggtggctccccggacggcgtacaccgtgtccccctcatattcggccgtgatctcacagccgttggggcagataatacaggtaaagctccgcgtcactgtacgctcacctccaaatcaccggactgctccagtgccgcggcgcggatgggaagctgaagcatctcggcagggagtgccttgggcagcctgcgccgcagcacctcgcggccgtcctgcgtcacggtcagagtgacggccttcatgggccgggacacccgcagggagagggtgaaatcccggctgccgctgatgcgctgggggatgacgtggcccacgttggcgcccgccctgacctccaggggacaggggggaagcgcgtggtttttcaggtactccgccgccgacgaggccagggcctccgcctccagggagacgaagtccaccagatcgtggacatggagcacgttgcccgcggcaaagacgccgggaatgctggtctggtagtgctcgtccacgaaggcacccttggtgcgcccgtccaccgccaggccggaaccgttggcgatgtccccggcggggataaggcccaccgagagaatcagcgtgtcgcactccacccgctcctccgtgccggggatggggcggaggcgttcgtcgacctgggaaaccgtaacggcctccagacgcgcccggccgtgaatatcggtgacggtatggctcaggtacagggggatgccatagtcattgaggcactgctcgatgttgcggggcaggccgcttggatagggctgcacctcatagacggccttcacatgggccccctccagagtcatgcggcgggccatgatcatgccgatgtcgccgctgcccagaatgaccacctcccggcccaccatgaggttgcgcaggttgatgtactcctgggccacgccggcggtgtagatgcccgccgggcggctgcctggaatggccagggcgccccgggtacgctcccggcagcccatggtgagaatcactgcgtcgccccggagctgtttgagcccggcggggccggaggcggtgacggtgcggtcggcctccagggagagaacggtggtgtcggtcaggcaggtgatgcccagctcctccgcctgggccacaaaccgctgggcgtactcggggccggagagggtctcgccgaagcgggtgaggccgaagccgtcgtggatgcactgacggaggatgccgccggggcggtgttcccgctccagcaccaccacgtcgtcgatacccttctgcctgagccggatggcggcggccaggccggcgggcccgccgccgatgattaccgcctgatggcgttccacgttcataccggctcccctcctttcactgccccggtgaacatccaggagccctccggccccaggtggatgtccccgaagtcctcccccagctcccggtggagggcctcggtgatgcgggtctcgcagtagcccccctggcagcggcccatggtggcacgggtgcgcaccttgataccgttgacggtgtggacgcccagggggttgtggatggcctggagaatttcggccttggtgaccttctcgcagcggcagaagatctcgccgtagtccgggttctccgcgatggcggcggcccgctcctcgtcggtcatatcggcaaaacggcggatgccgtgccggatgggattaaagtcgggattgggctccagcgcctcctgccgggcgatgagggccacggcccggcgggccagcgggagggcggaggtgacgccgggggactcgatgcccaccaggttgaccacgccgggcgcctcgtcccggcactccagtacgaagtcctgcaccgcgccggtggcggggtcgatgcgcttgggccggatgccggcaaaatttcggatgaagtaggcgcggtccatgtgcttgaacatccgcgaaccgctctcaatgaggccgtccatggcggcctgggtggactcgtagtcctggaaatcccgggccaattggctgtcgggccccaccagtacatttccgtccacggtgggcgtggcatgggtgtcaaacgtattgtccggattgggggcgggatagacgggaatcctggcaaactggcccgccagcttgtcaagaacgaagtattcgcctttgaccggcttaatgacatagccgggaatgcccagctgcccgctgaccacggcggagttgagccccgcgctgttcaccacccagcgggtgtggaagtcgcccctggtggtgtggagcaggtgggtgccgtcggcctgccgggtctcgccggtgaaagcgcagttgaggtggtactccgccccgttgtgaaccgcgttctccgccagggcaatggtgtagaggaaggggtccaggataccgctggccgggcaccacatggcgaaatttccgccggcgctggggtcaagctcatccatccgcttgcggtcgatgagctccaggcccttcacgccgttggcctcgccccgggccatgaattgctccagccgctgccggtgctcatcggtgaagcccacgatgagcttgccggtgcgcttaaaggggacatccagctcgcgggctacctggtcgaactcctggttgccctccacggcgcagatggccttgagggagccggtcttatagaggaacccggcgtggagcatgccggtgttgcgcccactggtctgggtgcagacgtcgctctccttctccagcacggcgatgcgcagcttgtaccgggagagctcccgggcgatggcgctgcccaccaccccgccgccgatgatgacgacatcataggactgctgcatagggatggctcctttctccatcaaaggaacagggtcaaaatggggacggtgaccaggctggtcagcgtcgagataaacacacacttggaggcgaactgggcgtccgccccgtatttctgcgccaggatggcggtagtggagccgatgggcatgccggtgagcaccacgcttaccccggcggtgaggggatctacccccagcagccgcagggccacgaggcacacggcgggcagcaggagctggcgcactgccaccagatagaagcacttggggtcgaacacggtcttgaggggcacgtcggccaggatggcccccaccagggccatggccatgggagaggtgcaggcgcccagattgtccaccgcggtatccacaaagtggggcagggggagctggaagagcatccataccagccccacctccacggcgatgatgccggggttgagcagcacctttcggacggcctgcttggcgtcggccttggtaaacagggagatgccggcgctccacatgaggatgcgggtggggatgatgaacagggagcccagaaagaggccctcgtcgccgtaggcgccgctgaccacgggcaggccggcaaagccggagttggtgaccagggtgccgtactggaggatgctcttctcctggtatgggaagcggttgtagagcaccttgcccagcagcagggccgccgcggccatggcggtggcgatgaggacggccacgcccccctgcttgagggactccaggctgaactccatgtggaaggactcaaagatcatgcagggcagggtgatgagcaccacaaagtcggtcagcttatcccgggccgcgtcgttgaaaatgcccttcttgcggcagaagaagcccaccgccatgtagatgaagaggacggtctgcacgtccaccatcttgaaaaagctgtccatactacccctcgatgggggtgagaagggccccgtccccgtcaaattccagcggctcgggctcagagcaggccgccacgccgggccatttacccgccttcacgtccctgtaataggcctcgctgagcatgatgcggccgatgtggaggctgtttgggatgcggatgatccgggcgcggctgcggtcgatgccggtgcaggtgcggatacacatctgaatggcctccctgtcgttggccaccacgcaggggatgcgggcggaggtgaggacggtggaggtgagacagttggggtacatcttttccgtgtcgattttgtcaaagaaccgctttgtgatcacgttggccaggcccacgcccagggcgttgccgtggctggccgcgctcagatcgagaaagcaggtgcgctgcacctccaccccgccgtgggcgtactcggtggaaaaggtgccggtgatgttggggtccacgccggtgcccgagtagttcttgcccgtctcgtccaccaccagcacgtcgcaggcgcccaccagcagggagggcatccgctcaaaggcaaactggagcagctccggctcccgggcgagaatgtcgtccctgtcgatggcctcgatgcggcaggtctcgtcataggcgttctcgatacagggcagggcaaagaggatgggggccctggccagaatgaccttggcgatggaggggatgttggccccgatcttgcccatgccgtcggagtggacccgctcggcccccttctgcttgcccaggcccacggcgagcatcttgcagggcccgctctcgtaagggccgcggaaggcgttgtggggcttgaggcggcaggagacgatgataccgtcggcctcataggcgtttttgtccaggtacaccggcaggccggtgtcggaggtgcccagctccaccacctccatgctgctgcggatctcacagcccatggcctccggggtgatgccgtagctggccagcacctccaactgcccctcggcagtggcgccgccgtggctgcccatggcgggcacaatgaaggggacggcgcccctggcctttacaaagtccacgatggaccgggtgatgaggtccacgttggcgatgccccggctgcccgccgtgatggcgatggacatgccgggccagattttggagcggaagggctcccgggacagctcccccgccacggcggcggggatgtctgcgggggcgatgcgctcccgggggaagagctgctcggcgcggaacatgcggggaatgggcacgtcggccagcagacgggagacgacgcccccctgtttgatttccataccaaaccgacctttctcttgtcaggtaataggcgcgggattgaagatgcacaggtcgttgtggaagccgtactggtcggagtagggcttcttcacgccgctggccacgtccagaatcaggtggaacagctcggcgcccacgtcggcgatggtcttctcgccggtggcgatggggccggcgttgacgtcgatgaggtcaaaccagtgctccttcatctcgttgcgggagcagaccttgatgaccggggcggcggccagcccgtagggggtgccccggccggtcataaagacctgaagcccgatgccgctggccaactggcaggggccgcagacgatgtcgctggcgggagtggcggcgtagatgaggccgcgcttgtggggcttctccgccggagagagcacctcctcgatgggggcggtgcccgacttggcgatggagcccatggccttctctacgatgttggccaggccgcccttcttgttgccgggggtggggttggcgtcccggtccacgccgccggcgtccagatagtcgtcgtaccacttcatctcggcggccagcttgtcccgggcggccgcgtcgcggcagcgggcggccagcagatgcactccgtcccgcacctcggtgacctcgctgaacaggacggtggcgccgcccttcaccagcatgtcggcggcgtagccggcgctggggttggcggtgaggccggagaaggcgtcggagccgccgcactgcatgccgatgagcagctcgctgaggggcagctcctcccggcggcgctcgttgagccgtttcagcttccgctcggccatctccatcagggcctgcatcatggcgtcgtggccccggtagtcctggagggtgagggtgttctccggggtgatgtcctccggggggagcaccatgtcgtaggtgagcttttcacagcccaggcccaccaccatcaattcgccgccgaagttggggtggcggatgaggttggtgaccgcccggatggggatgtgggcctcccgggccttaatggccacgccgcagccgtaggggtggttcactgccaccacgccgtccacattggggtacttgggcagcagctcccgcttgatgcgctccaccgccacgttgaccacaccggcggcgcactggacggtggtgacaatgcccagcaggttgcgggtgcctgcggggccggttttgttgcggtagcccatccaggttctgcggggcggatcgggcagctcttccattgggacgatgctggtcccgtagggcatgtcgtccaggccgggggactgaggcaggtccagcatgtgctcgttgatccaggcccccacggggatgggagccttggcgtagcccagcaccacgccgtagcggaccacctcgccccccttggggatgtcagtcagggcgatcttgtgggcctgggggatgtcctcccgggtgacgacgccgggcatgatctcggtgccgcgggggatgtcgtggaccgcgatggccacgttatccgcatccttgaccttgatgtaaagtggtgcactcatagacgaatactcccttttggccgatgtcattccaccggacgcggggcgcgccggacggaatgacatcgaggcgttatgatgattactgcttgccggagagctccttctcctggcgcttggctttgcggttgtccagaacggcgtagaccacggacaggatgatcagcgcccagataacccagctcatggggcgcacgaacaggccggtcagggagccgttataagcggtgagcacctgaatgaaatagtcctccaggtcgccgcccagaatgaagccgatgaggaagcaggacacggggaagtggaacttcttgatcagaaggcccacaatgccgaagagcagcaggcaccacacgtcgaacatgcggccgttgagggtggcgtaggcgcccacggtgcacatcatgagcaccacggggtacaggcgctcctggggaatgaggacgatcttcgccagcagcttcaccgggaagaacatgaccaggtacatcaggatattgcagcacagcagggccaccagaatggtgttccagatcaccggattgttggtgatgaacagggggcccacctgaatgccctggagcatgaaggcgccgatcaggacggcggtggtggagtcgccgggaatacccaggctcagcaggggcaccagggcgccgccggtcaggccgttgttggaagtctcagaggcgatcaggccctcgggcacgccggtgcccagcagctcggggtgcttggaccagctcttggcctgggagtaggcgatcagggaggccgcggagccgcccacaccgggcaggatgcccatgaaggtgcccagcagggcggagcggaacacattgatgatctgccccttgaagtcgtggagaaggctgaacttgacgttgttcttgacctccagcgtatcatccttgctgtaggaggcgtgcatacccgtctcacactgctggagcatctcggagacggcgaacaggccgatgagcacggggaagagctggaagccgctctgcatctggctctccaggaactcagggaccatgcggtactcattgttgacggagaactggttcatcatggccaccagcacgcccagcataccgatccacaggccgcggagcatctggccccgggacagggcggcgatgacggtgagggcgaagaggatgatgaggaacttctccacggcggagaacttgatggcccagccggccaggatgggagtgaagagggccagcaccaccagggagatcatgccgcccatgaaggaggaggtgacgccgattttcagggcgcgttctccctcgccccgcaaggccattgggtgtccgtcgaaggtcgtacacaccgacgacggggtgccgggaatgttgatgaggatggcggggaccaagccgccggagatgccgcccacatagaggcccagcagcagatagagggccatctccatggagtaggcgtaggtcagggggaggaacacggccacggccatggtggccgtcatgccggggatggcgccgaagatgatgccgatgacgacgccgaacagggccacggcgatgtactccgggccgatcacgaagggcagttcaaatcccatgaatcacaccagcctttctttagtagagaatgaagcccagggacggaatctcaatggtgaggagaccggagggcagggtgatggcgaacgcggtgccgaacacaacgctgataatcaggcaggccaccacggagatgatcaggctggtgatgtggtacctggggtttttcagctgcgccttgttggcaaacagggtgttgaacaggaacaggcagatgatggaccagaaggtgaagcccagcttgtccagcaggaagaagtagaccaccatcagggcgatcgtaccccagaatttgaacttgtcgtagtgttccacgaagaagcggccgggcttgacaaaaaagcccttgcccgccttgatccgggcccgcccctccagggcgatcagcaggacgcccagaatcaccagaattccaatggtgatgatggggaaaatccagtgctgggttgaatactccacattgatacgcatcttattacctctctttcgcagggtggtatcacggaatatcaccccgctgaagcgccaaccgccggctgggcttcaacggggtgacactccaacagatattaggtcagctcgtccaggccgggggccacgtcgatgatctcctggccgatgtcccgcttgtcgctgatgaactggcgggaggcctccagatccgcctcctcggcggtgacggcgctgtagagcaggccggccatctcagcctggaaatcggggttctcacagaccttctgcatggcggcggcgatctcattcagaatgccctcgtccatgtccttggggaagagcatgaagaagtccttgttgaagtcgaagggctcgccgttgaaggtgatgccgtcgtcggccatggagataacgccgctgccctccaggttgccgcaggtgtcaaagagcttcatggccaactgggcgtccacgccctccttggtgaactccacgcaggaggaatagtcggcgtagatgatgtcggtgttgccgtcccagaggcgctgcttcttttcgtcggtggtgccgcccaccagggccttgatgcggctggccacctcgtcgccgtactgctcctgaacccacatataccacaccacaaagtccaggtgggaggcggagccggactcaatgttcacccgcagctcctcgccggggttatcggccagccactgggcggcctcattcaggttgttgtagggtgcgtcggccttggccacaaagcagccgccggggttgacgccgatgcgggggccgacggtcaggttctccagggcgtagtcctcactgaccgcgccgaagagtacgctcaggaacgccatgtcgtggaacatcatgatggtggtgccgtcgcccttggccttggagatggtgtccagcgcctgggcgttgccgatggcgtccaccttgccgttgaagcccatctcctcgcccagatagcgagtgaccatgtcggcgatcatgtaggagtcgccgccggtggaggtggagccgatgaccacgcggacgcgcttgcccttcagtctgctctcgccggaggcggcgctgccggtcgcctcagtgccgggatcgccggtggagggggtgccggtttccgtgttagagggggtgccgccgcagccggccagcaggccgactgccatggaggcggaaaggagcagagccgtcaatttcctgaacttcattgttcaattccttcctttcgttcggttcattcactggggatgttccgtgcttgcttgcgggggatgggggcgcttcactaccgtggcactatgatagcaggccgcggcgcgggttttccattcgcaaaaggcaatgaaatgggagagcaaatttgtaaactctgtgtgggtttcagaaaaatgaatttaagatttcaaaaatacccgttctgcgtttcaaatatggaagatttgtttcgcttagaactgtaaatttatagaaattatcggttgatttttatagtttgtcagaaaaaaacaagtaaaatttgtgcaaaacagataagagtaggcgcggttcaccctccgcctgctgctccttgtgcggaacaaaaatctctgttacactgaacatgaatacaaagtttttgtaccgttctggtcaaaaggagtgtcacaccatgaaatcagaatctacggagctggtaagcggcctcatccgccaataccgccgcctgcgcctgctctacctgggttatctggcggcggccgtcctggcgttggtcttcttctttgtggacaagcgcgttaccctggcgctggtggcggccagcctggtctaccacctggtggtggtacggagggcggggaaggcctaccagcgggcctttgtccacgcctgcggccagtgtaccctggcccggcgccttcaggacgcccgccacaccgaagcgcccaccctggaggagggggagctgcgccgcgcccgcctggtcgccgccaacgacgccaagggctccgtcctggtgcgggagggcggctccggtacctaccacggccgccgtgtgcgcctgggtgacgccgggtttacccattccttctccatggaggggaaaacccaccacgagttcgtggtgggcacctgggtgacggtggagctggggaaggacaccgggctgaactggcggctcatccacgagcgggtgatgatgaagccgtcccgggacgccatgctgcgccgggagagcgggctgcggcgggtggtgggcttcggccccggctggatggaggacggcacctggtttgtcctccggccggagggcaaacccgacgtgcccggtgacgccttcctcgccgccctgcgccggctgtccgccgccaccgacaagcccctggccgtctgcgtccagggagaccgcctccatgtctttgtcaccaaccgtatcctgggccaaaaggtatccagccgcgtcccgccgagcgccgccgtggccgaggtggattttctccccgagctggacggaattctcaaggcctcggacgccctggtataaaacttcatgcgccaagagcgtaccacgaaaacgggcaaaggcttgtggcgcatgaagtttatgcgcatatgggccgtccaggcccatgcgctttgatttcatggccgtgccgatgaaagcggcacatggccaattttgctatacttttgcaaagcaaagagcagacagggtgcgccccccggtatcgccgggggacgcaccctgtctgctgttgggtcagccctcgaatcggtcgcggatgccatactgcttcatccgccgccagagggtggttttgctgatgccaagctcggcggcggccgcggcccggctgccgccgttgcgggagagcacctccgccagccgggcggcctcgggggagacggcggcggggagggcctgcccctgggcgcggaccaccgggaggggatagagctcctccagcagggagcgcacatagccgtcgtttaccgtgcgggcgggggcggtgagcaccatgcgctccagaaaggcgcggagctggatgtagttgcccggccaggggtagtccatgagcagccgccgggcctccctggtgagcaccacatagcggttgaacttcaccacgcagtcgtccaggcacatgtcgatggcctggttcagatcgtccgggcgggtgcgcaggggcggcaggctcagccgcaggggggtgagcagatagtagagctcgggctgaaagacgccggcctccagcttgggggccaggtccccggtcagggaaccgatgacccgcgccgccaccggggtgggggtgttctcgccctgcacatgcaccacgccctcgcggagcagacggcagagcacccgctgcccgccgggcgtgagctggtccaggttgtccagatagagcgttccggtgtccgccgccttgcccgcccgggacagggcggcttcctgctcaggggagtgggccgcgcagtcgaaggtcacgaaggggcccttggagcaggggctggcgttgtggatgctctgggcaaagagggacttgccgctgcccacctcgccgtagaccaggatgggctgcccggtttcggcaaaggtgcgggccagctttaccaggcgggacatctcccggctggtgtggttcacgtcttcaaaccggccgtgagccagatagcgctgaagccggtagcgctcccgcagagcccgctctccctggcgctccatcttctgcatctcatagaaggaaaataccatgccctccccggcgtcccagtccgccacgggggcggcattggccaccacgtgcacccccgccacgttgagcacggagaagtagagctcccgccgctgggccagcgcgtcggcccagaactcggcgtcctcccggggcatcagcgtggaaagagggagtcccaccagcttctcccgctcctgctccaggatcttacaggccacgtcgttgctctggacgatgattccccgggcgtccagctccagaatcccgttgaaggagtagtccagcagaacttgcaggtgggccgtgttgcggcgctcggcgtcggcgacctgccccacgttgcgggcgtggagcaggctggtgcgcagggagtcctccgtcccgtcgaaaaagagggtgcgcttgcccagccggcggcagtaggcattgacaaagtcgccgcccagaatgacatccatcccgtcggccaccgcctgctccgccccgcgctccatctccgacaggccggagataaaataggtatgcagctctatgtcgaaaatctcctcaaagccctgaatattccccaccatgttggggatggtcaccacgccgatcttcggccgctccagatgggagaccaggctgcgggcccggtggagcagccgggcgatctccaggccggtgagctggatctccaccaccgggaagtcggtgtgctccttgagaatggacgcctggcggcctcgggccaccaggatgtcggcgcctgcgcgccgacaatcctccatgaggtctagaatccgctcggtggggacggactggttgagcaccacatccatctccagctcccgggcgatccgcccggcgggctccaccatctcctcacgggggagcaggagcgcaaatctcgccatgtcgattcctccttctgcttcgttctcatcttaccccaaggaaaggccggttgtaaagattgtaaagcgggagatggcgcggctgaaaaatctcatgccagagggttcagagagaaggagcgtgtgaagggagctgccagggttccctttggcatgaaatcaaacggcgcggccgggacggattttctctgtcccggccgcgccgtgtctctgaaacgatatgtggaatcgcagggaaaccggaaatcagcggaccaggcaggggcgcttgggatcgaaggtccagccggggatcaggtactgcatgccaacggcgtcgtcccggccgcccagacagttgtccaggtagagctggtgggccttctggagctgctcccggtccagctccacgcccaggccgggccgctccggcagattgatgcagccgtccacgatctgcagcggtgccctggtcaggcgctccagcccctcctgccagatccagtgggtgtcgatgccgttgagcttgccgggcaccgccgcggcgcactgggtcatcatggccagggagatatcgaagtggttgttggagtggcagccccacatcaggccgaaatcattgcacatctggcccacccggacggagcccgccatggtccagaagtgagggtcggccagggggatatccacactgcgcagggcgatgcagtggcgcatctcccgccagtcggtgtcaatcatgttggtggcggtgggcatgccgctctcctggcggaactccgccataatttcgcggccggagaagcggccttcggcgccgcaggggtcctcacagtaggccagaaccttcttcagctcaggggcaagggccagcgcgtccttcagcagccagccgccgttggggtccagggtgatgcgggccttggggaaggcctccttcagagcctggacggccttcagctcctccctgccctccagcacgccgcccttgagcttgaagtcctcgaaaccgtacttctcataggtggccctggccagcgccacgatggcgtcgggggtcagcgcctcctcatggcgcaggcggtaccagtcgcagtcggagtcgggctcggagtggtagggcagatcggtctttttgcggtcgcccacgtagaacagatagctcagaaagcggaccctgtccctctggatgccgtcgcccagcagggcggccatgggtacctccagatactggcccagcaggtccagcaggggagtctccaccgcggtgaccacgtgcacgccggtgcgcaggtcaaaggtctgctggccccgcacgtcgtccttaatattggccgtgagccactcgttgagcctccgcagggtcatcttgtagtcggccacgctggtgccctccaccaggtgcttcacgttctccagggcgcgggtgattttctggccgccggggacctcgccaatgccggtattgccccggtcgtcagtgagcaccacaatgttgcgggtgaagtagggggcgtgggcgccggagaggttgagctccatacagtccttgccggccacaggatagacctccatggcggccactttgggggtattggccattacaatgcactcctttgttccaattcaggtgagttggcggatacgcctcggtagtgagcggcccggccctcccttcaggacagaatacattcctgacactgtggctgcattttatcacggccctcccaagaaggcaaacggattaaactgatcgctcaattaggaaaactaatttattttgatattttgccatagtgtttctaatcctgctgtccctgcggcatcaaaccccaccacaggcgcgcttatccgctttttctgttaaagtgattaaaaaaacaaatttgagtgccggatagtttggtggtaagatccaaatatgctgctggtgtttccgctgttttagcttcacgaccgaacgccatccacaagaaaaaaggaggaatctctgtatgaagcaccgcattcaaatgagagccgccgcctcggcgctggccgcatgcatatgcctgtcggctctgcccggcgcgctggccgcagaacccggacgggtcaaggcccccggcaggacggagatggagcacgggccagtgagcaccgagtttgccagtactcgccttgcttttgcggtctccgacccggtcaggaacaacgacggtaccattacgctggacgtggcctacgccgacagcgagggcgtccggcgcgagagggtcacccccaccggcatgaccgagaccgacgtggcgctcattacggtggcggacaatccggtggctgccggctccaccattgaactgtgctacaacgaacagggtgagctgatcaacatcaaaaatatctactcggcgtacatgtccgacctgggcaccgtctatttcgataccatgaagtacggcgccgagctctccccggtgaacggcgaacccggcgccatgctggccaccggctggctcaccgccaagtcgggcaatcagatcaccgtgggcgacctggatctctttgacgagacctacaccctggccccggacgtgaaggtctacgagttcaacaccgacaccagcaccctcacggctaggcggctcagcgacgtacccgtcactcagaaaaccgacggcgaattctacaagaccgccaaccgtcagcaggttatggtggtctttgaccagaactaccgcaacgctgaccaggccgaggtggtggaactgtactacatcaccccccagcccaccattgacgagaagtacctgtaccccgctgaccacatgcccatcgacagctttatgaccgagaacgacggcaaaactgtggccaagcccacggcggccgcatggctcaccgccacggagtccttcgccatcatccctgaccggctgtactacgtgggcgacaacgaggtggccatctatctgacccaggccgacgacggtaccctcatcctcctggacgcgggctggcccgccagtgggtaccagtactggcggaacatagaggccatgggcttcgaccccagagacattgactatatcctcctgactcacggccacggcgatcagtacggcaccggcgccgagctggacaccatgatcaaaaacgccggcggagaccccgtggtctacgagtgctacgaggacacctacggttacgatatctacggcttccctgagatcaccggtatcattaaggataccccggtactcaacgccgtggacaagttctacatcaatgatacgtggatggagtttgacggcagcgtgcgcatcaaacccgttcttaccgccggccacaccaacggtactgactcatttatcttcgagctgaccgaccctgccaccaacgagacgctcactatctcctacctgggcggctacggggttaacggcaataccaagtacgatcccgacaacgaccccaccggccggggctacctgcgcctggccttccagtacggcctgcgctacctgcagcagaccgtggagccggactacatgctgccccagcacaccaaccagtaccccatgctggagatcaacaaggccgccgaggagaagggcattcccttcctggaggccgtgaacagcggcagctatgagtgggtaaacttcctggaaaagcgccaggcggttatcacctacgaggattactaccagaactggaaggcagatcccaaggacgagttcggcacggaaatcaccgttaccgacgcggagctccagaccattgaggccgcaggtccctaccgccgcgagggaggcacctaccagatcaccctcaccgatggcggtaggatcatccagggctttaaccgctatatgaaccagaccgacaagctctccggcgtggaaaacgcccagggccaggacgtgggcgacggcatcttcatcctgaaggattcctttacccacgatcccgacgcctggtatgtccaggtgggcgcccgcgtcagcgacggctatgatggaagctgcgccggaggccccattgagagtgtccacgacaactggtttgagatcctccgtaccgagcgcctggacagccgggaagaggccgaggccctgctggcccagctccagtccggagccacctacaccgtgaccctggaccagtccagtgagattcagctggccgacaatctgaccgacaccttccggcccgccgccggcggaaccttcaccgacgtgccggccacccattgggcggccggggccgtggagttcgtctccagccaggggctgctgcagggcaccggcgcttccgccttcgcccccgggcagcccatgacccgcgccatgctggtcaccgccctgtggcgggaggcgggctcccccgtggtgaactatgccatggactttgacgacgtggacgaggaccagtggtacaccgaggcggtgcgctgggcggcctccgagggcatcgtcaccggcaccggcaagggcttctctcctgacgccgccctcacccgcgaatctctggccgccattctcttccgctacgccggcggacaggcggacgcggaccagctggacagctatgccgacggagccggcgtcagcgcctgggccagagaggccatgaactgggcggtggcacagggcctgatcaccggtaaatcgggcggccggctggaccccggcggcacggccagccgcgctgaggtatccgccatcctcatgcgctacgtgcagagcgcccaggcctaacgcctttttcggggattctccccagctgcgtgccggggtgaattcctgacgtgggaggatgttcaggccattgacttagcctttctgccgagcggttcaattttatgaagctgcgggacgcggcgagggatggtcctatgatgtgtaagtatccgccgctgcgtcttgcgcggtgaaaaacgcctctgagggaggagaaggttcatggaatccatcattttaaatctgcttaacctgaccggggaggagcgggcggcctttgccgtcctggccccccagcggttccaccccgacggggacggactgacggtggaggactggcagtccgcccaggtaattctgggcaacccgccgccggagtgcctgcgggggagcaccgccctgcgctggctccacacccgcagtgccggggtggacccctataccgcccccggcgtcctgccctcggaggcggcgctgacctgctccaccggggcttatggccattcggtgtcagaacacctgttcgcactgctgctggcgctgatgaagcgcctgcccagttaccgggaccagcagaacagggcgctttggagggacctgggccctgtcaagactctgctgggcgctcaggtgctggtggtgggcaccggcgacctgggcagctccttcgcccggttgtgccagaccctgggggccagcactagcggcgtgcggcgggacccggccaagcccgccgcgggcatcgagcgcatgtacggcttcgaagcgctggatacgctgctccccgcggcggacgtggtggccctcacgctgcctcaaacccccggcaccgtccgtctctttgacaaggcgcggctgctgcgcatgaagggggacgccatcctcctcaacggcggccgggggagctgcgtggacggccaggccctggcggaggtgctggcggatggccgcctgtggggcgcgggcctggatgtcactgacccggagccccttccgccggagcatccgctgtggcggcagcccagggcgctcatcacgccccacaccgccggaggaaaccacctggcggacaccgagcgccgcatcgcccgcatcgcgctggacaacctgcgccgctatctggcgggggaggcgctgcgcaaccgcgttcgctgaaacgccccctacagaagctgtcggcgcagctcctccggcgacaggggagagagggcagccgggggaatgtcaaacacggttttacagcccgcctgtcccgcccggcccaggcgaaaggcggctcgggcaaaggcggtcaggacacaggcggtgaactccgggttggagtccagcgtcagtttgaattccaccagggcccggttctgttcctgccggcccgtgcggccgccgcggaagacaaagccgccgtggggcaggccgccgtggtcccggagcagctcctcctcagagagaaagtgcaccgtggtgtcgtagtcggcaaagtagtggggcatggtgatgatcgcctgctcgatgcgggcccggtcggccccctcctccgccaccacaaagcactcccgcatgtgcttctgccgggtggtcagcgccggattggcgccgctgcgcaccgcatccagggcggcggggaccgggatggtgtactgccgcgcgtcccggacgccggggatgcggcggacggcgtcggagtggccctggctgaccccccggccccagaaggtgtagctctccccgcagggcagcaccgccgcggccagggcccgcaccagggaaaagaggccggggtcccaccccgcggagatgatggccgtcttcccgccggccctggccgcggcgtccacggcggcaaagtgggcgggaatgttcgcgtgggtgtcgaagctgtccaccaggtgaaagcgtccggcgtacctggggctctgctccggaaggtcggcggcgctgccgccgcagagcagcagcacgtcgacggcgccctccatcccgtccagggcgtccagcggatacacgggtacgccgggcgtctggagtgtgaggctggagggcgggcgtcgggtaaacacgcccaccagcgccatgtccgggttctgccgcagcgcgtattccacgccgcgacccaggttgccgtagcccacgataccgattcggatctgatccatatgctctcctcccccggcggcggacagcgccggtttgatttggcggcgggaaccgtccggcttccgccattctatcctatgcgcgacaggggccaaaaacgagggctgccggggagaaacggaaaaaacagactgcgcgcgccgcctgtctctcaggcggcgcgcgcagtcatttttggaagggaagctcaaccgaggtatctttggagcatgacggcgacctcagcccgggaggcagtgccgccggggtccagaaggttccccttcttgccggtgatgacgccctgctccacggcccagctcatggcctccgcggcccaggaggagaccgccttgctgtcggcaaaggcgctcagctccgcagagccggcgtcagcgccggacgcgcggtagagcatgacggccagctgctcgcgggtgatggagccgttgggggcgcttccgtcggagatgccgttttccttggcccaggccatgcccttttcataccaggtgccgccgccggaggtgctcacgccgtcctggcgggccagaatggtcatcatcataccccgggtggttggggcggcgggggcaaacgtggtgtgggaggtgccggtcatgaggccgttctccaccacataggcgatgccgccggccgcccaatggcttgcggggacatcggtgaacccggcgccgtcggcgctcattttggcgtagatggcattggtcacatagcggtagtcgtcctgctggtgggcgcggttgttgacggagttggcaaagatggtgagatccatgccgtcccgctccagggcgatggcctccacaaagccgtcaatgggagtcccgttctcgttgaggcagcaaccggcgataaagctgtcctgctccgcggcctggatgagcaccgtggccccggcggggacggaggtgagcacgccgcagctataggtatacagcacatagtcgccgtcggcggcgtagctggcggtgatcaggctgtcggtggggtaggtgacggtatggagggcctccatgcccagggtggtgtaggtcaggtcggtgaccaggtttttggagatgtactccagcgggtcggagccggtggcgatgtagggggtgccggccttgacagcggccacggcggccgcgcccttctccccctgatccagggctacgttgcccacgatgatgtccgccttggcgggatcgtcggtgacggtgaagcccagctggtcgatgtaggtctctatgtcgtagttggaggtgccgttgctgtagacgttgcggtagttccggaagccgtagccgtcgcggaaccactgggcgaagtagccctccgtgagcttggcaccggagaatgcgtcatagcggcctgcgaggaagagcgtgggcttccggatggcgctggccgcgggggactcggccgtccgggtggcggagagcacaaagtcgtccgcaaccgtctcgtagctggcaagggagagagcaaagtcgcccttgtggtagccggaggtgatgaggcttacggtgcggccggcatccagcagggcgttgaccgcgcggaccgcctcgctgccgttgttggagaggatgaccacgtcgcccgccgtgccggtgagctgggatctgccggtcaccgtgctcacctcggtgagcttgccgtcaaaggcgccctctgcggcgatggggatgcagtcaaagccgcgcatggcggggaagttggtaaccgactcggagtacagatcggggaagccggaggcggaggcgtcggcgccctcccacaggacggcgttggcgtagttccgcttggcctgatgcatgtccaccaccagggaaccggccctgtaggtgacgccgcccacggcggtgtccgtgtccagcgaggatacccttacgccgttgcgcagcaggaaccggcccatcgcataggcgtcggcgggatcgcgctgggaggcggcgtccacggggatgacatagtactcggggaaataattgtcgttctcctcgtaggggacgcgccaggtatcggactgcaactgcttgttgttcacatccacataccacttttccatgctgtcccggtgatcttcgttctcgatgccccggaggaagaactccagttggttgtggtagatgtcgtccttgtgctccatgacgtagtcgatcaggccgtagacgccgtactcgaacaggtcggtggatgcctcgttgttatagggggtctcaatggtgtagcccagggagccgcagttgagcatggcgtagctggggccgtagttggtacacaggtcgtcccaagcggaccagtgcatggtggaggggtcgtagtcatcccgcagaggcatgtaataggaccagtacagggtgtcgggatgctcctcccgggtggccgacatggtgcccagggcagccgtgccgaaggcctcggagcccagcgcaaagttcttcaccagcaggtcgtattccaggttgggctcgtggggcggggtgcagggctccaccaggaattcggtcatgtagccgtgcagctcggcgaataccaccgggttccagtcgttgatcacctggaccagattggtagtctcgttctgggtctggttggaggcgtcccggttcagatcaaagccgttgtcgttgcggcgggtgttgtaggtgcgcccgtccgggttctcattggggcagatgacaaagatgatgtcgtccagaatgtcgtccaccttcagcgtgatgtcgccgctgatggtatagagctcactggcatcgttgacgccggtgttgtcctgaatgttgccctccgcatccctggtgaacttctgggagcccaggccggtgatgcccaggtccagcacgtcgggggcgaacatctccgagatgtccacactcttgtccttgaagccggtgagggtgttgtaggtaacggtctcctgtgtagccagggcgcgcaggacgttgagctgggcgtccacgccggggtcctcgtcggggtggacgttgttaaggaagaagggcacgcggtagtcgcccatggagcccttctccagcttgtcctggagggaggcgggggcggtctcggcgatggcgttcatggcctggaaggcgtccacggacgccttgctgtcggacagggtgacgtaatactgatcccggccgccctcgctctggccgaaggtggtgacggtgatgtaccggccggggagcgcctcgtcgatgatgtcctggatggactcgtcaatgtcgtcgtagcggacatagctgtcataggcattcaccgtcatgtccgtctccgccactacggtatcaccgctccgggcggacagggtgtacgtgccgatgaagctgggccaggcgttccgatttttggaggagtcgccgttgatgccggtaaaggaaccggcggtaaagggcagggtcacggtgaccttgccgccgctggacgacgcggctgcatcgcccagggtgaacagtgcgtcgcctccttcgccgttgttccagacctgccagcggtccaggcggtcgcctgagtagtaatagggatagagcgtcccgtcctggaagccctcctcccgggtgaggtaccaggtaaggccggcggcccaggcatcgggagaggcgtcccccagtaccgaggcgtctacggtgagggtggcggtaaaggcttgatcccggtcaaccaaagcgagcgtagaatccgaaacggtgagtacggaaggggcgggcgtttcggccgcggaggaaatggcgctgacggaaagcagcatgctcagagccaggagaagggagagggtccggactgcgcggtggatacgcatggtcatggtcgaggcctccttcatgaaatgtggttctcaagcttcctccatggaagaaatcttactgctgttgctgcaccggaatcgatcccccttcctgtaacagtactatgacaataggatagcatggggtggaaaaaacgtcaatataggaaaggtgtagatgcaatttcttgtatatattttacaatggcctgctgtcaaaagcatgcggagagagaaacagagtgaaatccagattttgctggaaagcagtttgaaaatacggtaaaatatcccccaaagggctggccgtgacacccgcggagccggagcacaacggaaaggacggaagggacatgctgtatgagacaatcgcgtttcccgacaatgcgccgctgcagtgcagtatcgtggaggtggaggaatacccctttcatatgcacgacgacgttctggagatcatgtttgccctggagggctcctttgagctcacagtggtcaacaacgtgctggacatgaaggccggggatatttacgtgagctgtccgcgggagctgcaccggctctgcgcctatccccacacccgggggacggtgatgctgctgcacatcaatgtggaggcataccgggcggagtttccggacctgcggacctaccagtttgccaacagtgccctggagaacaataccgcgggaatccaaatgctgggcagctatctgaaaaagcagctccccaggctgctggaccggacggggacggagacggctgcctacagggaggtgggggagaagattctcaacactctcatcaaggagttccagtgctattatctgggcagcggctttcccgagttcaacaacgcctacaagggaaacgagctccagctccggcgcatccgccggatcacggactacatctaccgcaactacaacaagcctatccgcattgaggatgtggcggccatggagcacatcagcgccaaccacctgaccaacattctcaagaatggctgcggcgtgggcttccggaccttcctgaacatggcccgtgtggagaagtcggcggccatgctgctggaggggggcaaggggctccagaccatcgcctacgaatgcggcttttccaagtacaaatatttcagcgacagctttgaaaagagctttcgcaccacgccacagcagtaccggcgcaggtaccagagccgcaccattgcggtgcaggcatatagctgcagggcactggaggggcaggagctggagctcctgctgcaaaaattctgccggaagtcggaggagatctcgctggactggggcggacggtatgaggagaagcccctccggaggccccggtgcgtcagcctggcgggtgccgcctacgaccatatcacctgctttccggagctgcggcggctgcgggaggagctggggctggacaccgttgcgcttgatctggactttctgcgccgttaccggaacagccccagagtgctgaactatatcctgaatgatctgtggtcgctgagaatgaggctgcgggtctgtgtgccgccgggggagccgctccgggggctgagggaggagttggagcccctgcgggagcggtttctgcggcccggcggtgaactggaggtgatcgttccggcggctcccggggaggaggagcgggccaggactctggcggaggccctgtccgccttccggcttccggtgcgcgtcaccggggcagagcaccggccggaagccaatgcgctgtatggctccggctatatgccgggctacctcctccacaccatggcttcaagccgggggagccgtatgccccggctcacgctgctggacggggattcgggtgtggccctgctgaccccggaggggctcaagcgcccggtctaccacctgctctccctgctggagcagttgggcgacacggtaatcgcccagggcgatatgtacctggccgccaggcagtccgggagggaggacatccaggtgctgctctaccactatgacgcgtgcttcgacacgctgttcgagggtggctcccgggtcgaggaacaggccccctttgtggagttgatgaaggatcacgactacaaccgggaggtcacactgagcgtccggggcatgacggggcggttcgccatccggaagtaccggcttacctctgaggaatacgcatccaggtaccgggatttccccctgccgccggcggatagactttccgcagagacgctgcgggtactcaacggaacactggcccctgaaatgtccctgaatcttctggagctggacggcgcctaccatctgaccctcaagctggccccctttgagatcctgctgctgtgctttgaaaaactataggttttcaaacgaggaaaatcactggaatttttcaatcaaatgtgatgaaaacccacaatttttgctataaaaagaattccacaggattaggacgggcaatccgaaaacgtatacaatataaacagaagtacagccaactggtcgtcagttggctgtactttttgttgtatttttccgggatgcagccggttttattttagcaaaacccccaaaatatccgcagggaaggggctatttttctgtatcaagttttctatacttaacatatgaagattgcaatcggaataaaaaacaggtcgagtctggtctagtttaaagggaaaggagccttttgccgagggagaaggaaaacagatgtaacccatggatttcgaatatgcgcttgaggctgcgggggcactgccgtcctgcggcttgaacgaaaggcctgtggcgtttccggtccccgcaggtcggaggagggactccggtttgtgtgcaggcggagtcccggacagggaacggtcggcacaggccgaccaataagtagaggaggattgtccatggaaaacaaagaaaagaaaatgctgacaacagaggatctgaaccggacgctggggaaaaaggagctgtactccatcgccttcggccatgtgatcggctccggcgtgttttcgctgatcggaatcggcatcgggtacacgggcaagtcggcgtggatcgggattctgctctccgccgtcttcattctgctccaggccctgcccttcatcgtgatggcgggtaccgcccgcttccgcggcggctattactccatgatgggcaccctgtggggtcccaagttcgccggcttctacatcgtcatcttctttgcctccaacgtctccctggccatgtacgccatcagcttcgcccagtatctccagggcgtgctgccgcaggtgcccattgtccccgtggcggtggcctgcctgaccgtattcttcattaccaacctgctgggcattgagggcgcggccaagctggagatcgtcatggatatcgtgctggctctggccatgacctgcttcatcgtgttcggactgcccaaggtggactacagcaccctgtttacagtggactttgcccccgccggccccatgggcatcatcacctgcgctgtgctgctgacctgggccaccgccggcggcattgacatggtcaacctgagtgcagaggccaagaaccccaccaaggatctgccccaggtcatcctggtggctaccattgccatcgcaatcttctatgccctgattgccatggtggccggcggcgtgctccccgtctccgagacggccaaccagcctctggacctggtggccagggcgatcatgcccactcccgtgttcctgttcttcgtcatcggcggcgccctgttggccctgactacgactctgaacgccaccttcgcatggatcaccaagcccatcctacaggcctgcaacgacggctggctgccccataagatcggctacattcaccccaagttcaagacccccgtcattatcctggtgggcttctacatcgtgggcctcattcccatcctgaccggcctgcagatcagcatgatcgccgacaccgccgtggtgctcagcaacattctgttcgccttcatctgcttcggcaccgtatttatcccccagcgcatgccggagctgtgggaggtctccgccttccgctgcagcaagagcaagctctacctgaagtccattctgggcggcgtatcctgcgtggtcatggtgctggtgctcttcttccagatgagcatgccccaggcggtcattctggtcatcatcaccattgtggggattctcttcgcccagctccgctacagaagcggcgccgtcaagcccgtcaagagctatgaaaagctgtaatgcagggatcgtctattttattcagaaggagttcttattgtatggacagaacatatcagcacatatttacccctctgaccatccggggaatcaccctgaaaaaccgcattgagatcgcgcccatctccgtgttcgacctggataccaccccggagcgccacccctccgagcgggatatgcagttcttccgcatgcgggccatgggcggcgccgccgtagttaccctgggcgactgtattgtcgatcccagcggcgaggactccggcaagctggcctcccccaagatcctggcggggcacgaggacaacctgcccttcctgacccgcatcgccgacgagatccaccgctacggcgccgttgccagcattgagctcaaccacgccggcatgctgcgggccagcgcgggcgtccaggcctggggccctgactacatcaactttgacgagaccaagaccatcgcccccctgtccgaccagtccgcctccgatgagccggtctaccgcaagggcgaggtgctcttcatgaccgaggagatgatcgagaccgtggtggacgcctttggccgcgccgccgagcaggccaagacctgcggcttcgagatggccatgatccacgccggccacggctggctcatccaccagttcctctccccgctgaccaaccaccgcaccgaccgcttcggcggcagcctggagaaccgggcccgcctgctgctcatgatcatcgaccgcatccgccaatactgcggcgaggacttcctcatcgaggtgcgcttcagcggcaccgagtacgtggagggcggctacaccctgaaggagggcgtggagtttgccaagctgatggacggcaaggccgatctgctgcatgtctccgcctgcaacttctacttcccggagaccgagtgcctgatggtgcccggcatgttcaaggaggagggccacaacctctacctggccgaggagatcaagaagcacgtgaagcactcccatgtggtgagcgtgggcgcccaccgggatcccaagaagatcgaggatatcctggccgccgggaaggtggacatgatcgccgtctgccgcgcggtcaacgccgacccccagtttgtcaacaagctcaagaggaaccaggaggaggagatccgcccctgcctgcgctgcaacgcctgcatcgccaactaccagacccgcatcaccaagtgcgccatcaaccccaccctggaccggccggaggacgaggtgttccccttcctgcccaccacgcccaagcgggtgctcatcgccggcggaggccccgccggactggaggcggccattgtcgccagggatcgggggcatgaggtcatcctctgcgagaaaaccggcatgctgggcggcctgctccgctacgcccggaaggtgcccttcaagcgggagacccagcagtatgtggattatatgattgccaaggccgtccgcatgggcgtggatatccggctgaacaccgaggtcacccccgagctggtaaaggtcatcgcccccgacttctgtatcgccgccgtgggctccaaggccctgattccccctatccccggtgtggagaaggcccatcccatcatggacatgtatgacggcaaggtacaggtcgggcagaaggtggtcatcgtaggcggcggcctggccggcaccgaggccgctctggagctggccatgcagggcaagcaggtcaccctggtggagatgggcattgacgtggcccgcgacgccaactccatccacaagcccgccctgatgatggagctcaaggatcacgccgagcaggtcacgatcctgcgcaggaccacctgtaccgggatccatgaccacggcatcgtgtgcagagacgcggacggcagggagctcacgcttgacgccgacaccgtcatcctggccgccggtatggcgcccctccgggcggaggccctggccctggagccggtctccagcgagttccgcatggtgggcgactgcaagcggccccgccagatcctggaggcggtccgcgagggctatgacgcggccatggaggtctgagacggcatcctgacgccccaatgagagaagatcccattccggggcccggcacatgtgccaggccccggaacttatttctggaggagaaccgcgcaggcaaacaagaccgcctccgctcataggcggaggcggtcttgcagtgtatccggcggaacgccgccgctatccggtcccgggcaaagcaaagcctggcgcggcggactcaccagcactccaactcggccagcaccgccggggagtcggtgaggatttctaccggctgggaaaagtccagggcgaacaggcccatggacgatttggcgtcgatagcgatggcgccgtccagggagcggacctgaacctcgtcaggaacggagtaggccaggcggtgaaggcgctccagcgcctccaccgaagggactttcttctgcacaaccacggcgtgtcctcctgtcgtcagttcatcagcgagcacaccagctccgtgtagccggcggggtcctccagaggcaggccggcgatgagctgagcctgggcgtagaggagcttcgcgtaccgggcggccttgtcccggtcgctctccaccgcccggctgagggcggcgaaggccgccgagtcggggttgagctccagcacccgctgggccttcatgcttttggcgttctcggggtccacccgctggaaatacttctccatctccagggtgatggggccgtcggcggtgaggcacaccgcgccgctcttgaggattttggacacccgggcctccttgatggcgtcgcccagggtctccttgaggaagtccagcacgggcttgctctcctcggccttctgctccagggcggccttctcctcgtcggtctcggggagggcgtcggcgtcgtccaccgacttgaaggccacctcgtccaccgcgcccagggcgtcgatgacgaactggtcgggctcgtcggtgaggtagaggatctcgtagcccttgtcccggatgcgttcggcctggggcagcttggcaagctgcccggcgtcctcgccgcaggcgtagtagatgtacttctgctcctcgggcatgcgggccttgtactcggccagggaggtgagcttgccctccttggaggagaagaagagcagcagatccttcaaaagctccttgtgggcgccgtagtcgctcaccacgcccaccttgatctgggtgccgaaagccttccagaaggtctcgtacttctcccggtcatccttctggaggcggagcagctcggccttgatcttcttctccaggttgcccgcgatcaccttgagctggcgggtgtgctggagcatctcacgggagatgttgagggagaagtcctgggagtccaccacgcccttgacaaagcggaagtgctcgggcagcagatcggcgcacttgtccatgatgagcacgccggaggagtagagctggaggcccttctggtactcccgggagtggaagtcatagggggcgtgggccgggatatagagcatggccttgtactccaccgcgccctcggcggacacgtgcaccacgctcagggggtcctcccagtcgccgtacttctccttataaaactggttgtactcctccgcggtgacctcgctcttgggccgctgccacagggggaccatggagttgagggtctcccactcgtcgaagtcctcccactcgggcttgtagtcgtcgccggcgtcctcggggcggggcttctggcgggacttgtgcatgagcatgacgatggggtagtggatgtagtcggagtattttttgaccagctcggccaggcggtactgctccaggtactcgtcgtagtggtcgtcctcggtgttttgcttgatgtggagcacgatgtctgtgccggcgctctccttcccgcagggggtgagggtgtacccgtccgcgccgtcggaggcccactgccacgcctcgtcggagccgtaggccctggaggtgacggtgacgtggtcggccaccatgaaggcggagtagaagcccacgccgaactggccgatgatgtcggtggtgtgctccccgccgttctcctgcttggccagctcctgcttgaactggagggagccgctgcgggcgatggtgcccaggttctgctccagctcctccttcgtcatgccgatgccattgtcggagatggtcagggtgcgggcaatctggtcgggggtgagggtaattttgaagtcggagcggttcagccccacctgatcgtcggtgagggccttgtaggccagcttgtccaccgcgtcgctggcgttggagatcagctcccgcaggaagatctccttgtgggtgtagatggagttgatcatcagatccagcagccgcttggactcggccttgaactgtttctttgccatgacaatgcctcctgtatctcaaacggttttgtaaacaaagagcgttagcactcgaactttctgagtgctaacgctatcataatccttcgcatgaaaaattgcaagagggttcaaggattgtttacaattcggtgggagcggatgtgccaggactcgccgtcccgctgtaaggctaactccgcccggccgccgtcctcccggggttccgtccacagccgggcggtgccggcggcctcgtccacctcgcccccggcgcacaggaacttgccggggccgaagtcgctggtgaaggtgtaccaggcgtcgtactcctccaggtaggggacgcccgaggtgtcggccagctcggcggcggtgatgccggcgtaccgctccagggccgcgtccaccgaggcgcgggtgatgcggtgggtgggcacggcgcccggcgacatgtcccaggggtagccgggcagggttttcagagcgtcggattccgcctcatccccggcgctcaatgtgccgtcatcggggtagtactccaaaaaggcggcgaagtccagctctcttacatcgtcgtaatagctggtgaaaaagccgctcgccggagtggcgtcagccacgccgccctcctccgcccctggggcaaaggcctgattgacccggctgatctcctccggggtgagcgcgcgcggctccgccgccgggacggatggctggggagcagggtcagccggacagagctccgggaaggcgctgctgagcagcccacggaggcgaaccagggggatggggcgctccagggtggcggtgggggaggtagcgccgtccgcatagaccgggaagaggagcacaaggtggtcttccgtaaggtagaaggcgttgacatcccagtagctctcaaaatatgcccggccgtacgggccgtcctccagaccgtccagagcatccagaagagcgtccatccccttctcggccggaacccgcagtaaggagtccagggtaagggctttgccggtggacaggtcaaaaaggctgccggagacagtgcccgcgggctcacccgccagcgcctcggtgcgctggtagcggacgctcaggaagcggtcgcaccgctggatggtgtagacgctctccacggaatagtccccgccgggctccaggcctggagtgctccagtattcccggcccttttccagccacccctctcccagtatggagaagtcttcgtttagactccgccagacggggttctccccggcgttttcgatatagggcatgacaaagcgcagggagaccaccaccccctccggcgcgtccgcgttggattcctcgccggcatagtcccgctgaaagacctgctcgccccacaccggggcgggcgtctccggccggacagaaccggcctccggcggcggggcggtctccgtcggagccggggccttcggtgtgcaggcggtcagacagagggccagcagcagaacgagcgtcagatatcgtttcatatcaatcccgcccatctaagtcaagattcttctcccggaatacgatgcggaaggaggggatgttgtcgaagcctaggttggaggtctccactgtgaagcggtaggcgcgctccgtcaggacggcggtcaccaccacgtcctccccgtcctcggcgatggtgacatcccgcaggaagtggccgtcccggcccagggagcccgccgggaaggaataggggtacaggtctccggggtagttcatcagctccaggtgttcattcagcggggagccgggggcgccgctctccaggcaggtgttgtagaggcggagggtgaacacccggccatccggatcaaagctggtctcgaagctgggaatggtggtggccgccgggaagaacccctcaaacagctcctggctgtccccgttggggatgaaggagaaggacaggccgtcggcatcgatgcgggcgtcgtacacctgctcaaaccggccgctttcagtatcggggcggccgttctcccaccagcccatgtagaagggctccgccgggtccagccaggtttccacagtatccagggtggtctgaacggcgtcctccggcacccggccgtaggcgtccaccagcacccgcacggtacccgactcgggcagccctttccagggggtggaggagctgacaccgccggtggtaaagcgcacctcgcctgggccggtgatctgataggaagcatcggcgtccagacccgtcaggtacacccggcggccggtttctccgaacacccagtccagaaggcggggttcactgccgccgtaggtgtattccaccacaaagtcgtccagatagccgcgcacctccgtcaccgtatagccctcggcctcatagagggcgggcagttcctcctccgtgaccggggtgggcagctcggcggtgggggcggggctggccgcgccgggagaaggggcgggctcagcgggggcggccggggcgcaggcggccagcagcgcggccagggccagggcggccaggccggaaaaaaggcgcagtttcataaaaaaatcctccttggcgtctcctatcataccataggggacggcaaaaagggttacaggggcggtttcaatccggttacaagaaactacgattgcccttttgcaaaaaatcacatataatagaggctgctgattatgagagggaggcaagttatgattctgaacgtgctggccgtaggcgacgtcgtgggggacagcggcgtggagtacctgtcccgccatctccgggggctgaaaaagctcaagggcgtgcatttcacggtggtcaacggggagaacgcgtccggcgtggggattctgccacggcaggcccgggagatctttgacgccggtgcggatgtggtcaccctgggcaaccacacctggaaccgcatccagatcgccgactttctggaggatgaccggtataccctccgccccgccaactacaccagccgggtgcccggccggggctggggcgtgtacgacggccccggcggcgtgcgcatcggcgtcatgaacctgattggccggtgcgagatggacagcaacttcgacaaccccttcaccaccgccgaccgggtgctcaggcggatggaggggaccgatgtggtgctggtggacttccacgccgaggccaccagcgagaagggggccatggggtattacctggacggccgggctcaggccgtgtggggcacccacacccatgtccccaccgccgacgggcaaattctccccaaggggctgggctttgtcaccgacctgggtatgaccggcccggccgagagcgtgctgggcatccggccggagcaggccgtcaaccgcttcctgggcgggctgccccgccgctttgagcccgccccaggcccctgcaagctggagagcgtactcttctccatcgacaccgaccagcggcggtgcgtgagcgtcgagcgggtggacatccgcgcgtaatatcccctgcgagaaaggaaccgagacatctatgctgacaatcatccacggggcggatttccacctggacgccccgtttgccgccctgcccccggacaaggccagggcccgccgggccgagcagcgggagctgctggaccggctggccgggctggcggaggagcggcgggcggacgtggtgctgctctccggcgacctgctggacggcggccagacctaccaggagaccgtacaggccctggcccggaccctggggggcatccccgccccggtgttcatcgccccgggcaaccatgactgctacggcccccgttcggtatacgccggcacggcgtggccggacaacgtacatatcttttccaccgtggcggtggagggggtggagctgcccggcctcaactgcgtggtgcacggcgcggccttcaccaccccccaggccgaccgctctcccctgatgggctttgccgccccccgggacgggcgcatccacctgatggccctccacggggacgtggaggggaaggggcgctacggtcccatcgccctggaggacatcgccgccagcggcctgacctacctggccctgggacacatccacgcctgctccgggctgcaaaaggcgggggacacgtactgggcctaccccggctgtcccgagggccggggctttgacgagctgggcgacaagggcgtgctggtggtgacggtggacgacggcggggccgtgtccgccgagttcgtccccctggcccggcggcgctatgagatcctgaccgtggatgtgaccggggcggagagcccggccgccgccctggcggcggccctgcccgcagacgccggggaggactgctatcgcatcgtgctcaccggagagcggggggaggagccgccggagctggccgccctcgccgccctggccgagccccgtttttacagcgtgaccctccgggatcagacccgggagcggcgggcgctgtgggcccggtcgggggaggacagcctcaccggcctcttcctgcgcaccctgcggagcggggcgctggagggggacgggctggagctggccgcccgcttcgggctggcggccctggagaatggggaggatccctgcctatgaagattttgaagatgcgcgccaccttcggcaagctccagagcgcggagctggcgctgggggaggggctgaatgtcattgaggcccccaacgaggggggcaagtccacctggtcggccttcctgcgggccatgctctacgggatcaacaccaaggagcgggaccgtcagggctacctcgcggagaagaaccgctaccagccctggagcggcgcggccatggaggggagcgtggagctgctctggcagggccggtccgtcaccctccgccgggggcccaaggggagcaccccctttggccgctttgaggcggtgtataccggcacggcggagccggtgcccggcctcaccggggacaacgcgggggagaccctcaccggcgtgcccagggaggtattcgagcgctccgccttcgtgggccaggggggcgcggccatcgacggcgcccccgccctggaggcccgcatcgccgccctggcctccagcggggaggaggatgtgtcctactcccaggtagagcgccgcctgcgggactggctcaaccgccggaagcacaacaagaccggcctgatcccccggctggaggaggagctggccgacgtggaggagaccctggcccgccagtccaaggccttccgtctggcccaggaggccaggcgggagctggagcggctccaggccgagcacagacttctggagtccgagcgggacgcccacctcagccgggccatggcccagcgcagggcccggtgggaggcggcccaggccgcccttgccgaggcccaggcccaggtggacggcctggaggccgagcgtacccgccacggcgcgcctcccgaccgggataccctgaaaagggcccaggaggagctcaacgccctcaataccctccacgccaaccgcaagctggcggagagccagctggaggaggcccgggcggcggaggcggaggcccgggcctccgcagaggaccccctgttccccggcctgacccccgacgaggcctgggagcgggccggcgccgacgcggaggcggcgggcagccggcccaaaacagcggggctgtacgcgggcggcatcctgctgctggcagtgggcgcggtggggctcatagccaccctctgcgggacgctgcccttgcccctgggggggagccttccggccgttttgacgacggccggggtgtccgctgctctggctatcgggggggcagccctgctgatcgccgccgggctgtggaaaagacgatttgccgccggagcggcagagctgctggcacgctacggggcggagcggcctgaggatattctgggccgggccagcgcctaccgggaggcgtgtgtggtggcggcggaggcggccaaaaagcgggaggcggtggagcaggccctggccgggcacatcgcccgggacgaggagacccgccggaggctgctggagctggtgcaccccttcgcccccacggtgacggacaccttcggcgtatccgccgccctctcccgggcgctgaacctggacgagcgcctgtccaccgcccgggtaaagctggagggggccagaaccctggccgacagcctgccccggcccgaggaggtctccggcgggacggacgtggagccccgctttgaccctgccgagaccgcggcccgcctgagcgcggcggagggagagctctcccggctgcgcagcggcctggccatggcccagggggagctgaataccctgggcgaccgggaggcccttcagacccggcgggaggccatccaggaggagctggaccgccgccgggcggagtacgacgccctgggcgcggccctggccgccctggagcaggcccacagcgggctccaggcccggttctccccggccctcaaccgccgggcgggggggctgctggcggagctcaccggcgggaaatacgacaaggtggcccttacccagcagtttgaggccctggcggaggagcacgacggcctccagccccggcgggcgctgaccctctcccaaggcaccgccgaccagctctacctggcggtgcgtctggcggtgtgtgagctggtgctccctgcggaggagccctgtcccctggtgctggacgacgccctggccaacttcgatgacggccgctgcgccctggccctggaggccctggcccggctgggagaggagcggcagatcctcctgttcacctgccacagccgggaggcgcggctggcggagggccgggagggggccgccgttctgcgcttgcaatcgtgagcagggcggggtataatagaacgatcttttttccattcggatggagctgatacctttggcaaagaagcaaacacaagacggggaggagcaggaggagctctccagcggcgactccctcaagctggatctctacttctggctccaggccctggtgctggccctggtggcgctgatccttctcttcaccttcgtggggcgcatcatcggcgtggacggcagctccatgtatcccacgctgcaccacggggacatgctgctgctccagagcgtcggctatgagcccaagcagggggatgtggtggtgctcaccaaggccttccgcgatgtggacgggcccatcgtcaagcgggtcatcgccgtgggcggacagacggtggacatcgactacgacgcgggcaccgtcgcagtggacggacaggtgctggacgagccctacatccatgaggccatgctgtgtcccacctatgagaaccagacccatattgaggtgccggagggctccatcttcgtcatgggcgacaaccgcaaccactccagtgacagccgggacgtgaccctgggcaccgtggacgagcggtatgtgctggggcgggcggtgtgcgtcctgctgcccttccaaaacttcggcatgatccccgaaggggagcagaccagatagcatgcaaaacgcgggccgcgtatccaagggatacgcggcccgcgttttaattcaggacaggcggaaacgctccagcttctgatagagggcggtgcgggagatgcccagcaaccgggcggccagcgcccggttgcccccggcataggccagggcctgctccagggcggcgcgctcctggtcggccagggtggggggcggcgcggaggcggggccggacggcgacgccgtccccgccagggggtcggtgacgccgaaggcctcgttgtagctgcgctggccgatggtcagctcgtccaccacgtgccgtccggtgatctgcaccccgtcgtagaacaccagccagcggcccaccagattcttgagctggcggacgttacccggccaggtgtaccgctgaaggtactccatggcctggtgggtgaggcggagccgcccgcccttttgggcgcagaggcggtcgatgagcaggggaatgtcctccggccgggcccgcaggggcggcaggtagagttcgatggtggacaggcggtagtagagatccgcccggaaagcccgccgctcgctcatggccagcaggttttggttggtcgaggcgatgatccccgcacgcagggggatgatctcacgaccgcccacccgctcaaactcccgggactccagcacccgcagcagcttggactgcatctgcagatccatgtccccgatctcgtccagcaggagatccccgtcccccgccagttgaaacttgcccatccgggcctcggtggcgccggtgaaagcccccttctcgtggccgaagagttcggattccaggagctgctctgggatggcggtacagttgatggtcacataggggagggggcggcccccgtggcgctcggcatggatgccgctggcgatgatctccttgccggtgccggtctcccccagaatgagtacgctctcaccgctgtgagcggctttccgggccttgtccagcaggtcggccacccgggggctctcccctacaaaatcctccaggcggtagccgctgtccacccgggccagatcctggtagaggccccggaagccggcggcctggtcgctgagctgggagagcacctttttcaaccggcccaggttgcgcaccgtgatggtgcccaccacgccgatgacccgctccccgtccaggacgggaaacaggctggagatacagggccggccatggagctccagaaagaggtcgggccggggttggccggtgcgcagtacctcctcgaagggggagagctggtccagcactgagatatgctgccccaccaccgctgcccgctgggacgggtcggggaaggagctggcgctgatgtagaggatgcggcagtcggtgtccaccagaatggcggtgtcgaacaggctgtccagcatccggtccaggacgccgccccgggtgtgcagctcctggcggctgatgtgcaaagtctgcatgtcctcaccacctgttcataatctgaacactattatacaatatgtacggaaaaaagacaagacagccgggcggaatggggggagaaggagggcagaagtcccctgtggggcgggggttccgggccgtgcggcgcatttggcacgggaattgctcatgaaaatagacgtgaatacaaaacacagaaggagtgtttatcatgagcaagagacccgaactgaccgctgctgagcgcgccctgccctacgctaagttttacgacctgcctatcacccccattccggaggagaagctggccgtgctggcggctggccccatcgatcccagcctggcgctgaagatcgaggaccgcaacgacctgttcaagcccggctatctgccctgcgagatcggttactgcgtcatgcccaacggcaccggcttcctggccaaccgcaccgagatgcccggcgtgactcctgagatgttcgagtggtggttcgcctggcacagcctggaggatctccgctaccgcatctgggacccggaggatcactactatgcccgccagcagatgcgggagaagaccctggaccagagcctgcccatgcgggagcgcacctggggcaccgtccaccatgtgctggaggatatcggccccggccccgacgagctggttttggagttccgctatccccacgagctgggctatgaggaggagaaggtgggcaccgacgcctgcgccgccctcatctgcgccaacggccacggccccgtccccggccagggcgtggcggccatcatgacccacttcgtccgcgagatccccggcggcatcgagctgcgctcccgcttctggatcggctacggcctggtggacggcaggctggtcaagctggtgcccgacggcgtgtccgtcccggaggaggtacccatgggcctgttcgcccacaacctgaaggagttcggccacctggccgccatcctgcctcaggtctacgccgagaacaaggacaactggtaaggaggagccgtcatgtgcaagaagagcaaattccctctggtatttaacattttcctggccttcttcatcactttggtggtgaccatcttcgtcaaggccggcgagggcgcgctcaccccggagagctttatcatcggtatgattcagggcttctgcctcaacatgaccctggagaccatcatcgatctgcccgccatgggcaacaagttcgtccgcgccttgggcgtcaagaagatggaaggccccgccgcctacttcctgcgcctgctggccatcgtgttcgtgattgtgctgctcatgagcttcctgctgatgttctgcgagatcggcttcgccatgggcgcgggcttcttcggcttctggatcaccaaggtgcccgccatctttgtggtggcctacatcaccgccgccatcgtcttcatcccctccatgaaggcgactgcggtcatctgttccagggatgactgaatcggatgacacaggaggatgtctataaaccctcctgccgtcgaaaggaccttttcgataggcggtaaaacatacccccgcgtgctatggcacgcgggggtatgttttacccggtgacggcatcccggcgggagagccgccgtacggccagcagagagaagagcagaaggtagaacccgcagcccgccagaaaggaggggaggggcagggccatctgggggttgttggcccgcatacccaggcagagcagggagtagggaaaggcggcgccgaagccctggctggtaaggagcaggccgaagattccacccaccagggcgatggctaccggcggggcgaaggcgcggatggccagactgaggtagagctgtacggcgcacaccgccgtacagcccagggcgccgaaggccagccagccgggcagctccgggggcaggggggcggagatacctgccagcctgccgctgaggagaaagagcaggccgatgagggccatggccagggcggacacccccacgtccagcagcagcttgcccaggtagagcgcacgcactggcaccggggcggtgagggcggcgttccagttgtggtcggcgtgctccagccgccactgccaggcgcagaacacgccgaactgggcggggaggaagaacatggaggcaaacagggtgtgctgggtccacaggctgtaccagccggcgtccagcacctccaggttgcccaggtagttgaaggtgcccagtaccgcgggaaagagggggagtaccaggaaggccagccacaccggggcgcggcggcacttcatcagctccgcccggagacagcgcagtaccatgcctcacacctcctttcggacgaacagagtccgtcccacagtgagaaagagggccgcccacaggcacaggagggccagatccaggggctccggccgccgccaaaagaaagcggtccagcgggtggcctcatcccattccatccgcaccagagagagcaggccgtaatacccccaggggacgcaccgctgtacccacacggggaagagcagggccatgagtcccacgaagctgccgaagatgccgcataccagagccacggcctggttggcgaagcggagggacagcccctgctggagggcgtagagggtcatggacaccgcccaggacagggcggtaaaaaccacgaaccgcccccagggcgtcccgccggggaagcccatggcaaggcccagggccagaaagagggcgccgcgcgccaggagcaggccggccagcaccagggcgccccaggccagcttggcggcgtagagacgaccgggggtgacggcagtctccagcagcttgagggtatgccccctgtgctccagctcacagctccggctggcaatcaccgccacgccgatagggagcataatggcgtccaccattgccaggttgtagagcagaagcatccacccctgagccagcgcctccgcatcctgccgggtcaggtaggccccaaaccacaggagctgggcggccagcaggccggcgcagaccagggtgagcttgcgccggcggcacttgcagaactccagggccagcagcttcacaggctctcctcccttccggtgagctccagaaagaggtcttccaggctcttctgccgctcctccatgcgcagaagatccacccggtgggaggccagaaagcgggagagactggctgcatcggcgtcggagagcaggggaagggtgagccagccgtcctccagggtgcaggggacacggttctctcccagcaggcgggccgccccggcgttgtcggtggtgcgcagggccaggcgggggcaactgcgggcgtggagcgcggacagggtgtcctgaaacaccagcctcccctcccggatgatgcctacgtggtcggccatctggtcgatctcgctgagcaggtggctggacaccaccaccgtcatgccgaaccggccgggcagggagcggatgagctcccgcatctcctggatgcccgccggatccaggccgttggtgggctcgtccaggatcagcagcctggggaagcccagcagggcggcggccaggcccagccgctgcttcatgcccagggagtagtgggccgtccgcttgcccttctggccgtccagccggacgatgcgcagcacctccccgatgtcccgctccggcgccccgcgcagggtttggacgatgtgcaggttctccgcgccggtcaggtggccgtagtagctggggctctcgatcaggctgcccacctgactgagagtctccatgcgggtgcggggacccatgggccgcccaaagacggcgatctcccctgccgtgggcctggccagccccagaagcagcttgagggtggtggatttgcccgccccgttggggcccagaaatccatagaccgccccctccggcacggtgagatccagatggttgacccgcagagccgagccgtactgtttgcacagcccgcgggtttccacaacagcgttcatgtgaggacacctccttgttacaccgcaaggatagcgcccctcccttacatcccgatgaagccatccttacgcttaccttacgttttccggccggggcgtgcaaaggggaagccagttgttgtataatagaaaaacagcgggaacagggcgcggggccatgtgctttctgccctgcgcaagtcggcaggggcggcccttctggccgcccgcgggcgaccacgagggtcgtccctacggggcatttgctccgatcagaaaggactgggaagcaaggatggcctatcacattttactggtggacgacgcgccggagctgcggcgcatggtgggagagctgctggagggggcgggctatgctgtcacactggcagccgactgcgcccaggcccgccgggcgtggacagagtcgcagcccgacgcggcgctgctggacgtgatgctccccgatggggacgggttttccctgctggaggagctgcggcgggtggggaactgcgtgccggtgctgttcctctccgcacgggacgaggatgaggctcgcctgcgggggctgggcctgggggcggacgactacatcaccaagcccttcctgccccaggagctgctgctgcgcctggcggcggtgctccgccgggtgtacggcgctggggcgggggaggtgctgcgcctcggggcagcggaggtgcactggggcaccggcacggtgcgccgccccggcggcggtgaggctgccctcaccgccaaggagtacgccctgctcaaaaagctggcggccaaccggggaaacatcgtcaccatcgacgccctgtgccaggccctgtgggaggggcccatggtgggctatgagaacaccctcatggttcatatacgccgcctgcgggagaagctggagaccgacccctcccacccgcagtacctgctcaccgtccgggggctgggctaccgcctggcccgggaggagcggccgtgagggggcgcaatctccgccgtaccctggtggcggccggcctggtggcggcctcggcggtgctggtgctggttctggcggtggcggggctgctggcctttattgtcacctctgccggggcgggcagctcgtggaacgcctctatggacgagctctccgccgccctggtgcggacggaggggggctatgcctttaccggcggggagtacctggcggagaaggagctgtgggccatgctggtggacgagggcggcgccgtggtgtggcagcagggcaaacccgccgatgtgcccgaccgctactccctcaccgatgtggccgcctttacccgctggtatctgagcgactacccggtacaggtacgggtacgggaggacggtctgctggtggcgggcggcccgaaggggagcacctggaagcatcccttcgtcttggatatggatgtgctgaagaccatccctttctggttcgcggggctgtttctgctggccctgctgggggtgctgggcctcaccgccctggtgctgggccgccagttccggcgggaacagcaggagcgggactttgcccgctccgactggatcaacggcatctcccatgacatccgcacccctctgtccatggtcatgggctacgccgggcagttggaggcggacccggtcctcccgccccggcggagggcccaggccgccatcatccgccgccagagccagaccatccgggatctgatcaatgacctcaacctgaccatgcgcctggactacgccatgcagcccctgcggcgggggagcctccaccccgccgccctggtgcggcaggtggcggccgacgtgctcaacggcgggctggaggagcggtacgccctggcggtggaggtgccgccggaggccgaagcccttacgttggagggggacgcgtccctgctgcggcgggccctgcttaacctggtgaacaactgcgtgcgccacaacccggagggctgctccatcaccctgactgcggcagccgagggggaagtatgcaccctgagggtggaggacgacgggggcggcggcctgccggacgcccaggcggggggcgggctggccccggacggcggggccgcccacggcaccggcctcaggctggtggagcaaatcgccagggcccatggcggcgcactggagctgcaccgggcggcgcggggcgtcctggccgtcctccgcctgcccctgtgagcgcgcagagcccccggacgccaatggcatccgggggctctgcatgagaaaggggaggtatgggaagaaaacgctactgttggggcggcatgaccgtggccatgccctgtaaaaccacctcgcccgcctggttggtgcacaccgtatccagcttaacgatgttcttctccgcgcggatttcgctcactgtgcaggtggcggtgacggtgtccccgaagcggacgggcctggtgaacttcagctcctggcccaggtagatggtgccggggccgggcagctgcatggccaggacggcggaaatgaggccggcgctgaggatgccgtgggcaatccgtccgccgaaccgggaggcgctggccacggactcgttgacatgggcggggttcagatcgccggtgataccggcgaagaggtacacgtcggtctcgctgatggtcttggagtggctggcgctgtcgcccagcttcaattgctgaatggtcatgatgcggcctccttcttgtatgcgctgacggggatcagaggaacaggccccagatcagggccagccccagagaggataccagcggaatgatacaggtcgtgatacagatgtcgatgtaggactccttgtgggtacagttggacacggccagcagggtgagcaccgcgccgttgtggggcagggtgtccaggccgccggaggagatggaggcgatgcggtgcagggcctccagaacgccggtgttgcccgcagccatttcggcgtacttggggcccagggcggacagggcgatggacatgccgccggaggccgagccggtggcgccggccagcagattgacggccaccgcctcggagaagaggatggagccgggcatgttcagggcgatgctggtgagggaggcaaagccggggaccaccttgaccacggagccgaagccaacggcgcaggcggtgttcatgatggcgcccatggagccgttggcgccctcgttgatggcgggcagcagggtcttggcctggttcaggttcagcaggcaggccaccagaatgccgcacaccagggcgatgacgatggcgtagttggaggccagctcaatgccggcaaagcgattgagcagccaggggaacaggttgagcatgagcacaaccaccaccagggggacgatgccggtgacccagtgccaggagggcagagccttggagtcgtgatccacttccttgtgcttggggtcggggacaaagtgcaggcccttgcggcgggactggcgcacccgccactccaggtagatataggcgggcagcagcataacggcgcaggccacaagggacaggagcggagccgccatggtggtggtgccgtagtagtcggtggggatcaggttctgaatctggggggtgccgggcacggcggtcatggtgatgccgaaggcgccggtggcaatggcgccgggcagaagggtgcggggcaggtcggcggcccggtagatggaatagcccatgggatagatgacgaacaccacgacgaacagggagatgccgccataggtcatcagcaggcaggggataaccactgctgccaccgcgaagcgggggccgatcagcttgaccagggcgttgcccaggctgcgggcggagccggtcagatccatgaccttgccgtacaccgcccccaggaagaaggcggggaaccattggagcacgtagtcggccatgcccttcatatagtcgccaatgtaggcgtccaggatggcgtagccgctgagcacggccaccaccacggcgcagacaggggcgacccagatgatggaatagcccttgtaggccaggaacatcagcaggaccaggcccaaaatgatgccgaacagggatagtgacatttggattcctcctctacagatacagaataaacgtcccctctcagatcagggcagggtgagccccataggttccgggcggaagatgcggggatccatcgcccggaccttgcggatgatgggctggaagtccatctggtccagaatatcccgctgtaggtccacgccgggggcgatctctttcagctccaccccctccggagtgagggcgaagacggccctctccgtgacgtagagcacgtgctggccgcgtctggccgcataggcgccggagaaggtgatctgctccacctggcgcagcagcttgcgcacggacccctcgcggcggatggccagcctgccgtcctccaccgccacgtccagcccgccggcggtgaaggtgccgcagtacaccactcgtttggcgttctgggtgatgttgatgaagccgccgcagccggcgatcttggggccgaatttggagacattgatgtttcctgcggcgtccatctgggccaggcccaggaaggccacgtccagcccgccgccgtcatagaaatcgaactgggcgggctggtccagaatgcagtcggcgttgatggctgcgccgaagtccttgccgccggcggggatgccgccgatggcccctacctcggtggtcagcacaagcccctccaggccctcctccgccgccacggcggccaccccctccggcatgccgatgcccaggttggtgactgcgtgggggagcagctccatggcggcccggcgggcgatgatcttccgctctcccatgggcagcgggggcagggagtgcagaggcacgcgcacctcgccggagaaggccgggttataacgggtgccgaaggtctgcatgtgctcctccggcggggcctccaccagcacgtccacgtagatgccgggcaggcgcaccaggcgggtgtccagggagccgtattccacaatgcgctccacctggacgatgaccgttccgccggaattccgggcggcctgtgcctgggccagggcctcggcgtatacgccctcccgctggaaggtgcagttgcccctggtatcggcatagctggcccggagaatagccacctgaatggggatggcagggtagaacagcttttcctccccctccagctcaatgagctttaccacgtccccggccgcccgggcggcgtcgttgagcttgcccccctccaggcgggggtctacaaaggtgcccaggcccacatgggtaattacgccgggctttcccgcggcaatgtcccggaaaagctgggcgatcaccccctggggcaggttgtagccggccagcttgttttccgcgcacagccggcccagcttgggggagagcccccagtggccgccgatcaccctgcggcaaaggccctccacccccaggtggttcaggccgcggctgtcgctgtcgccctgaccggcggcgtacaaggcggtcaggccgtggggcccctcgccgtttcgcgcccgctcctccagcgctctgagaatggactccggatgcatcaggccgctggcgaagccgccgaaggtgacggtgtctccgtcgtggatgtactggcgcacggcatcgtgcgccgacaggattttgggcatatctgcactccctttccgctcaccattcctccccggaaggaggcggcacgggttcggctggtctgcggcccgcgccgttgcagaaagtatacggcataggaagtacatctgtaaaatgaacaatttgataggctgcattccaaaatcagaatagattgcacattattgtagaacttttattgctatatttgtggcatatccacagtatcatgccttttgcgtatggacgaatgcacgggggggaatgttgtgtttcatttttaacaatttcacagtagaaactttgtgcggctttttctggaaatttttttattcttcgattatgatagggacagcatcaccgaggacatggaggtagctatggatattcagcacttgaaatattttgttgaagtggtccggcaggagagctttacccgcgcagccgcccagctttttgtgacacagcccatgctgacccgttccatcaagcaactggaggaatcgctgaatgttctgctcattgaacgcaccagcaagagctttcgcctgaccgatgcgggacggatcctgtacgagcgggcccaggagtttctcatgcagtatgaggcgatcttccagaccatggcggacgtgcgctcggtcaagaccggagaggtacggctgagtattcccggggtgctgctggacatgtattttcccgagctgtttgccagctttcaccggcaataccccggcatcgacatcagcctggtggaggagggctccaagctcaccgccgcctcggtgggattgggaaaggcggatctgggactggtcatgctcccggtggaggagccgtcccgctttgaaagccaccttctggtcagcgatgtgtgtcagcttgtggtgagccgggagcatccctttgcccagatgcccggcgtacatatccgtgagctgagaggggagaccattctgaccttcagtgaaacggccaccctgcacgacacctttattcagatgtgcggcgagcagggctttgccccccgcattgcctataaaagcctgatgcctggcttcagtttcaagatggtggccatgcagcagtgcatcgccttgctgcccctgccgctgatcctccacgggatgtgcgacaagcttgtcaccgtgcccctggagccgcgcatcgtgtgggatattgccatcatccgcaggagacagggctatcactcctttgccgccgcacagttgttcgaccatattcgcgcccactttgcagagcggaagcccttaatggaaaaggccggcccgtcgtgagacgggccggcctttaggcggttattaagccttccctctaaggttttcgaagggaaggatagtgtgaaagggaaccgtcagggttccctttcacgtgggatcaaacaactttttgaaactcgtttagagtttcaaaaagttcagcagcctgtcgaaaagaggtttcgacaggctgaggtcggcccgtcgtgagactggccggcctttaggcggttaataagccttcctgctaaggttttcgaagggaaggatagtgtgaaagggaaccgtcagggttccctttcgcgtgggatcaaacaactttttggaactcgtttagagtctcaaaaagttcagcagcctgtcgaaaagaggtttcgacaggctgaggccggcccgtcgtgagacgggccggccttttccggtgaggacagttgaaatcagaattgatacacgccgtcggcggtctgggtaaactccgcctggaagaaggcggcgcaggcccgggccatgtactccggatcccggctgcccgccgtctccacggcggagtgcatggcaagctgggccatgccgatgtccaccatgggaatgctgacctggtggcccagcaggttgcccagggtggagccgcccggctcgtcggcccggttggcgaacacctgcaccggcaccccggccttctggcagatggcctggaagagcccggcggtgaggccggtggtggtgtacttctggttggccgagtacttgatcaccacgccgccgttggggtagaccttgttggccggatcggccttctcggggaagttggggtggacggcgtggccgttgtcggcggagaggagcaggctgcccgccagggcctggcggcgggcctgggcggagaggcccagcgcctccccgatgcgggtgagcacgtcggggaggaaggagctcatggccccctggcgggtgccgctgcccacctcctcgttgtcgaagaggcagtagagctgcccgaagcgctccgtgcccttcgcgctgaggaacccctccagggtggcgtaggcgcagcccagatcgtcaatgcggggggcctggaagaattcaccctccggcccgatgcgcaccggcgcctgccgggggcagagcaccaggtcggtggccaggatgtcccccacgtccacccccagctcctccgccagcagggcggtgagggaggggccgccgcccagggcgtagaggggctgcatgtccttctgggcgttgtagtcgtggccccggttcacgtcccgctgctggtggatggccaggctggggatggtgagcagatcccggtccagatagaccagacgcccctccacccctgccggggtgcgcaccaccgcccggcccgccacggtgaggggccggtccagccagctggcgcagttcatgccgccgtatccctccaccgccaggcggacgtagcgcttgtccccctccagcgcgtcgtttttcacatagaaggtgggcgagtcgctgtgggcggcggtcatgcgccagccctccggggtgccgccgggcaggcggaaggcgatcaggctgctctggttgcgggtggtgtagcagcactggccggaggagagcgcccagggggcgctctcctccaggcgggtaaagcccgccgcctccaaccgggcggccgcagcggcggccgcgtgataggggctggggctgtcctgaatatattccatcagcttgtcggttgtctgcatggcaaagcctcctttttccactattatagagcaggaggtggaaaaataaaaggttgacattgtctacctgctgtgttatgttacaggtagacaatgtctaccagatggaggtgatgaaatggacggagaactggtgcgcctgacgggaaccgagtgggcggtgctggactgcctctgggaggcgtccccccagaccatgacccaactggcccacaccctggccgggcgtgaggggtgggccaagggcaccaccaccaccgtgctcaagcggatgaccgaaaaggggttgctcacctgccagcagggggagcgggccaagtggtacgccccggcggtggagcgccgggccgcggtggtgagcgagacccgcagcttcctccggcgcatctgccgggagagcgtgagcatgctcacaaacgccgcggcggagccggagcgcctgagccgggaggagatcgacgccctctacgacgttttgaagggactggaggagaaggaacgtggctgagtggattctgacgtcgtccctgctgatcgtgattgtgctggccgtgcgggccctgttccgggggcggatgggcctgcggctgcggtacaccctgtggctgctggtgctcctgcgccttctggtgccgggcacggtgttccagaccggattgagcgtgctgaactatgtgcccctgccccagacggccgcggtgcaggccctgccgccccaggacggcggaagtccctccgccccggaggcggagcccatgcccgtccggccggagggggaggcggaaccccggccctccggcccggcggccgcgccggactccgcgcccgccgggggggcggactggaggggcgttctgaccgcggtgtggcagggcggcgcgggggtgctggccgccgccctgctggtgtgcaacctgcgcttttatctgcgcctgcggcggatgcggcgggcccaccccatcccgggggtggccgtgccggtctatgtggcccgcgggctgccctccccctgcctgtacggctttccccggcccgcggtctatctgaccccggcggcggccggcgaaccggagctgctgggccacgtcctgcgccatgagctgacccaccgccgccacggcgaccacatctgggcggtgctgcgggcggcggccctggccctccactggtacaaccccctggtctggctggccgccgttctgtccaggcgggacggggagctggcctgcgacgagggggccctccagggggcggatgaccgggagcgggcggcctacggccgtactctaatccggctggtgacggcccggccgtcggcgggcgagctgctgtgctgcgccaccaccatgaccgccgggtcatcgagcttaaaggagcggattgccatgattgcagggaagcccagaaccctggccgccgtcctggcggcggtggccctcctggcggggctggcggtggggtgcaccttcaccggcgggcggagcgacgcctgggagccgctctcggaggaggagctgacctacttcaacggagacggctttttcaacggggactacctgaacatccgcaaccagttcctcagctccacctatgccgcgccggaggagatcgacctgttccagctcttctactgcggcgacggggacgccgactacgccgccccaccggacggcgtcgacccggtggccctggaggcggccatgctggccgccgagggcggcgatgaccccgactgcccggccaccatcctgaccaccgcccagatggacgcggtgttggaggagtatctgggcctcaccctggcggagaccggccaggtggggctggaacactttacctatctgcccggcttcgatgtgtatttctactaccacggcgacaccaattaccgcggctccgtcgccttcaccggcggggagcggcgtggcgagctggtgcgcctcacctacgacgacaccttcatgggcgacggatataagcaggtcaccctgcgggagcgcggggagggctggcagttcgtgtccaacctagctgttcagacggaggagaaggttcccctggagagtgggctggccgccctgccggcggagctggcggacaaggttgtggtaaccgggccgggggatgtgacggagggcggttccggcgtgctggccacctattattacgcgccggactacaacaccgaatggggcggactgctcctccaggtggggcgctacagccaggtgggctttgagcagtcctattatagctgggagctgaccggcggctgttcctacctgggccggagcggggactggtactacgcctgccacagccccaccgatgtgaacttccatcccgaccactacggcgactaccatgatacagggacagccctgatggcgtggctggaggagctggccgccggcgccgggctcacccctatggaggaggatcccttctaccagcgggtcaccggccccctctcctatcccggcggggagcatgtgacggtgcgctactatccctattacggcctgtccggctatgaagaggcggcggacacggcctacaccctggtgctctcccagcccgcaacccagggggaggaggggatctggtgcgtagaccgctgggtggatcagaacggcacgcgctatctggtggtgccggagaccgatcagcccatggacgactattacgccgccctccaggatgcctgcgatgccggagatcggcccgatctgctggatccggtggcggtggctctggactttgaggaggactggagcggccgggatctgtcccccgacgcctttgtgctggagggtgcaagcgatctctcggagctcttcgacctgcctctggccatggtggagttggagaacggagtcggcggttaagaggccagggcagcagctgcccgcaaaaaatccaggcgcacgcccagaatgagggcgtgcgcctgtttcctttttaggagccggatggggcggcaaaggttacgccggtgtaataccagtcgatgatgaccgaaacgcgggcgcctgccgccgaggcaaaggtagtgatctggcacatggaccagagcttggtggcggggtcctgctggcggagccgcatccagtgagtttcctgggagttgtcgtagagaatatcgtcgattatctgggcagtggaaaaggatacgctgttccaggtctgagattcaatggtgctcccgtcgtagattgtggttcgccggaggtccaccagtacgggggccgcagtgtccgctgcccggaggctcagacgaatggcgctggtaccggcgttctgcacattgagaatcagcttgcccagggtgatttccctggcgctccccgtagatgacaaattcatgttatagacttcggggctcgcgcggaggttgggggaaaccacgtcggccccgctgccgtggaagcgcacacggtaagcggtgggggaactctcctccaccgtgatggtgggcgcggggccggtagcgccgatgtcacccttgacgccggtacttcccgtcggtccggttggcccctggggcagcacaaagtccagcgccacgccggtgtcggagggggtggcggtgacagcggcggtagagcccgaggttacattccgcaccgtgacggatggggtggctccggtcggcccggtgacaccctggctgccctggggtccggtcggcccggtgacaccctggctgccctggggtccggtcggcccggtgacgccctggatgccctgaggtccggtcggcccggtgacgccctggctgccctgaggtccggtcggcccggtgacaccctggctgccctgaggtccggtcggcccggtgacaccttggatgccctgaggtccggtcggcccagtgacgccctggataccctgaggtccggtcggcccggtgacgccctggatgccctgaggtccaatcggcccggtcggcccggtaagaccggtcaacccttgggggccggtggggccgacttctccggcagggccggttggtcccattggtccctgctcccccataggaccggggcagccgcgctctccctgaggaccctgtgggccggtttcaccctgtagaccctgttctcccataggaccttgttcaccaaccggaccgcgggctccgggatcaccctgttcccctttcggccccgtggggccggccggcccgggatcgcccctcggaccaaccggaccgcggtcgccttgcgggcccatagggcctggaactccacggattccctggggacccatgggccccggatctcctttcggcccggcgtcaccccgcacgccctgcggtccgcgggcgccgggcagcccggccataccgcggggcccgacaggcccaggacagcctggatcgccctttggaccacgtgggccctgcggaccccgctcaccggggatcccctgggggccctgcggcccgcgctgaaacagttcgtcatctgaggtatcacaggagcaggggcagccccttcctgtgtaataacatccataatagttcataagggtacactccatactggattgggcgcaatggccctgccttagactatgacgcagaggcgcagagagcaacacaggggggaaacgccaaccggcgtttcccccttgatcgtctgtttgaatgatccgggaagcagcgctgtgtccagccctggtctgcaaaaatacatcgtactgcgctcctttcagggcgaaagaccccgcttttccgactgctggtactgcctcggtgtcataccggtatatctgcgaaataccttaacaaaataactctgctcacaaaatcccaccaggtagcccacatcccctaccgtgagggcagggttaaggagaagtggcttgctctgttctacccggatctggttcagacagtaagtaaacgtgcaggagcgttcggcctgaaatttcctgctcaggtaggcgggagagcagcccacgtgccttgcaacctttgtcagtttgagtggtctggcgaaatggagcctcatgtaggcgaccgcctctgccaccaggtcactttccgtctgctttttcattcggattcccccagttcaccctgcaaaaatggacagccatacctgttaggaaaaccgcgctgactgcgccgaacaccgggtagatcagactgatgagttcaccgaagcccagcagagacgcgccccaggccaccagggagacagcgaaaaaccggaggaccctctcccgaccgtgcagctgtgttctgacggagagccgctccataccagccagaaagcaggaaaaggcggtgaccaccatggcgatcagcaggagcaaaagatagggaatgccgagtcctggggagatggctgtgaccaccgtcagcatgggaaattccgtctcggccgccccgggatagtggttcaggacaagcagaatcggcgcggccaccatgaaaagcatggtacagcccaggccaattccccttggagtgcaccttggtgggacctgccgccccaggggggccaggattgccacagcgctgaacatgttataggccgaaaatgccatagcggagggaagccacccaacaccgccctggaacgcaggcggcggacaggcaggcagcaggagcagggcccccgcccctaaccccaccgtacagagaaccagcgcgggggccgcaaaggaaaagatagagatcatcccccgcagccccgacagagagagggctgcgatcaacagagcaaagagcaatccgcatagccaggggggcagtccaaaggcctgatgaagcgccgcccccgtccccgctgtcatgatggttaccaccccgaacaggagcaggacagagaaaagagccaggagatgtctgagcgccgggcattgccaggggaccatcaggaaggacaactcatgccggccggtccgccggaccatggtaagcagaagcagccccgccccacccagcagcgcgatgctcaggcacagccccagccagcccaccgggccaaaccggccgaaaaactgccacatctccctgccggagacatagccggcccccagaaaacaccccgaaaaggcagccccaagctggcgtgcggaaatggtctgttccaaaggttcctccacaggtctccctccgtgctcaatatacgctttttcccagagccgactggatcagctcagaggcaagaatgccgctcttattggcggtatccaggaagggattgacctccaccatgtccatggagatcagcttcctgctctccgcaatggcctctgccgccagaaaggcttcacggggggtcaggccgttgtaaacaatcactcccgtgcccggcacagcctccggagtgatggcatccacatcaaagctgaggtggatgccatcggtgccctctccggcgatctggatggcccgctcaattaccgcgcccatcccgagcttgtcgatcatattgatcggaaacacagtgacccccgcttgcgccatacgctgccgctccaaatcgtcaatgtcccgtccgccgacctgcacgcagtgagccacgttaaccggcgccgctccctggccgaactccaccatacagtcaggtccgtaaccacagacagcggaaaagggcatcccgtgcatattgccggtgcatgtgctctcctcgctgttccagtcgccgtgggcatcgatccagatgacgccgatgttgccgctgtgcctcttcgagaccgccgcgatgctgccggcggcgatactgtggtcgccgcccaggataacggggaaacgcccctcctccagggtttccgtaacggagaggtacacccgccggttcacctctgacacctgttcatagtgcagcagcttttcccggctggcccctgtccggggagcgaggatatctcccctgtcccgtacgtggtggccctgccgctccagaccctccacaagccctccaaaccggatggcggctggtcccatgctggccccccgctgcgaggcaccccaatccgactgaacgccgatcaggtcgagtttccgtaacatatccgccactccctctccgcagagatctgcggctcagatgactttttccacataggggctggtaaatgccttgagcatgctgccgtaaccaagggtaaactgtatccggtcccccacttggtatacagtggtgcagtgggtcagatccagcagcaggtgatccgagcttccgcccaggatttctatctgcggatccctgggctgcaggctgtctgtgtccacatcctgccggcccaccgccacgatggcccggcgcatgatccccttatcctcataggtgggccggtgtccgaaagcatccacgccgatctcgcctaccgggagggagggcttttccttgatttcaatgacttccgcctccagctccagtgcgtcccccacggttcccgggattcttgtgccataagcagtgtcattgcccagcaggaaggactcgcccaggcgcagattattgatgccctccggcagattcccctgttcaatcagataaatggagctggaattcccgccggagaccatggggagccggatgtggaagcgctgctccagctttcgcgcaagccccaccagcagggagagattctcattcttcggaatgatggccccgtagcaggtgaggttggtgccaagcccatacaggcgtatgtgcttgagcaaaaggagctctgccaccgtggaaaagatctcctcttccttttcgtaaaagattccctctcggagatcgcccaggtcgatcatcagcaccacattatggcgcttgcccgcccgcccggcggcttcgtccagcagccggatggtggacagctccgactggaagctgacatccgcatactccaccacttcggatacctcgctgggcatggacaggcggagcagaaccgtctgcttaccggcctgacgcgcctgtgcggcataggatttcaggttctggatgcgggagtcggccagaaaatcaacccccggatgctccgtgagcatgcggacgatggggggataggcgcacacgcccttggtcacgatcataagggtgcagccgggaaccttttggattatgccggcgcaggcgtccaggttccggcgcagtctgtccatgtgaatacgcactctggggtacatggcttacgaactcgctccttcctgtgtagtgcggttggggcagtggaggcgggtacagcggctgcactcatggctgcaatcccctgctttcggcttgttctcccggtaggcgctcatatcatagcccatggcctcgcactcctcaatgtgccgctgtagctcctcttcccgctgctgccgctgggtctcaagccgggagagctccttgttgcagacgggtaccggctcctccgctttccgctccggaaaggtgatgcccaggctctgctccagcagccgggcggccgcctgggggtaccgcttggacagcacgcccagcgaggccataatgtagtcgtgatccaccaggatctgggcgtgctccccgggaagcagcagcatgcccgactcattacagcgggtgatctcccgcatgatctcctcacggtggggcagccgggtgagggcgcctccggtgcccacgatgtatttgacctgcgtcaaatccttgccctcggccaccgtgctgcgtccggaggggccgtagatataccgcagcctgccggcgtgccgctccgccgcctttaccacggcctctcgggtaagcagctccaccagcttcacttcttcctccgttttggggatggcccgataggtctccagggcatgctccatggaaaagccctgctcccggcactgctcccggagcttctcctcgccgatggactccaccaccttccagcggttgacatacacgcccagatccccttcaactgtgcgcttggccttcggctcgggtgaaatcatgaggcgggccacctggtcggactccaccgtgacggaatgcagatctgttgtcgctccgcccacgtccaaaacaatgaggtcgcccaggtattcatacaacagcttggtacattccatcaccgcgcccggcgtggggatgatggggcctgtcaccatctcccggacgtgctccatgcctggagcatgggtgatgttttgttcaaacgcatcctgaatgaccttccggcagggctctacgttcagcgcgtcgatcttggggtagacattctccacaatgtagagctgctccccctcctcctccgggaaaatcaggcgcatctcctcctgattctccacatttccggcgtagacgacggggattttcaggttcatggagcggatcatctccgcattggcgatcgccgtgtcccgttcgccgtagtccacgccgcctgcgatcagaatgaggttggggcgtatttccttgatcttggccaaatcagtccggcgcagccgtcccgccgtaacgtagtggagaatccctcccgcgcccagggccgcctccctggcggccttggccgtcatgtcgtataccaggccgtgtaccgtcatcttgaggccgccggcggcagaggatgtggccagcatctcgcggtactccagggactccgttcccagcttgccgcacaggtcggagactgcgctctgcaggccgatacgtacatctccgtccagtacagaagtgggggcctggccttggccgagatagaccggacgaccgccgtccaggccgtggaaagcgtttaccactgttgtggtggagccgatctccgctacaaggacatctactttcattactgtcaccgcctttctgctgcattggaaggcagcaaacatactacagatttgctttgcaaacaggcaaaccagggcagaaggccgcagcgcctctgcccctcggtttgcctgtttgcccgactcgtttcgttcggcgcgctgttgcgcgggacaggacgacattcagccgaatcagccgagcggattgatcctgccggtgcccacaaagtagatacaaataaccagaagtgccagaagggcgacaaaaacggccttatcaacctttgtctcgaatacttttagtcccttttccttttgtcccttggcatagacaaagataccgggcacataaagcaggacggttgccagcatgacgctgatgccggcggcaaagaccatccagaccgcgtaaacagcgttgaaaataccaattcctttgatcagcccgttctcctgcttcagcgccaccttgcagaaatacattgcgctgaggaagtacggcaccatgatcatgccggtggcaaagaagtaaaatacctgataggtcgattcattgaaatagagcagaaccaggaatacctgcgcaatgatgctggtgaggacaatggcgaagacaggcgcgccatttttattggttcgggtaaacgccttgcagaacgcgccgctcttggccgcctcatatgggcactccgtgcacatgatggtgtggcccagcgtggcccccagcagggagataataacggcgatattcaccagggcagcgccccaggggcccaccacgtgctccaggataccggccatggggggattgcccagggcggccagctcctcattggtcatcacgccggcgctcaggaaggaaatgataatatagagaatcagtacggaaaggaagccgatcaccgtggcgcggcccacgtcgctggaacgcttggcgcggccggagattaccacggctccttcaatgccggtaaacgcccacactgtggtggtggtggtcgccatgacctgcttgccaaagctcattccgccctcgctgcccgagaagttctgcataaaggtctcgaaggagaaggcgcgggcaaaaataatgacgacgatcagcaccagaatggggataatttttgcgatggtggaaaccaggttgaccgcagtggactcctttgtgccgcggagcaccaggataatggcaatccaccataccacggacatgccaatgaccgacgggatgttgtttcctacaccgaacaggggcagaaattgtcctaccgaggcgaacagaagtgtcaaaaacgagatgtttgagagcagctcacttaaccaataaccccatgcggagttaaatcccacataagaaccaaagccggcgcgggcatagctgtaaacgccgcccttcagctcgggcttcagtttgtttaagtaataaaaggccaggcagagccccagcataccgatgccggttatcagccagcccaccagaacagcgccggaaccggccccggccgcagcaaagtcgcccgggaatgcaaataccgcacttgcgattgttgcgccgatgaccaggccaagcaatccgataaaggaaacgccgcctgctttgttcgtcgtttcttgactcatgaaggctcctcctaaatccaaaatcaggttggggaatggggttggggtccgttcatttcatttgactgcattttagacgaacctgaaacctatcctgccccggctccccttcaggccttcgccggggcatggatagatatggagcaatccagccgttcggggattgctttgagcttacagctcacctctccggcgcatggcctcctctgccaggaaggtggccacgtcgatcccgtgggaatcccggccgaagccctggtcaatgccggtcttgacggcctcatccgggatgacctgggtgccgccggcggcgatgatcacccggtcacggatgcccttttccaccgccagctcgttgatgcgcttcatattcttgtagtggacgttatcgtgggagatgatggtggaggccagaatggcgttggcgttcagctccaccgccgcgtccaccagcttttccaccgggacggaggtgcccaggtagtgaaccttgaccccccacttttcaatgccgccgtgcttgatattgataatctcccgcaggcccacggagtgctcatcctcgcctaccgtgccgcagaccaccaccatggggtgctcctcgaactctttgtaaagcacggcgtcactcagatggtggggctcgggggggacctccagcttggtgggatccacgtcgaaggtcagcttgcctttcatctcgatgcgggtaccctccgcctcctgaagaacctccttgctgatcacctcagggtgatccagacccagccgcttgccgatctccagggccgccgcctcggccacacgcttctcagcggggatacacatggtcagcaggatggtgccgtcggcgcaccactccacctcgggcttgatggcctctccgtccagatacttctttaccttgtccagacggacgtttacgttgtcctcctcatccagctcgtcgatgtagacgatcttgctgcggtcctcaaacgtgcagccgccaatcagggcggaggggttggccggatcgccgccgtactgctccacgttgttgtagccgtagtgggcagtgacgggggccatgtagtcctcggcccgctcaaagatgtagccgtagcccacgccgccctcaatcttgcgggcgatgccgtcgccgttgcgctcggggtacttggcggagtccacgaagaagccctcctgaacagcgttgaagtagccgccgacctccacgatctcctccatgaacaggcaggcgcgctccttgagctcacgggccatctcgcgcagggggccatcctttttgagctccaccatctccatcaggccgtccagaccgatgagggtctgcttggcgttgtcgatggcctcgatattgtagatgtgccaggggacgttgcggccctcgtcaggggtgatggtggactggatgtccgcgctggtcagctttgaaatgagcatgttcagcacatgggtcactgtcgcctcgcgggtggaggagcagatgtacttcgtgttctgctgggcccgcatcttgtagcgcccgcagatgtcccgcagcgccacggcgtagggcaggtcggtatagacgcagggggccggagtggccgtggggggcacggtggacaggctgatgttctccggcttcatgcccacccgctcggagaacagggaattgatggcatgctgcacgatcagctcaggcatgaccttccacgcctcccgggcggtggcgtttgcgttgtgggcgccatcaatctgcagcatcccggcccaggccataatggacttggactcgcaggcgtccacgaaggagcgcacgcagttgatgtcccggtagaggacgttgtactggggatcctggtgggcgccattgatgccttcctcggcaaacatgacggccacatcggggccagctacaccggagacataggagtgatagttgatggggcggcccacctcctcctcgatgagatccagcgccttacgctgtgcgcggacctgcttgcgggtgatgggaacgccgccgattccctggggggtgccctccatcaggccgtcgatatgggactggcccatatgccggatgaccatgatgtggtcggcgccgtgccaggcggccatgcgcatgcggcggatatcgtcctcaaagcggccggaggcaatctcggtcgtgatgaccggaagcggctgggggtcgatatcgccgaagtacttggccgggggaaggccgacgctctgcttcagcggctcggacacatcgtggtaggtaaaggggcccatctccaggttgggggcgggcttgcgccaggtccatccccggcgcttgggctcgtacttgtccagatccttgaggatgttgcgtacatccagcttttcgttgggcttcagggtcatctcagacatacttacttcccctccttgaacagcgcggcggcttcatcccagtacttcccctgggccagcaggtgtccggcctccggaatggagagattcttctccctggacagcttgtagacgacatggccggcaccgtggctcatcaggctgtgatccatacagccctccacaatcttctgggtttccagagaggagatgcccatccgcagcagcacggcacgctctaccgagggggtggtattcctgcggcccagctccagcagcggggcaaccacctgctcggtcagcgcccagaagcggtcatacagctcctggtcggtcagattggcgatatgctttcttctctcagcaaaatcatcggcacgcttcatggatgtcacgctcctctctcaaagtgtgggcacgatggcggccacctgctccctgacccaatccacgctcttgttggtctcctgggccaggaactcatagtccgcctcggtgggggtggccgtataggtctttagggccgttttgatgagggaatggcgcatcttgtccagatccagatccctgacctggaactgatagggatcggcgggcaggatcacgctgacgccgggcacctcctcgccgggcttgccaaagcgcacctcgatgccgttctcccgggcaaagtccagctggggctgcacatgcttgcccgcgccggtgtactcggtctcgctgactaccaggatctgatcctccggcagctcctgagccaggcagaaggccgcggccagagaggtatttccggcggggccgcgctccaggccctccaggtttgccagcagctcggtgatgcacataacttcgccctgcgtcacggtgacatagcgatccatatagcgcaggggacgggcggcagaacggggcacgtcggagcggtccggccagttggcaaacgggacgccgaagccggtgtggccggtggtacaggacttccggttgaactgggtgtcagaggccatgtgcaggccggtcagatcaattgaggcggccacgatctgcgtatggccggcccccgccttccgcaggccccgggcggtgccggtaaccatgccgccgccggcattggtgcacacaaccatgtcgggatccctgccgaactgggcgcggcactgaagggcaatctcatggcccagtgtttcgatgccggcgatgccaaagggggaatagagggaagcattgaagaagccggtgtcctccagcagggagagggactcatagaagagctcggggcccacggtgatctgcaccacctcggcccccatggcctcgcaggcccgggccttctcaatgatctcgggctggcccacctcccgggagtcgtaggcttcctggacgatgatgcacttgaggccctgcatcgcggcctgggaggccacggcggcgccgtagttgccggaggtcgcggcgatgacgcccttatagccgtgagccttggcaaaggccaccgcacaggcggcccggcgggccttaaaggagccggaggggttggtcatctcatccttcacacagatggtggcgccatagccgggcttggcgcacttgcgggccagggcggtcaggttccgcagcgtgaagagcggggtattgcccactccggtcagcccctgcacccgttctacctcctccatggagaaccccgtagaggacatcatcttctcgtagtcaaaggcgatggagccgctctcaaaggcggagaaatccatgcccagggccttcttcataatttcgcccttgcggctcatcacggaggcgtaatcctttgccagtgccatcacttatcacctccatacaggaatgctctgtaattgcggtcgatctgcaccagctcgggcacgcacttgccatagctgtgggtgtaataggggtcgacctccaccagcgtgccggtctccacccggtctgcggccgtggtgacctgcacctcgtctcccagattggcgtcggccgccaggaatccctttgtccacatcaccagcggggtatttctggtgtcctcaggatcctgaggggcacgctggcccactggaagcaggatcttcttaatccgtacccatgttcctttttgaaccatttcacagcttcctttctccgcgggtccggaggagaaagctcctccgggcccgtaaccgtttcaagtcgattggacggttccttacttcaccagcttgcagtcctcgtcgatcatatcccgcatgtcgcccatgatggcgtggggcacggggatgtcgaccatggttttcaggccgggacgggcgttgatcacgtgggggatgcagttcatgatcatggccatggtgccgattccgccctcgatctcgggagtattgaccatgttgaccgggggaatgccctgaatttccacatagtcgccggtatggatgcccacctgctcgggttcgatctgctgagggtggtccatttcgatcttcacctggccgtccacggtgccccagcccttcatggcaacgcccgccacatggccggcggcggcaaagccatagggggacttgcggtccacgtcggtgacgatgggctccatgtcctgctcgaatttatccagcttccagcccagagcgtcggtgatcatgcggatggactcggcaaagcccacgtggccggtcatggtgcccgcggccttccgcttctcaaattcggccacctccaggccgataccctgctcctccatgacggcggggccgaagggagacaggctgttcacccggcgggagacgatgtgatccacgctctcgcaggcgccggtccacaggatgaccagcagatccatgataaggccggggttgatgccggtgcccagcacggtgacgccgttcctcctggcgatctcgtccagcttggccgccagctcaggctcctgggcctggggataagccatctcctcggcggaggtgatgacgttcatgccccgctccataacaaacaccagtttgtcatagacatcacgggtaaaggagttggtgcacaccaccacgatatcggcggcgccgggccggatgacctcctcggcggtgcccacgatcacgtcctcgcggtcgccgcgctcaataccgggcaccacgtcatacaggctcttgcccagcttggcgccgatgtcgatggcgcccacaatatccacgccctgctttttgcagagcatcttgccgatgccgccgcccatggcgcccagtccccagagaattaccttcacatttttcatgctgcattcatcctttccgttacaggtcgtgtggttcaggttctgtgtcctgtctgcggatagaaaaagcaaagggtgtgccagtttttccggcgcaccctttgatctgtataatatttcaattaaattcttatattttccatttatatggacaattagccggggtttagaggacatccacaaaattttattctgaaacggcctgtgagctgctctggcaaacatgcaccaaaataggttgacaaggcgcaaaaaaatgggcattgtgcccacttttttgcgccccccaagaagccgttaataaagaattccatattttttcagcttgtgctgaagggtctgccgcttcatatgcagacaggttgcgcactgggatacgttcccccggcagcggtcgaacatggtgcgtatcgtttcctcctcaatgcgctcgatataatcctgcagggactcgcccgcctgaaagtctgtgccacgccggtccacggccttgccgggcgcgggcaggtccaggagctctgttgtaaagccgctgtccccatccatcatgaacatggcctggatcaggatgttctccaattcccggacgtttcccgggtagtcgtattccatgagctggcgcagcacatcccgcggcagctccgacaggcgctttcccatcttcgcatggtgcttttcaatcagcgcctgggccagataggggatatcgcccctgcgttcccgcaggggcggaatattcagggtgaccacgctgaggcggtagtacaggtcctgacggagttttccctggcggatcaggtcgacagggtcttcatttacagtagtgattacccggacatccaccgggatatcctctgagcccccaacccgccggatgtaggactcctgcaagacccggagcagcttgctctggagctcatagggcatggagttcagctcatccagcaggagcgtaccgtggttggccagctcaaacaggcccgcccggtccaccgctccggtgaacccgcccttggcggtgccgaacagaagcccctccagcaggttgctgggcagggccgcgcagttctgcgcaataaagggcttcccgctccgcgttccaccgtagtggatgctctgggcgaacagctcctttcccgtgcccgtctccccgtagatcagcaccggcatgtcgttttgcgccgcccgcttggcccgctccatgctcttctggaacttgggatcacgcccgatcagatcggaaaagtgatagcgtttgagcttctgtttttcggatgtctcctgcgtccccacctgactttgcagatgggccagccggtcgcacagctccgacagctgagttacgtcattggctacctcgatcacggcgagcagcttcccgtcggcatctttgaccggaatggtagtattaatggtgtgaatatatttgccgctggcgttgatgtaccgctgcggctgattgacggtggatgccccggcctggagcgcacggtaaatcgtactggactccagatccatgtgagaaaacgcatcctcaaaacgccggccgaccacatctgccggctccatctgttccatcctggccataacggaattgtaaaaaatggaggtcccctgcccggccacaatatgaaccccttcattcaaaaggcctaagagcgccgacaggatctccttatattcattttcacgcactatgatatctcccagtacacgctgtgcctctcttttgcgagagcccgtaaaagtaatcaaagctaatataacatataaagtcacagaatttcaacgtaagattttgaccacttgaaaaacccggctggaggcagatgacgcttaagaccacaccgtgcgggcagccataactcggaggcaaaagaggatagtatgtgcagcagccggaaaatccgctccggatttgatgccggcgggcaattttatttggtctaatcaaataacttttttagctgttacaaattcttttcactctggattgggcagggaaaacaccgtatcctctatggacaatgatgacagtcaaaatagaaagaaacctgtctttgaccgaagtcaaaaacaggtttcttcgccgggtgatggctacaaaaaagatgcagtggttgcaggtctgcaccaaaaaccaaatcgcaacccagcaaagcggttgcggtttggaaaggagccgcggacgatatgacgtccgcggcgacatgtcctgtgttgataaaaaatgcattttgataagggcttgggattaaggttgattctataaagaaaaccgtttgaattcctcaagtgtcgcttcaagtatctgtctgttttcgtgctcaggctttaaatactgttgcatttcttcaaatatctgatcgagattttgcaggtctgagtctgtatatattaaagtaaaaatattaaactttcggtaatattctttgtgcttctgcatctctttttcaaaattggctctggcctctaaattgatttctttttgatttttttcctttgtcctggataagtacccatgtgttgaccagggagaaaattcaaatccctgtttctacaatgtatagggattaataatcgtgaaatccaaccgatacctgtgctgtgtctgaagaccgccatatcgcaattctgggatcaagagcggaatttcgtatggctgcttgctgcttaacaccaactcgcaatactttttggcaatctccatttcatagggtgatctcgtttgtcgaaccataatattttgaaaaaataccaggtattgttctatcgtaaaaaactctattctttgcggtgaatggggaacgacaagtcctgtctccaggacatgtccgatggtccagtagtttggtttaaaatgtcgaatttcactgacatcgttttcccattctccatttttaaaacgaggggtgatgagaagtccgtagcttgcatttgtttgcccaatccaaagtgctgcttcttcctttttagggcgttttttgccaaggcatcgcagttgcgccaatatgtgcgctttaaaaaaagagtcacatattctaagagttccggatcacttgtcagttgatgctgaaacttatacgccgccctggatgcctcttttcccgcatcgacggtctttatgtggtttataagccccttgaaccaacgggcggcaaattcctcaggtgagcttatcacgtcatctgtaacattaagatacgtcgtgtgcttccctccgatttttgcgtggagggataattgctgagatttgaagtcatctggattgtctttgctgaaggcatggcgccgcaagatactaggaagcagtgcgtccagttgacatgttagctgcgcaatctgttcttttttctgtcgcgcaaaccactgctttcctgtcataacagccaccctttacacatttttctcccagagtattgctgtaattatatcaagtattcctattttatacaactcaatattaatctcatgtggttatgacacaggggggcagatcccaaaaatcttccattttgtatctcgatttcagctcgtttgcactttcatgcctcatctccgaagtgaatacagaaatagctgaaagtcctgtcatgataaggctttcagctatacccccctatccgccagtctcatgtaaactgttcgaattgggtgggggcattcaaaaaccttggcgcaggcggaattcacttccgccgggtatgtgaagtcctcacggtattcataaaaataaccacaccgaaaggtctggttatttttatgcaaataacggttaaaaccgatatttctgcaaaatcgaaaaacgccgcagagcggcgatcccaaatcacaacccagcgcagcggttgtgatttgggaaggaggagcagcaaaataaatgcgctctgactttttaaaaaagtcggagcaaacgatttgacgtttgctccgacgtggtctgagtgtcatgaaaggatctgtggaaaatacagtaatatcaatggtttgtaagcgggaagcaaggagttttatccaatcaaatcatataatcggaaatatcctccgcctttttccctttttctaatgcatcaaactgcgccttgatttgctcattccgtttaacattcatgccattaggaagatatttaaggtcctcttccttgatgtcgatctctgcaatatcgtttttctcaccgtattgcgggaaattgaccagccaataaccgtctacttcttgttcataacagatccaaccctgcattcctttgtgtacgccttcccgggcatagctttctttttccacaatcacttcaacacaatccatcatctgcattttattcacctccgtacggtgttgtcagtcgtatctcgccggtaggctcaaccatccaacctgatataaacgatactgttccatcgccatttcttctcgggatttcaattctgatacttattctttgacctgcgaaatttaaccttcccaattcataatttccagatacatacttttcccttgcctgtcgttctattttttttgcagccaaaatgcatccacaactgtatagccccattcatgaaacagtttatctttcccgtgtggatgttcacctctggtattaaacaaatatgggtcaaatttgctgtatgcgctatgtgctgcagcgttgctgacaacaatggtataaggaatcgggtctaatgtgcagtgacagtatggatggtgcggacaaagcggagctttttccttctgaaaccaacagtcatccagcctcaagcattcctcacagtgagttttgccctctgaatggtgcgttcatttgacccagcttggtagtcctgcactcttttgtattgtgccgaaatatcgcttatagtacaacagttattcccccttaaaagtacaagaaaattatttttcataatatagggggaaacaggcaaaaagctgcatgtttctgtacaactttttttagaataattttagaaataaaaaaatcggagtatcccggaggatactccgatggtgcgggcggcgggagtcgaacccgcacaccatgaaggtaacggaacctaaatccgtcgagtctgccagttccaccacgcccgcatgataactcagtatactattcccgtgcaaaattgtcaattgcactctgcggagcgggcagttataatagagaagaacgtaaaccgcaagggggaaaccgaccatgaaacgtgctccacggattgccgcgattcaggatatctccggctttggccgctgctccaccacggtggtgctgccggtattggccgccatgggcggggaatgctgcccgctgcttaccgcctgcctctccgcccacaccgcgtttccggccagcgagaaggccacctttctggatctgaccggccagatggcggggacggcggcccactgggcggagctgggggtgacctttgacgccatctacagcggctttctgggctctgccgggcagatcgggctgatagaggacttctaccgccagttccgccgggaggggacgctggtgttggtggacccggtgatgggggaccacgggaagccctaccgcacctacacgccggagctgtgcgggcgtatgcgggatctggcggcccaggcggacgtgatcacccccaacctgaccgagggggcgctgctgctggaggaggactacgccgatctgccccgggacgaggaggggctgcgggcgtggctggagcggctgagcctggatgggcggcgctcggtggtactcaccggggtgagcctccggccgggcgccatcggcgcgggctgcttcgaccgggccacagggcgcatccgttttgctatggccaggcaggagccggcccagttccccggaaccggcgatcttttcgccagcgtggtgctgggggcgatgctccggggggagccgctggagacagcggcccagcgggcggcggagtttgtccagcggtgcgcagcccacaccctggcgctgggcaccccggttctggagggggtccagttcgagccgctgctgggagagctgatgcagagataagggaatccccatgccgccgtacttcggcggcatggggatttgtctattgggcggactggtccaggcgggtgagcaggcgctccagacggacggcctgctccagggtgcagtactccaccgggcggccttccaccagatccaaaaacgccgcggcctgccgcgcaaagcggagcccgggcggctcggcgaggtgctccgaacacgcctcccccttcggggcgtagggaccgtccggggctttgggccagtaagtgaggacgccttcctccacactggcgcggagaagcccgccctcgccggagatgcacaggtggatgccgtccagccctacccggctgacggagacgctgcacagcgccccaccggtcccccggccgcagaacacgaaggcgtcgtcgttctccacacaggtgtttccctgaccgtccggacggcgggtggggaggaaggtgccgccgtagccggcggcctcggccagctccacgcccgctgcatattggagcaggtccagcaggtggctgccgaagtcgcccagagcgccgctgccggaggcggagcggcgcatccgccactccagagggaccgcgggatcggctaggcgggtgccgccctggctggcctgggccagatagacccgtcccatccgctggcggaggagcgcgcgcagccgctccaccacggcggtatagcggtagacataggccaccatcaccctggcgccccgccgggccagcagccgctccgcctgccccggcggggcggtctggagccccaggggtttttccagaagcacggccttgccccgctccaccgcgcgctcggtatagggcaggtggaactggttgggagtgcagagcaccactgcgtccaccacgtccagcagctcctccaggcgggtggtcatccgtaccccgtcaagcccgtgccggatacacagccgccggcagccctccagggtgcggctgcatacggcggtgacggtacagcgccccgcctgggccagaaagccctccacgtgccggtcggcgatggccaccgtggtgcccgcgccgacgattccaatccgaattcccatacgtccgctccttttttcagcttcactccatcatagcacggagcgggacgtttgcaaagcggtttcagcgcaggcggaacaggcggcgcaggtggatgccctgagcctggagggcggccaggtagagcacgccgccgaacagcaggcaggccagggcggcggggagagcctccaggccggcgcggcggagcacctggaacagaaggttgatcaccagccccatgagcagggcggagagggcgggggcggtgcaccactgaaaaatctgggcccgcaggccggtggcccggcggacggcccaccagttgaggagtacccccagggcggcggaggcgagaaagcccgccacatagcccctgagtcccacgccgggcaggcccatgaggaagaaggtacagccgagctgcaccacgccgcagaggatggagttgcgggcggcggcccccggacggcccacgccgttgagggcggaggcgaggacggactggtagcaggacaggagcaccccgacggacagggggagaatagagcggcccacggtgggttcccggaacagggcggcgcccagggtggggcccagcaccaccagaaaggccatggcggggaggatcagcaccgaggtggccagcatggagcggtctacccggtgctgcaccagaccccgctgccccagggcggcgccttcagccagcttgggcaccagcaccaggcccagcgccccgatgaaggcggtgggcaggcagagcatgggcagggtcatgccgcacagcacgccgaaggcgctcatggcctccgagacctccgcccccgcgtggaccagccgctgggggatgagcacagaggtggccgagcccatcaggttgcccagcaggctggtcagcccgatggggacagcgatggaggcgatgcggcggttgagttgccggtgctccagcggcgcgccggtcaggccgcccgcccggttcagatgccgccgggccagcaggagcagggtaacggcggagaacagctcgcacaggatcatgccggtgacaatcagccccaccgtccgctccgggttctgggggagaaagaccaccagcagccccagcaccgctccggtgcggatgaactgttcacacagctccaccgccgccggcggacggatgttgcccgtgccatagaagaagtgcttgtgcaggttttccaccccggtgagcaggatgcagggcagcaggagcagcaggcccaactgggtgcgggcgtcccccagcagatagaccgagatggggtcgtagagcaggaccaccaccgcagccaccgccgcaaagaggaggagaaacaccgccaggcagcggcggagcacctgggcgatggcggcccggttgcccctggcgtgatactgggaggagaggttggacactgccaccgtcagacccacggcggtgagggccatgatgacggagaacaccggcatgatgagctggtacagccccatgacctccgcgccgatcagccgggagagcaggatgcggtacacgaacccgagaaattgggagacgatactggtgcccgtgaggatcagggtaccgtagagcatagaggtacggtcgagtttcaaggcgcaccctcctttccctaaaccctattcaccacgggttgtcccccatacgcgggaaaatctttgacaaaacggccgcaagcgcgtatgataaatccattcatactttgtagtatggaagaaagggccaaccgtggcggccaaagtgatccatgtgccctgatgttccccagcagcgcgccggctctcctgttcaaacactgcgggagggcaccgggcccagcataccgggccttccacatgggcaatggataccgccccatgttcctgtccctggccgatctgcctgtgcgggatgcgctgccgggctgcgggtatgagtggagaccgcccggctggtctgccatgaaaaaccggccggtttgctgattatcctgagagatctggagtggccttttcctgatttatgcatcctgaccacaaattttgataaaaaaataacgcttttttcttgcatttcacttgcctgttggcgtggaaagcagtatacttattaggaaggtttgtgttaaaaaaataacgattataatcgcaggctttgatattggattaaggaggcagaacaaatgggatttgtgaagctggaaaagcagggccatgtgggcatcgtgacgatcgaccgtcaggaggccctgaacgccctgaacagccaggttctgagcgatctggacgcggttatcgaccaggtggcggcggacgatgagatctatgtgatgattctgaccggcgcgggccgctcctttgtggcgggagccgacatcggtgagatgaagggcttctcctcgatcgacggcaagaagttcggcgtgcacggcggcggcgtgttcctcaagctggagaacctgtccaagcccgtgattgcggcggtaaacggcttcgccctgggcggcggctgtgagctgagcatggcctgcgacatccgactggccagcgagaaggcccggttcggccagcccgaggtgggcctgggcattactcccggcttcggcggcacccagcggctgccccgcatcgtgggcgtcagcaaggctatggagctgattctgacggccaagaccatcaaggccgacgaggccaaggccatcggcctggtcagcgaggtctaccccgccgaggagctgatggataaggccatggagctggccaacgcgatctgcgccaacgcccagatcgccgtgtgcgaatccaagcgctgcatccgcatgggcatgcagaccgacatccacaccggctccgctttcgaggccgaggccttcggcgttacctgcggcaccgaggacaagaacgagggcatgggcgcgttcctggagaagcgggctgagaagcacttccagaaccggtaaacggtacatatgacgcctgtcatcgcaaacctgtccgaccaggtatggaatgttctgatcaaaccaatagaaaagaggttttttactatgaagaagattgtggtcatcggcggcggtaccatggggctggacatcgcccaggtatttgcccgcaacggctatgacgttgtggtgcgcgacatcaaggacgagatcatccaggccagcgaggcccggctgaacaagggcctggataagctggtgagcaagggcaagctggacgaggccaagaaggctgagatcctgtcccacatgagcttcaccaccgagctggccgccgctgccgatgccgatctggtggtggaggccgccatcgagaacctggacatcaagaagagcatcttcgcggagctggacagcctctgcaagccggagaccatcctggcctccaacacgtcctccatctccatcaccgccatcgcggcggccaccaagcgggccgacaagttcatcggcatgcacttctttaaccccgccaccgtcatgaagctggtggaggtcatccggggcgcccacacctccgatgagacctacaagaccattgccgagctggccgccgccatcggcaaggagcccgttgaagtcaatgaggcccccggctttgtggtgaacaagattctggttcccatgatcaacgagggcatcgacctggtctacaccggcgtggccagtgtggagggtgtggacaccgccatgaagctgggcgccaaccaccccatgggccccctggccctgggcgatctgatcggcctggacgtatgcctggccatcatggacaccctgtacgacgagacccacgatcccaagtaccgcgcctccctactgctgcgcaagatggtccgcgccggcaagctgggccgtaagaccggcatcggcttctacgactactccaaaaagtaaacagggcagacgcagttccctatgcgagcaacgacgggcgggagcccctgactcccgcccgcccgttctgaaatataaatcttaggaggaaggcaacaaatggatctgcacctttccagagagcaggaaatgctccgcaagatgtaccgtgacttcgccgaaaatgaagtcaagcccctggccgagtgggtggacgagaacgaggcgttccccgaggagaccgtcaagaagatggccaagctggggatgatgggcatctatttccccaaggagtacggcggcgccggcgcggacgttctgtcctatgtcatggccgtcgaggagatgagcaaggtctgcggcaccaccggcgttatcatctccgcccacacctccctgtgctgcgctcccatctatgagaacggcaccgaggagcagaagaagtattacctgcccaagctgtgctccggcgagtggatcggcgcgttcggcctgaccgagcccggcgccggcaccgacgcccagggccagcagaccaccgccgtgctggacgagaagggggagaactggatcctcaacggctccaagatcttcatcaccaacgccggctacgccaacgtgttcgtgatctttgccatcaccggcgttaccaccgacaagcgcggccgcaagaagaaggagatctccgccttcatcgtggagcgcaccgaccccggcttctccgtgggcaagcacgagaagaagatgggcatcaagggctcctccacctgtgagctgattatggaggactgcattatccccaaggaccgcctgctgggcaagcagggcaagggcttcggtatcgccatgaagaccctggacggcggccgtatcggtattgcctcccaggccctgggtctggccgagggagccatcgaggagaccatcaagtacaccaaggagcgcgtccagttcggccggcgcatctcccagttccagaacacccagttccagctggctgacatgcacgccaagaccgaggcggccaagtggctggtgtactccgcggccatgaagaaggagaaccatgagccctacactgtggacgccgctatggccaagctggtggcggctgagacggccagcgacgtgacccgccgctgcgtgcagctgttcggcggctatggctacacccgtgagtaccccatggagcgcatgatgcgcgacgcgaagatcaccgagatctacgagggtaccagcgaggtgcagcgcatggtcatctccgccaacctgggcgtgaactaaaggaactggagggaaaattacgatatgaaatgcatcgtttgtgtcaagcaggtacctgatacctccggcgtggtggcggtgaaggaagacggcaccatggaccgcgcggccatggccaccatcaccaaccacgacgacctggctgcggttgaggccgcgctgcgcatcaaggacgccaccggctgcaaggtggttgtggtctccatgggccctcctcccgccgaggggatgctgcgtgagctgctggccatgggctgcgatgaggccgtgctggtctccgcccgcgagttcggcggttccgatacttacgccacctctcagattctcgccgccgccatcaagaaggtgggcgtggacgaggacgacatcgtgttctgcggccgccaggccatcgacggcgacaccgcccaggtgggcccccagatcgccgagaagctgcacctgccccaggtctcctatgtggcggagatcgcggtggagaacaaggccgtcaccgtgaagcgtctgctggaggacggctacatgaccatcaaggttcagacgccctgcctgctgacctgcgtgaaggagctgaacgacgcccgctacatgagcgtgggcggcatcatggagtgctacaacaagcctctggagatctacaactacgagactctgaaggacgatcccctcatcgacgtggataccatcggcctgaaaggctctcccacgaatgtgtacaagtccttctctcccccggtgaagggcgccggtatgatgatggagggcgccgacaaggcgaccgtcgagaagctggtctccatcctcaacgacaagcacatcatctgatagagtgaaaggagagcaacacaatggcttttgatagtaaggataccgccgccttcaagggcgtatgggttttctgtgagcagcgcgagggcgtgattatgtccaccagctaccagctcctctccgagggccgcaagctggccaacgacctgggcgtggagctgtgcggcgtggtgctgggcaaggacatcaaggaggactacctgaaggccctgggcggctacggcgccgacaaggtgtactactgcaaccacgagctgctggatgtctacaccaccgacgcctacaccaaggtcatctgtgacctggtggaggacaagaagcccgagatcttcctcatcggcgccaccaacatcggccgtgacctgggcccccgctgcgcggcccgcctgcacaccggcctgaccgccgactgcacccacctggacgtggacgtggagaagtacaaggccttcctgaagaccacctccaccatcgacgtggacaacaccaagttcgaggagaacaccaacctgaagatgacccgtccggccttcggcggtcacctgatggccaccatcatctgcccccgtttccgtccccagatgtccaccgtgcgtcccggcgtcatgcagacccagccctatgacgaggccggcgccgcgaagacggagatcgtcaacgtggacgtgaagctggacaagtccgacatccatgtggatgtgctggaggtcaagaaggccgccaagaagctggtcgatctgatcggcgccgacgtggtggtttccgtgggccgcggcatcagcaaggacgtcgagggcggcatcaagctggctgaggagctggcgggcgtcctgggcggcgtcgtgggctcctcccgcgcctgtgtcgacgcgggctggatctccgccgaccaccaggtgggccagaccggcaagaccgtgcacccccgcatctatgtggccctgggcatctccggcgccatccagcacctggctggcatgcaggactccgagtgcatcatcgcggtgaacaagaacgagtccgcccccatcttcgacgtggcttcttacggcatcgtgggcgacctctacaaggtcacccccatgctcatcgaggccatccgcgccgccaaggccgcgaagtaagaggcacattgcgccaccaatacagcggaggccctccccggagggcctccgctttctatcacagcgggggaggggttccatagcggagcggaacgcaaaactgattctcatggtgggtgtgctgggcgtctccgcctcggccattctggtgcggttttcccaggcgccgtccggggtgaccgcagcctaccgcctgggctggacggtgctcctgttgcttccggtagtgctcctgcggtgccgtgcggaactgaggcgggtgacggcgcgggatttggtcctgtgcggggccagcggcgttctgcttgcactccacttcctcacatggtttgagtcccttaagcgtaccagcgtggcctcctccacggtgctggtgagcaccgaggtgattttcaccgccctgggcttcgccctgttcctgcatggaaaaatcccacggctgggggtgtgggccattctcctggcctttgggggcagcgccctgctggccctctccggaggcggcggggcaggggagctgtccggcaacctgctggccctggctgcggcctcggccgccgccgtctataccctcatcggacggatacagcggggccatctgtctaccacggtctacacctttctgacctatctggcctgctttctcaccctgctgttgggcaccgccgcggcggggacgcccctgacgggctacggcggccgggagtggctcatcggtctggcgttggcggtgctgtgcactctcctgggacacagcctgtttagctggtgcctcaagtacctgtccccatcctacgtgtccgccgcaaagctgtgtgagccggtcttctcctccctggcggccatccctctgttcggagaggtgcccggtccactccagcttgccggaggcgcggcggtgctgggagctgtcctcctctacacctgggcggagcgtgaaaaaactcctgccggatgagtccggcaggagttttttcagtcgttaggcgccgagggcggccacgataaagggcttgaacttgtcccagtagcccatgatgaagatgatgagcacaatgacgggcaggacgtacttgaagtagaggcggaactgggcggggaagcggacgcctctgccctggtttgcttcctccaggaagtggtcgtagccccagccgtactttttggatacacagcagaacagcaggtagatcatggagccgatggggagcaggttgttgctcaccaggaaatcctcccagtccataatgcccatgcccagggccttcacgccgctccacaggttgttgcccagcagacagggcaggctcagcaggaagatgagcaccagattggccagtaccgccctgccacgggagataccgaagcggtccatccagcaggcgaggatattctcaaacacggcggttacggtggacagggcggcaaagaacaggaaaacgaaaaacagcgcgccccagagctggccgcccggcatggcgttgaacacattgggcagggtcacaaagatcaggctggggccctggccggggttgacgccgaaagcgaaggcagaggggaagatgatcaggccggagacaaaggcaacgcaggtgtccagaacgcccacgttgatggcctcgccgaacaggcggcgctccttgccgatgtagctgccgaaaatggccatggcgccgatacccaggctgagggtgaagaaggcctgtcccatggcgtcatagatggcgcggaacagccgaaagttgccgtcggcatcgtacatcaggttgtggaagttgggcaccaggtagaacttcacgccctccatggcaccgggaagggtgagggcgcggacggccagcactaccagcagggccagcaggcagagcatcatggccttgttgaccttctccacgccgtttttcaggccgcggctgcagatcagcatacccagcaccaccacgatgcccatgaacagaagctgaattcctacgttgccctgcatggcgccgaaagcggtttccacaccggcggcatccaggccccggaattcgccggcagccaccttgaagaagtaaagcagcagccagccggcgatggtggtgtagaacatcatcagcaggtaattgcccgccatgccgaaccagccgtaccagtgccacttgctccccttgggctccaggacctgaaaggaggccaggatgctcttccggctggcccggcccacggaaaactccatggccatgatgggcaggcccatgatgaccaggaacagcagatagatcagcacaaaggccgcgccgccgtactgccccacgatgtaggggaaccgccagacgttgcccaggccgatggcgcacccggcggagatgagcacaaagcccagccgggacgcaaaggtctctctctctttcacaattgcataccctccttggatcagccgccacacgcgcggcattacacacataatagcggattttggaaggtatgtcaatcaaaagcggcgcgtaacccttgtgtcatggcggaacgggtacttttaaagccaatcaagaaccacgtcccgcagggtgacgggggagacgcagttgcgccggaggagctccagaagctggtcaatgcgctccacgctgaccgtgatgttgggcaccgatgcctcctctccgtccggtcctgccaccttaactccatagctctcgcaggacaggccgccgcccagctccatctcgtccaccagaatgtaatactggaaggagtgtgcagtgccgtcctcctcttcccccgtacaggtatcgactaatagttccctcatcttgtatctgctcccttcttctttgatccgtaagaccattatattgtattttccagcatttgtaaaggagcgatcaccgcaggtttcgacacgggagggcggttatgtcacccgcagagaggacttctgtcaacgaaagcgcgaagaaggggagagaacggcgagaatggtcgaatttgagggagtgaatgtggaaagaaaagaggcgtccgccggcagcggacgcctctttgtggaaaaaaggggctaggagaggggaaaagccgcctccacggcctcggaaatggcctcggcaaaggtgggatgggggcgcaccgggcggagcagctgctccgccgtcagctccagcgtgaccgccaaggcgagctcggagatcagatcggtggcccggtaacagcacaactgagcccccagcagggcgcggctctcccggtgaaataccagcttgacaaagccccgctttcccccctcgatgagggtacgggcgttgccccccagcacacacttgccggcggcacaggggatgccccgggccctggcctcgtcggcggtgagtcccacctgggccagctctgggctggtgtagacgcaggcggggatgggggccactccgcggaggggggtgcggcccagcaggaggtcggccacaaagcgcccctccgcctccgccttgtgggccagcatggccccgccgatggcgtccccgatggcgtaaagggaggggatggaggtgcggaactgtccgtccacccggaggaacccccgctccagctccggcaggaggtccccggcaaagaggccgccggtggcgggccgccgcccggtggccaccagaacggcgtcggcctccagccggtacgcctccccccggtgggtgaaggcgacggcagggccgggggtggcgccggtgacgtcggctccggtgaacacctccaccccgtcctgcctgagctgcgcggccagactctggcccagctcccgctccagggtgggcaggaggcggggggccgcctccagaatggtgacgcgggcgcctgcggcggcccagacacacgccagctccaccccgatcactccgccgccgatgatggccagacggtccaggggacgcagatcggacagcaggccgtcgctggtgactacaccgggtgtgtccaggccggggatggggggcagggcgggctcggagcccgcggcgaccaggatgtgggccgcctcgtaggccgcgccccccgcctccaccgtgtgggggccggtgaccaccgcccggtaagggatgagctccaccccggcggcccggagctgcttctcctggccggcgcggagggtggacaccacccgctccacctctgcggccagggcgggccagtcacagccaggccccgccccgtggaggagggccttggtggggacgcacccccggttgaggcaggtgccccccacctggcggggctcaaagagggccacggacaggccgccctgcgcggcccggagggcggcggcgcagccgccgggccctccgccgatgacaatcagctcatacacggctcagtcctccgggaaggcgtaccgcaccaccgggcggcgggcggcggcggtctcgtcggggcggcccacaggcgtgctcgccggggcggcgtggagggcctccggctcctccttcgcccggcgcagaatctccgccagcaccgccgccgcctcgtccagcgtctcgggggactcggtctcggtgggctcgaacatcagcgcctcgtggacgatcagggggaaatacatggtgggcgggtggatgcctgcgtccagcatggccttggccacgtccagggcggatacccccgtctcctttttcagatcctccagggtgagcacaaactcgtgcatgcacaggccggggaaggcggcggtataccccgcctcctccagcttccttttgagatagttggcgttgagcaccgctgtgtgggcggcctcggccacgccggtgtttcccagccgcagcaggtaggccagggccttgacgaccaccaggaagttggcgtggaaggcccgcacctggccgatggagtgctctccgccgttgcggcacagggcggagccgggcaggaagggggccagaaaggccttgcaccccaccgggccgctgcccgggccgccgccgccgtggggggtggcgaaggtcttgtggaggttgaggtggcacacgtcgaagcccatgtcgcccggccgggccacccccatgatggcgttgaggttggccccatcgtagtagacgaggccaccggcggcgtggacgagggcggtgagctccaggatgtctttctcaaagagccccacggtattgggattggtgagcatcagccccgccgtgtcggggccgcaggcggcccgcagggcctccagatccaccagcccctcgggggtggaggggatgtttttgacggtgaagcccgccatggcggcggaggccgggttggtgccgtgggcggagtcgggcaccaggatcaccgtgcggcccgtgtccccccggctgtggtggtaggccttgatgagcagcaggcccaggaattccccatgggctccggcggcgggctggagggtgacggcatccatgccggtgatctcacagagcaggtgctctgtccggttcaggacggcctgagcgccctggacggtgtgggcgggctggagggggtgcagaccggtaaagccgggcagggcggcggcctcctcccccagcttggggttgtacttcatggtacaggagcccagtgggtagaagccgtcgcacacgccgaaggcccggcgggcgagggcctgatagtggcgggacaggtcgctctcccccagctccggcaggcgggggaccgttttccgccggtacttctccggcaggggggcggcgggcacgtccagagacggcagaagatcgttcccccggccagggcggctgcgctcaaaaatcagcttcatctgtccagcacctccttgacaatggacacggcctcgtccagctcggcgcggctctgcttctccgtggcgcaccacagcagcccgccctccaccggccagccccccaggatgccgcgcgcctccagggcggaaagcaccttctggggttcgggcagatcggtgacaaactcgtggaagaaggggccggggtagcgcagggacacgccgggcagccggcacagctctgcggccaggtagtgggccttggcgtggcactgctcgcccacctgccgaagcccgtccggccccatgagggacaggtagacggaggcggtgagggcgcacagcgcctcgttagagcacacgttggacgaggccttctcccggcggatgtgctgctcccgggcctgcagggtgaggacaaaggcccgctctccccggctgtcccgggtctctcccacgatgcggccgggcagcctgcgcatgagggactgggaggcggccatgaagcccaggtagggcccgccccaggacagggggaggcccaggggctgtccctcgcccacggcgatgtccgccccgcaggcgccgggggactccagcacccccagggcggcggggttgacccccacgatcagtctggccccggcagcgtgtacctgcgcggccagggcgggcagatcctcgagctggccgaagaagttgggctgctggacatagacgcaggcggtggtctcatccagcagtccggtgagatcggtgacgccgttttccgccggggccgccgccacctcggtacccgcgccgaagctgtaggtccggatagtggaaatcacgtccgggtgggcggcggcggacaccacggccctcgtccgcttccgctcccggcacatggccaccgcctccgccgcggcggaggccccgtcatacaccgaggcgttggccgcgtccaggccggtgagctcacagatcatggtctggaactcgaagatggactggagcaccccctggctgatctccgcctgatagggggtataggccgtgacgaactcctccttggaggcgatgcggctcaccgccgcggggatgtagtggtcgtaagccccggccccccgcaggatggtgcggaagcggaggttctgctccgccagggcctccagggtgcggcggacctccagctccgactggggagggggcagcttcaggggggcggtgaggcgcacggactccggcacgtcccggtacagcgcctccgggccggacaggcccagggcggcgtactgggcggcccgctccgcggcggcggcgggcagatatccggccatgtcagccctcctccgcggcacagtggacctcgtaggccgccgcgtccaacagctcctcctcatcggtcatctgttccacctggatcagccaggccccgtaggggtcctcgttcaccagggcgggattgtccagcagctcctcgttgaccgcctttaccacgccggacacgggggagagtacgtcggacaccgccttcaccgactccacatcgccgagggcctccccggcggtgacagggtccccctcctggggcaggttgacaaagacgatatcccccagggcgtgctgggcgaagtcggtgaggccgacggtgcagacgccgtcctcctccttgagccactcgtgggatttggtgtagcgcagctcctcgggaatgttcatagtgataacctcctgtataatttaaaattgtttttataaaatgagctgggaaggggcggcagccggcgtggccggtttgcccttatccccgccggtagaagggcgttttgaccacctgggcgtccacccggcgcccccgcacgtccacctggagcggggggcccggttccttgtacgccgcgtccaccagggccagggccaccgcctgccccacccaggggcagtgggtgccggaggtgaccacgcccacctgccgcccgccgtcgtacaccgggcagccctcccgggcgatgccgcgcccggtcatctggagacccacccggcggcgggacacggggcgggcccgctccagggcggccttgccgatgaagtcgggcttctccagcttgacgaagatgcccagccccgcctcgtaggggttgatggagggagagagctcgtggccgtagaggggcatggcggcctccagccgcagggtatcccgggcccccaggccgcaggggagggccccggcggccgtcagcgcgtcccaaagggcgggggcgtccgccggggcgcagtagagctcaaagccgtcctcgccggtgtacccggtgcgggagaccaggcagggccggccgtccaccgtgccgtggagcacagcggtgtagttcttcgccggaatgtccgccgtcagggtgcgcagcagcgcctccgcaccgggcccctggagggcgagctgggccgtctgatcggagagatcctccaaagtgcagtccccggccaggtgggcggtcatccaatcccggtccttgccgatgttggaggcgttgaccaccgccagccaggccgtgtccgaacagcggtagacgatcagatcgtccaccacgcctccgtcctcgtagcacatgggggaatagcgggcctggccgtccgccatgccggaaaagtcgttggtcatgagccggttgaggttggccagggcgtcggggccccggaggagcagctctcccatgtggctgacgtcgaacaggccgcagccggtgcgcacggccctatgctcggcgatgacgccggagtactgcaccggcagcagccatccggcaaagggaaccagcttgccccccgccgccgtgtggcggtcgtagagcggagttttgcgttccatttccatgccctcctttaaaattggggtcaaaaaaagcgcatggcaatgctgccatgcgcctctgttcggttgcctgagagttttgcccccgtcggcgcggactgcggtccgctttccagagcctcgtccggggccggtccttctgcctgagagatcactgcgctgccccttcggcggcggcggtgtgccgcgctctccccaccccatcatccgaccatatgaacttcagtaggacttctatactttatagtatacgggacggaggggaaaatgtcaactaccttctgccggggagtggagggcggcctctccccggtgcttcccccggcagataagctgggtcatggtgcccatagggcaatacacacaccatgagcggggtttgaaaagcaccattgtgaccagccccagcaccgtagaggtgagcatgacgctgtaaaagccaaaggcgaattgggccacgccgggggaaaagagggttccatagtaggcccagtgccaaggcagccggaacgtccaaagcagagtgacggcctggcgcagctcctgcgcgccggcaaagaccagatatgtgctccagagcatctggaagaacatcagcagaaaaaagcccaaaaacccgtagcggaacgccttgcttttcatccaccggggaatatcggcccgccgggagaggccgaagcgtccacccagcaggctgaacaactgtccccgtccacaaaagcggttgcagtagcccttgtccccgcccgcaaaggcgatgaccagagggatgaaaaagcagaggaggcccaaccaggcaaagaggatgttgaagaagcccaacaccagataaaggagagaggcgatccagagaaagtcataccagcgctttttcatgggcgattctcctccagtgtaattatggtagccgggcactccgccgcgcacttgccgcagccgacgcatcggtctgcatccacccgggctgtgataccgttccagattcggatggcggagaggggacagacgcggacacagcagccgcaggccacgcaatccgccccgatctttgccgttcttcggtggtgttttcgcaaatccataggcaacctccttactgagatgcgcccagtataggggatggacggggctgccgtctgtgataaactcacacagatgtgaggaagtgtacggcctgccgttcggggcggcatctggcgcgggccatttttcggatgacagatgccccatgtaacgcaaaagcgccgcagactgaaaccaatctgcggcgcatgtgtactcagaagttgtagtcaaggatcagccagtccaggtcgctgaaatcctgctcatccagggaccagtagttgtcgtcgcccagggtgatctgcaccaccttgctctgggcctccagatactccgcctcgggcagcttctccaaggtcaggtcgatgaccaggcggcaccactccgcgtcataagcggcgtactcctcatcggtcatggagtccacgtcctggctgtagagagcttcggcgcgggcgtcgggggtgtcgccccacagggcctcggcaacccggtcaaatacgtccagaggctccacagtgactttgacgccgaaggtgctgtcgtccacctccgtggcggtatccacagtgtacttggccttggcgtagacctgcttatacatgtcaactacctcggccttgagttcgtcggtcaggtcgtcgatcaggaaggcggaggcgaagaagtcagcctcggtctccaggctggacaggtaggtttcctcagcctcattctcggtaatgtcgatcagctccaggaagtcgggatcataaacgcctttgtagttctcgtccagaataccctgaacatacgtggtggcatcgtcggcgctgagaccaccgccgccgcaggcggaaagggataggacgaaggtgagggacagagcggctgcggtaacacgtttccagattttgcgcataggggttcctcgctttctcttctcttttttgagttccggctctctttattttatatagtacgcgccggggcgcggaccggatggggaacggcctgcggcggaattgccgcagcaaagcccatgggctttgctcaaggggggctgaaggcggactcagccgcacaggtcgatgatggcctgggtgaagatcttggcggcggtgagctggtcggcaatgcaggtgtgctcgtcggcgccgtgcatgttgccgttaaagccgggcatacagcagccgaaagccacgccgccgggaatatcgtggacgtaggtgcctccgccgatggccaggcactcccccttgtagtcggtgtactgctcgtagcacttgagcagggccttgaccagcggggagtcagcgggggtgtggtggggagcgtccatctcgccggagacggaaaagccaaacttggaaaaagatgcctctgcggcggcgcggcagttctcatcgttggcgcagatgggtacccggctgtcaaactggccctccaggccagtaccgttgacggtcagcagggaaaaggccagggtcagcgccccggacagctcatcggactgggcgatgcccagggccttgccggcgcagtcgccgtgggggaagagggcactcagggcgcggagggcggcggtggagcccaccttggccaggggaagggagcagagcagatggagcaggccggtgatggcgttgacgccctcctccggcagggaggcgtgggcgcccttgccgcggcagaggatgtgcaggctgtccccctcctcgcgcagctcgtagcgcacgccggtctcggcggcggcccggtcgcaataggggcgggcggcgtcggcggacaggccggccaccaagcactcggcctccggcgggagcacgttgatgcggaagccgccgcggaactcggtcacccggggggtggcggtctccgcgggccaggacttggtgaacaccggcttatagctgcccttctcgatgttgatgagggggaactccgcgtcgggggagaaggcatagggggcgtagggctcccgggcgtagtagtaggcgatgtcgctggaaccgctctcctcgtcggtgcccatcagcaggcgggcgttgcgccggagggggacgcccagctccttcacggccttcatggccagcaggacagcggccacggggcccttgtcatcgtcggtgccccggccgtagagcatgccgtccacctccttgggcgcatagggctccgtcactgtccagccggtgccctcgcccaccacgtccaggtggcagagaatgtgaagggcggtctccttgtcgttgagatcggcggtgcccacgtagttatcgtagttgcgggtggcaaagcccagctcttcggccagcttcagaccctccgccaaggcggcggcggggccggggccgaagggcatgccaggcaagggctcctcccgcacgctgcgaatgcgtaccagccgggagatggcctccaccagctcagcccggcgctcaggggcgtcaaaataggcgttgattttttcctcgtacatggcgttattcctcctcgctctcctccgcatgggcgccggtcagctcacccaggtatttatagaccgtataccgggagacctggagccgcttggccacaaaaggcaccgacttgcggaaggagaaagcgttcttttggtccagaagggcgatgatcttcatccggtcccgcttgttcagggcgctgaccggcttgccaacggcggccagacactcgtcaaagacatcggccagacggctgtccccgccgtgccacagggcgctctgaaggtcggcctccgcgctcatgaggtccaccagaatgcggttggcgtacaccagggagctgtagtcgaagttgatgccaagggccaggttgtatccctccccgatgaggtggaaggtgctgctcttgatctgctggcccgatggggtggtggcgtagagattgacgaagtcggttaccagagcgtcctcgtccagctccttggcggtgcccaggatgtccagggtggagcccacggtccggccggagacgtgcccgttgtagatggacaggatggggtggcgggggtcccccatgtcgtggaccagggtctcacaggtggagccgaacatctccgcgatgccgcgggccgtccggtccagaaattcaaaggcttcctcacggtccattgccacagctcctttccagcaaacgatcaaccttattctaaccggacgccggggaaaaagcaagatgatttacagatggagcgggaactggtatactgggagaagaaagggggaattgtcacatgtcaatgtcagccgcgcaggcccggcggcaggccgtggcccaggcgctggaggaggccgtggggccggtgagcgccgccgccctggccgagcgcttctccgtcagccggcagatcatcgtgggcgacgtggccctgctccgggccggagggacggatatcctggccacgccccgggggtatctcctgggcggacggggaggcggcgtggagcgcaccgtggcctgtgttcacgctccggaggagatggagcgggagctcaacgccatcgtggacgccgggggcgaggtggtggacgtaatcgtggagcacccggtttacggccagctcaccggactgctgggggtgcgctcccggtacgacgtggctgagttcgtccggcgggtggaggagcacggagcccgtccgctctcagcattgaccggcggaatccacctgcacacggtccgctgccccgatgagaaaacgttccgcagagtgaggaaatcactggaagctgagaactttttgcttaatatgtgaaatttgacttactaaagtgtgatggtatatattaaatttgacgaaaaagtattgccaaattgtgaatgatggtgtatcatagggtacgaatcctagggttggggaggcttttaggattcgcattaaaaaagggagggttattatgaactcaccacgcatgagacgctttgggaaactcttgctcgtcgtattcgcccttgcatgtgttcttaccacagccgcattcgcagaaggtgacgctgaggttgtcagcgcggttcacggtaccatcgcgtccctgctgccgcccgtcgtggccatcggcctggcgctgatcaccaaggaagtctactcgtcgctgtttctgggtatcctggttggctgcttcctgcaggtcaacggcaatcccatcgacgcgttccagttctttgtcagccacctgtgctccaatgccggcggcaacatgggtatcctgatgttcctggtcattctgggcaccatggtggccctgatgatccgggccggcggctccaaggcctacggcgactgggctgtgtcccacatcaagaccaaatccggcgccctgtggtccaccttcatcctggcgattgtgctgggcgtggatgactacttcaacaacctgaccaccggcaacgtgatgcgccctgtggccgacggccaccacatctcccgcgccaagctgtcctacatgtgcgacgccactgcggcgcctgtttgtatcatgatgcccgtctcctcctgggcggcggccgttaccggcgtaatcggcaatgaggaggtcggcttccagatcttcctgcgggccatccccttcaactactacgccatcctgaccctggtgttcatcattgtgatgacctgcctcaacatcgactacggccccatgcgcacccacgagctcaacgccgccaagggcgacctctataccactcctgagcgtccctttgagaatgccgctgagatgaagtttaatcccgatggcaaggtcatcgacctggtcattcctgttattatcctgatcatcggctgcgtgtcctcgatgatctatgtgggcttccagaacggaggccatgacctcatcaccgcctttgccaacacctccgcctttgacgccctgcctctgggctctctgatcgccctgatcatcaacatgatttatttcatggtgcgccgctccatgaagttcaccgaactgatggactgcctgcccgagggcttcaagcagatggtgcccgccatcctgatcctgtgcctggcctggaccatcggcgacgtgaccaagggccttggtgcccccgagtttgtggccggcatcgtgaagaacctcagcggcagcctgtatgccctgctgcccgccgtagtgttcatcatcgccgcgttcctgggtttcgccaccggtacctcctggggcaccttctccatcctgctgcccatcgtcatcccggtgttctccggcggtactcctgctgtggatctgaccgtgggtgacctgaacaacaacctgctgatgatctccatcgctgccactttgggcggcgcggttatgggcgaccactgctctcccatctccgacaccacgatcatggcgtcctccggcgctcagtgctaccacctgaaccacgtggccactcagctgccctacgctgtgaccgtcgcggttgtggccttcgtcaactatatcatcaccgcgtttatccaggttcccttcatctgcctgcccatcgccattgtctctatggtgcttgtcatgctggtgatcggcaaggtcaaccactccatgaacgcccactctcagcgcgattaactcttacataaaaaaccccccgctcttggagcggggggttttttgcgcagcacatgactttttttacaaaaatttagcgattattctgtcggatattgacaaagtgtgttaagatttgcaaaaatctattgtcaaactgttaacaatcttgtatgatagccctcgagtccttgggttggggagcttttaggattcacaatttcataggagggccattatgaattcaccacgtatgaaacggttcggccaattcctgctggtcattttcgcacttgtatgtgtcctgatgacagcagcatttgccgagggcgacgtggagcataccagctttgtctggggcaccgtcgcatccttgctcccgccggtggcggccatcgtcctggctttgatcaccaaggaagtgtattcgtctttgttcctgggcattatcgtgggctgcttcctgtataccaacggcagccccattgatgcgttccaggattttgtctcccgcctgacatccaatgccggcggcaacatgggcattctgatgttcctggtcattctgggcaccatggtagccttgatgatccgggccggcggctccaaggcctatggcgactgggctgtgagccatatcaagaccaagtccggcgccctgtggtccaccttcatcctggccatcgtgctgggcgtggacgactacttcaataacctgaccaccggtaatgtgatgcggcccgtcaccgacggccaccacatctcccgcgccaagctgtcctatatgtgcgacgccactgcggcccctgtgtgcattatgatgcccgtctcctcctgggcggcggctgtcaccggtatcatcggcaacgaggaggtgggcttccagatcttcctgaaagccatcccctacaactattacgccattctgaccctggtgttcatcgttgtgatgacctgcctgaatatcgactacggtcccatgcgcaagcatgagaacaacgccgccaagggcgacctctacaccacgcccgaacgcccctttgccggtgtggaagagatgaagttcaatcccaatggcaaggtcattgacctggtactgccggtgcttgtgctggtggggtgctgcgtgggctccatggtctatgtgggctaccagaacggcggcaccgacctcatcaccgccttcgccaatacctccgcctttgacgccctgcctctcggctccctggttgccctgatctttaccatgatcttcttcatggtgcgccgggccatgagcttcactgagctgatggactgcctgcccaacggcttcaagcagatggtgcccgccatcctgatcctgtgcctggcctggaccatcggcgatgtgaccaaggccctcggcgcccccgagtttgtggcggacctggtgtccaagttcggccccggcctgaagaacttcctgcccgccgtggtgttcctgatcgccgcgttcctgggtttcgccaccggcacctcctggggcaccttcaccatcctgctgcccatcgtcatcccagtgttctccggcggcattcccgctgccgatctgacctcggaactgatcaacggcaacgatatgctgatgatcgccatcgcggccaccctgggcggcgcggttatgggcgaccactgctctcccatctccgacaccacgatcatggcatcctccggcgcccaatgctaccacctcaaccacgtggcgactcagctgccctacgccatgacggtggccgccgtgtgcttcgcaaactacattctggcatcctttattcagaatgtggttatcaatctggccattgccattgtgtgtatggtagtagtcctgctggtgatcggcaagctgaaccactccatgaaccgccactcccagcgcgactgaaatccgcagagctgatcaaaaatcccccgctccttagagagcgggggattttttgcggcttatttcgcaatccagagcaggttgctgtcggtgacgaagttgggcacgctgtagagcaccagagcctggtcgatgccgttctgggcgatatagtcggcgatggagagcttgtagtagcgcagatccagcaggtggatctcagagaagtggggggtgaggaagggcaccagggagtcggcgtaggagtcccggattatcagcagcctggggccgtcgggattgttggcgttctttacgacgcccaaaggctggttgccgcccaggaacatggagtacttgtccttgacggagaggaaggaggtgtcgtagagctgccggggttcctccaccgggttgcccttgttgtcgtaggtgtgactcgccacggtgatgccgtcgtcgggcacataggtagagatggtgtccgggcgcacccaccgcacgccggaggaggagaacacggtgccgtagaacgcggtggagcggacggtctcggtgtagtcgttcaggggtacgggggtgtagcccagggcggtggccagtccggtatagccgtagtaagcccccaggctggtccagtggtggtcggtgcggtagaagatgtcctcgcccttgtgctcccacaggggggtgtagaggtcggcccaggacgcaccgggcacggcagccttggcctgctccagaatggcggtctggctggcgttgggggctccagcgggcagccggtcggcccagatgcaggcttgggtggggatcagggagaaggtcacagggatatccacattttccacaaagttgttcacataattcagattattcgtcaccttttccccgtctggctcgtcgaagcgggagatcagggtgtcaccggcggcaaaatagacattgttgttctctttcttgcccaggacacgctcggtggtggacttgagggtgatccagccgtcccgccccacaaactgatcggtggtgtaggtttcgaagtccttcataaactgcccgttcagcagggttttgacactggggacggggagctgctccaggttgcggttctccatctgggagaaggtgcggtcgggcgaggcggcattggccaccaggaacaccccgagaaaggcgcagaacagggcggagaggaagatgcagtatttctttgtcatggcttgcctcctgagtcagaatcggaagtagaggaaggggttgtaggtggcgtccaccaggtaggcggtggagaagaccagccctgccagcagcagaatggggaggagcgccagcctgggcttttcgggcaggcgcttccacagcttggcggccagcggggtggaggccacagcggcgatgataagcatggggagaaaagagaaaaaataatacgatacgttgtcgtttgtcaggccgccgcccaggccgaacatggccttgaggtaggctcccatatggccgaagtcctccacggcgaagatggcccagctcaccagtaccagaaacagggtgtataggtgctggagggcggcgggaagcttctggaggagcttgcccaggaaagccttttccaaaatcagcaggacggcgaagtagagtccccagatgaggaagttccagctcgccccgtgccagatgccggtggccgcccacaccaccagaaggttgaaaaacagccggggcttgctcacccggttgcctcccagggggatatagaggtactcccggaaccaggtgccgagggagatgtgccaccgccgccagaactcggtgaccgacttggcgatataggggtagttgaagttgcgcatgaactcgaagcccagcatccggcccaggcccacagccatgtcggagtagccggagaagtcgaagtagagctggaaagcgaaagcggccacgcccagccatgccccagcagtggtgagctccctggcggggagggccagaatggtatcccacagcttgccgatgttgttggccagcaggacctttttcgccaggcccaccacgaagatctgcacgccggaggcaaactgctcgggggagtgggtgcggtggtcgatctggtcgcccagatctttgtatttgatgatgggaccggcgatgagctgggggaagagtgtgacgaaggtgccgaagttgacgaggctgcgctgcaccttggcgtcgtcccggtacacgtcgatggtgtagctcatggtctggaaggtgtagaaggagatgccgatgggcaggctcaggcccagcttcggcatgaaggaaaaaccgatggcttggaggctgccggcaacgaagtcccagtacttgaaaaagaacagcagagccagattgaagatgaccgacgaggccaccgcccaccgggccccccggtcgttgcccctgcgcttgtacttctccaccagcattccgtgggtgtagtcgatgccgatggagaggaacatgataaggatatagaccggctctccccaggcgtagaacaccaggttgaccagcaacagcaacaggttccgccatttcaaaggcgtaatatagtacagaaataatacaatggggagatataaaaacaggaaatacaggctggaaaagaccaacgaaccaccaactctcttgtgaacttcagaaaaagcccggcaggttgccctgccgggcgcccttattatacccgcaaaaaattactttgtataggtgttaaatgcggttaccgcctcgtcggcgtactcactgacggcgaagaggatgtagttgccgttggtcaccagcttatagttctgtaccagctccaactgctcaggcaggtactgggaccactgggcctccagatcatcctgccgtttctccacggcggccttcacggtatccatcttgccgtccttcaccttggcgataaagaactcggtggcctgcacattgaccatgggcatcttgcagagatagctgtccaaatcagcgggatcaatgccgtacaaggcggtcagagtggcatcgtccaggtcggttagggagggaatgtccagcttggagatgtcattccaggtggactgcaccgcgtccacctggggctccggctccaccggctcaggggtaggcgtggaagtcggcttctgcgttggcttgggggtggcggccggggcggagggtttggcgctgggtgcggcggagggagcctgggagggagtctcctccgcggggggcgtggtctcggggagggccgccgggctgtcggtgggcaggacgggggacggggacgcctccggggaggcggagggggactccaccacgggggccgagctctccggggcgggctccttgctgctgccgcagccggccagcaggctcagggacagcgtcccggccagggccagggcgagaaaacgtcggttcatatgggtacgctcctttatttgttttgtggtactcgctctcttggacggcagagggaggaaaaaagttccccagattcgtaaaaaaagagggccggcctctccaagggagtggccggcccttcaggggctttcttttacgccgggcgggtctgctccgcatcttcgtccgcaccgccggcatccagctcggcgacggggagaacgatggtcatgcgggtgcccacgccgggccaggagcgcacctcgaaccagccgccgtggcggtccacgatccacttggcgatggccagccccagcccggtgccgccggtctggcgggcccgggactggtcggtgcggtagaagcggtcgaacacgtggggcaggctgccggcgtcgatgccctggccctcgtcctggacggagaggcgggccatgccgtcccgcagggcggcggacagggtgatgtgccctccggcgggggtgtatttgatggagttgtccactaggatgcgcagggcctgcttggtcagtcccacgtcggcgcagaccggcacggccccctcccaccgggcggagaaggtgtgggtctggtcgatcatcccggtctccttgagcacctcggcggccacctcggtcaagtcgaaggtctccatctcaatgtgcatggagtcgttgtccccccgggccaggaagagaagctgctccaccagctccttcatggagtcggcctcctgccggatggcgtcgatggcctcctggcgggtggcggggtcgtccttgccccagcggttgagcaggttggcgtagccctggatcaccgcgatgggggtgcgcagctcatggctggcgtcggagacgaagcgcatctgggagcggtaggcctcgttgatgcggtccagcatggcgttgatggcctgggccagggttttcagctccttctgggtgccgggcaggtcgatgcgccggtccagatgggtggcgttgatctcgtccagcttgcccgccagggccttcagctcctccggcgacatgcgctccacctggttgagcttggcggcggtggcggccagctcctggatggggcggagtaccttcttaatggagccggcgttcttgaacaggttggtcaccaggctggccaactggcagatgaacaacacccgggcggcaaagacgaagatggctgcgggctgggtcagatccagccggatggcgtagggctcgtcccccggcatctggagggtgtagctggtggcgtcgccggaggagaaggtgaccagcagaaggagatccaccgtgccggggttgaagtagcgcacgccgccccgggtctcctccggcgagggcagccagccgggcaggcggaggccgtccgcctccggcgtgccggcggtgacggtgtaatcccctgccgtcatccactccgtggcctccgccgaggggacgccccgctcctccaccagagtgctgatctgggccgcctgctgctccgaccagacgaacaggccgccgcagaacaggaacagcagcagcagatccatggtgaaatagatgcccagcagccggaaaaagaggcgtgtgttgagccgggccacgatggaggacttgatgcgccccggcgggcgcttgttcgctctgtgtgccatgggaactccctcctcctaatccccgtccagccaggccagcacgggcgccagacgctccggggaaacccagtcgcccccgtcccggaaggcgtcccgcatggcccggtcggcctccgtctccgccggggccctggacaccagccgggccatgggggccatcatggcgcggtagaagccggtgagcttctccggggcgtagccgccccggaggtagaacaggggaacgccctccagccggttgtcccggcgcagcttggcctcctccacctccgccgccatgcccacggcgcacaccgccgccgtccggaagcggcggcgggcccccttcaggcccttgatccccccagcgcacagccagcccaggtagataaccgccgtcccccggggcagggcggcggcctccttcagcgggcggcagggcaggccggtgcgctccgccagcagggcggcgtaccgggcggtgaagccggtctggctggtgtagacgatggcggccgcgttcattgtccttcctcccgaatcacatagcccacgccgcggacggtgtggatgagcttgataccgaagtgctcgtcgattttggcccgcagaaagcggatgtatacgtccactgcgttggtctcccccacgaagtcgaagccccacacatggtccagcagggactcccgggagatgacccgctccttgttctccagcaggtagcgcagcagatcgaactcccggcgggtgagctccaccccctcgccattcacgctcacctcgtgccggtcggtgtccatggtgaggggaccggcggtgagcaggctccggggcggctccgcggcctgggcggggcgcttgcgcagggccgcccggatgcgggccagcagctcctcgatggcaaagggcttggtaatgtagtcgtccgcccccatgtccaggccggacaccttatccaccacggtgtcccgggcagtgagcatgatgacgggcatggcgctctcccgccgcaggcggcgcagcacctccatgccggacagggcgggcagcatgatgtccagcagcaccaggtcgaactcccccgacagggcccggtccagcccggcgcgcccgtcgaaggccttctccacctcgtacccctcgtattggagctccagctccaccatgcgggccagcttctcctcgtcctccaccaacaggattctctctgccatctctctcgctccttacttgccttttttccccctggatttgtcgaattcccgcttgaattcgtcccgtacctggcccaccgcgtcccccaccttggcggacacctggttgaccacctcgcccacccggtttttgtccagatccgggccggaaaagcggtatttacagccgaagaacaggcccaccaccagcaagggcagggagatccagtaggccaccagcaccagcaggatcaggatcagcacgggcagggcggtcatccgctccccgttgcgccacacctcaaactggttgaccgtgcagtggcgcagcagatccaccgccgccgccagcagctcccgcaggcgggcgcgccagctcccccgctcctcccggccgcggtggccgcccgcggtcacggccagcccccagaaccgcttctcgtccttcccggacgcctccggcccccgggtgggcccggagggcggcggctccggggcggcaccgggctgggtggtaaaaaaagcgccccgcccgccgcccggcggaatccggccctcccgctccagcaggatcagggcgtccagcagatcgccgtcacaggcctccagggcccgccgggcctcctcataggagactgccgcgtgcgcgcggagttgttccacctgttccaaagtcactgacatagaggccgccaccctttcaacggttttgtgattacagtatacccaagccgcggggcggatggaattgatctttccttaaaaacacattaaattgggttccgggcaacatcataccacgccgggcccgctggtgcaagctgccgctttacccggctggggtttcatgatataataaccgcaaagcggcggttatacctgacgcggtccgcctgctcccgccttggggcgggactgcgaaatccggcgtcatgcggccattccgccgggcttcatggcggaatgacgagaaaggaacggcttttgccgggaagggaggggcgccatgcgccgcatccagaaatatctgtccggcctgtgtgcggcggcgctgctcctgagcctcctgctggccgggacggccaaggcggatgagatcaccatctatctgatggcggagaacgaccagatgctggacctgcccctgtctgccatgcccgcctggatcaacggagacatatatgtgccctacaccgccttcgactggacggtgacgggggtgaacctgggagtctcctacgggcaggagcggacagagactgagtacaagtttaccctctacagcctgaacggcatgcttgtgtttgacctgaacgcgggcacctgcaccgacggcttctccggagaggcgaaggacatgcgtgccgcgctgcgcaacgggcgggtgtttgtccccctggccggggtgtgcagcttttttggcctgaattacacctatacccccaccaactacggcaccctgatccgtatcacaaacgggcaggagcggctggacacccagcagtttgttacatcggccagcgggctgtctatgcccacccgctactataagtacctccaggagctgaaccagggcacccagcccacgcccagcccgtcccccacgccatcgggcggcggcacggacgagccggagcaggaggacggtctgccggtctacctgtccttccagtgcaccggcggcggggcgctggacaacattttggacaccctggaggcgcgcggcatccgggccctgttcctctttacgccggatgccttggcggcggcggaaggtcagctccgcaggctggtgggctcgggccacgcggtgggcctgtccgtcccgggccagagcctggacggggcgcgggcggcgttggaggagggggccggcctgttggagcagttggtccgtgtgcggccccataccgtatatctggagggggcggcctccggcgtggcggatgcgctgaagcgggagggctgggcctgctggtcggccaacgtggacggccggcccgacggccgaagccagagcacccaggccaacgccctgctgcgcactctggaaggacggcgcagcgcggcccgcatgctgctggacgacagcggagagagcgccggaatcctggcccggctgctgccccgcatgccgcgggacgcgtactggttccaactggcgctggatacccggatctgagagaatcggagcacatacaggcgggcggagcttgtccgcccgcctgttttgaggaggagtcacacatgcgcaccgtatatctggacaacgcggccacctcttaccccaaggcaccgggggtgggggcggccatggcggactacattgagcgtgtgggctgcaacatcggccggggcggctaccagcgggcctatgacgcggccgggggggtgctggaggtgcgggagcgactctgtaccctggtgaacggtcccgggccgcgcaatgtggtgttcacctccggggccacccacgggctgaatctgctgctcaagggactgctgcggcccggcgaccgggtcgtgacctcccccatggagcacaacgccgttctgcgccccctccgccagttggagcgggcgggggtggaggtggagtacctgccctgcacggagcggggggagctggtgacggagaatctggcagagcggctgacgcccggcgtccgggcggtggtgctcacccacgcctccaacgtgtcgggaaccatcttccccattgccgaggtggggcggctctgccgggcgcggggcatcttcttcctggtggacgcggcccagactctgggcgtcctgccggtggacatgggggccatgggcatcgacggcctggccttccctggacacaagggcctgctggggccccagggcatcggcggcgtggtggtcagcgatgccctggcgtcggagctggagcccctcctcgccggcggcacgggcagccaatccgagtcgctggacatgccctctttcctgcccgaccggctggaggcgggcacgctgaatctgccggggatcttcggcctgggggctgccctggactacctggaccgggagggggaggccctgcgggcgcgggagcggaagctggcgggccacctgtgggcccggctgatggagctggaggaggacggcctgcgggtgctgggctctgacgacccggtaaaccgggtgggggtggtgtctgtggactttctctgcgccgacaacgccgagatgaccttccgactggagcgggagtacggcatccagacccgctgcggcctccactgcgccccgctggcccacaagaccctgggcacctttccccagggggcggtgcgcttctccgtggggccgtttaccacctttgaggagctggactacgtccacggcgcggtgtacgacctgctgctggaggtgggcaaccaatagttgcggccatgaaacccggaagcggtggcggcccaggcccgtctctgctattctgaacggcgaggaggagtgcccatgaatctggagattgcaaaccgcctgctggccctgcgccgggagcacggctattcccaggaggagctggcttacaagctgggggtcagccgccaggcggtgtccaagtgggagagggcggagtcctctccagacacggacaacctgctcgccctggcccggctctacggcgtgtccctggacgcgctgctgctccacaccccggcgggggaggcggcccaggccgcgccggagccggaggaggccccggcggacgaggacgcggagatttttgccgccgcccgggcctgggacgccgcggaggaggcggagcagaaggcccggaagcgggcgcgggccaagtggaaggaggggctgctgtggctgctcaccctggcgctgatggtgattctgcccaacctgacctactggcttggcatctcggaggtctatgccgtggtggtcacggtggcctttttgatcaccggcttcctgctggacaactggcacccgggctggatgctgtttctcaccattccgctctactatgtactgatcttcggacgttaaaaatggagttcccgccctgcgggaactccattttttgcactttactggtggataaccgtgccggtgcggcccgccacgccgtccttggccttctccagaagggtgatcagggcggtgcggccgggggcgctctcggcgaattccacggcagcctgcaccttgggcagcatggagccgggggcgaagtggccccgttccatgtagaccttggcctcggcgggggtcagactgtccagccaggtctggttgggcttgccgaagttaatggccaccttctccacggcggtgaggatgatgagggtatcggcgttgacctgctgggccagcacgcaggaggcgaagtccttgtcgatgaccgccgccgcgcccttgaggtggtggccttcggtcttatagaccgggatgccgccgccgccgcaggccaccaccaccagtccggcgtccaccatgtcgcggatggactcaatctcgatgatggactggggcttgggagaggccaccacacggcggtagccccggcccgcgtcctcaatgacgttatagccccgctcagccaccattttgtcggcctcctccttggtcatgaaggcgccaatgggcttggtggggttctggaaagccgggtcgtcccggtttacttccacctgggtcagcacggtggccacgcccttggagatgccgcggtccagcagttcctcccgcagcgcattctggagatcatagccgatatacccctggctcatggccacacagacggagagggggcaggggatgtacttctccggctccgagcgggtcagctcggccatggccttctgaatcatgcccacctgggggccgttgccgtgggcgatgatgacctcgtggccctcctcgatcagatccacgatggccctggcggtctgcttcaccgcgatcatctgctccggcagattgttgcccagggcatttccgcccagggcgatgacaacgcgtttacccataaaaagcacctcattcaagataaagaaaagtcaaaaggagaggggcggaaatgcccacgcgccgggaggcgcgtacaagcgttttgcccgaagggcaaaaccttggcgcaggcggaattcagttccgccgagcaagtaaaaacagaagggggcccccagggcggcgtgccgtcctggggcgttttccgcccagggcgatgacgacacgtttacccatgaatagcacctcattcaaaataagaaaagtcgaaaggagagggggcggaaatgcctacgcgccgggaggcgcgtacaagcgttttgcccggagggcaaaaccttggcgcaggcggaattcagttccgccgagcaggtaggggtgcactgtgtgcacccccagtctgttccgcgggccgccgggccgatgagggcatcggcccctacggaatacggaggggcgggcggccgcaaggggcatccctgcctgtgtgtccgcgccgaaaaagacggggcccgcccgcagaataccggagtacctgtatttgcgggcgggccggagcgcctgggcgggggaaatttgcagattttacttctggaaccagcgggccaggccgcgctcctccagggccttcagggtggcctggggatccttcaccttggccaggaagatcatggcggcgatgatatagggcttgaaggaggcctccttgtagagaggatcgcggtagcggtcaaacacgctggcctccacctcgccgtccacgcaggagacgtcgttgatgtcggcgggcaggcagtgcaggtacagggccttgccgtcgcgggtggtcttcatcagctcctcggtgcagcaccagtccttgtgggtggcgttctgggccagcagctccttctccagggccttgatgccctcgctgtcgccctcggcgtacaggttggtgcgcttctccatggcggcgaagggggcccagctcttgggatagacgatgtcggcgtcctggaaggcctcggccatggagtgggtcttggtgaaggtgccgccgctcttctgggcgttggcacgggccacctcctccacttcgggcatgacctcgtagccctcgggatgggccagcaccacgtccatgccgaagcggctcatcaggccgatgacaccctggggcacggagaggggcttgccgtagctgggggagtaggcccaggtcatggcgatcttcttgcccttcaggttctccacgccgccgaagtggtggatgatgtgcagcatgtcagccatggcctgggtggggtggtcgatgtcgcactggaggttgaccagggtgggcttctgctccagcactccgtccttgtggccctgggtcacggcgtccatgaactcgtgcatgtaggcgttgcccttgccgatgtacatgtcgtcgcggatgccgatgacgtcggccatgaaggacaccatgttggcggtctcgcggacggtctcgccgtgggcgatctggctcttgccctcgtccagatcctgcacctccaggcccagcaggttgcaggcggaggcgaaggagaagcgggtgcgggtggagttgtcgcggaacagggagatacccaggccggactcgaagatcttggtggagatgttgtgctcgcgcatgtagcgcagggcatcagcgatggtgaagacggcctcgagctcgtcgtcggtcttttcccaggtcaggaagaagtcgccctcgtacatctccttgaagttgagcttgttgagtttgtcaatatagttctgaaggttttccatagcggcaatctccttttcttttttcttgtggggtaggggcggcccttgtggccgtccgcgggcggggacaagccccgcccctacgggcgcgcttcttactgaatgttattattggtcttgccggcgcggaactgggacacgtcggcggtcttgttctcctccttgtagttgccgggcacggcggcgtacagggcagcgcaggtgaccagatccatcttccaggtgatctcgttgggggcgtgggcctggctctcggcgccggggccgaagcccacgcaggggatgccgtagcggccctggatggccacgccgttggtggagaaggtccacttgtcggtgaggggacggccgtcccgcaggtgcatggcgtcccgcttggcctcggcgtcggcgtggccgatgcgcttgtcgccccagagggcgtggtgggcgtccaccagggcctggacgtgggcggcgttctccttgttgatccaggtggggaagtagcactcggtctcgtacacctcgccggtccaggagggccggtcatacatatacatggacacctgtacgtcgtcgccgtacttcttcacgctgggcagatcgcggatctcctggaggcaggagtcccaggtctcgccggcggtcatgcggcggtcgatggagatggagcaggagtcggccacggcgcagcggctgggggaggtgtagaagatctgggaggtggtgcaggtgccccggcccaggaagcgggcgtcttcaaagtgctcggggttgtacttgggatccagcatcttcaccaggcccttgatctccacggtctcgtcggcggggttctcgttgagggcgcgcacgtcctggaggatgtcggccatcttgtagatggcgttgtcgccccgctccggagcggagccgtggcaggagacgcccttcacgtccacgcggatctccatgcggccccggtggccccggtagatgccgccgtcggtgggctcggtggacaccacgaactccacctgctccttgcggatgcccttggcggggaagaacttgttgacgatgtactgccagcacatgccgtcgcagtcctcctcctgcacggagcccaccaccatgattttatagccggcgggaatgaggcccagctccttcatgatcttggcgccgtaggtggcggcggccatgccgccctcctggtcggagccgccgcggccgaagatcaccgcgtcgtcctcgtagccctggtagggatcggcctcccagttgttgatgttaccgatgcccacggtgtcgatgtgggaatcgaaagcgatgatcttgtcgccctcacccatccagccgatgacgttgcccaggccgtctacctccaccgcgtcgtagcccagcttctccatctcggccttgatgcaggccaccacttccttctcctcgcagctctcgctggggtgggagatcatcgcccgcaggaagcgggtcatgtcggccctgtagctctcggctgccttcttgatctgctcgtaatccatgttcgtttccctccatcattgattcacaggtggttatattatcttaaaagccttacagagtgcgcgccgcaggcgtgcagtttgttcgttccggggacatgtgccccggaacgaactccgctcagcccgcaagtgtgggtgctgagcgctttcagcggtcagcacctgcgcgcggcgggctgtatctcatcccagaagcggctttgccgcttttgggatgaattaagcggtgggatattcaccgtcccacagcaccttacggaacttcatggggtcggtgttgccctcggtggagaacatgagcacctggctgaagcggtccaggccgatggcctcccggagctccttgtattcatcggtctccatgatggcggcgatgaggcccatgcccaccgcgccggactcgccggagatcaccaccggatcgcccttgacggggacgcccagcatccgcatgccccgggcgctcacccagtcggggcaggagacaaaggcggtggcgtggttgcgcaggatatcccaggagatggtgttgggctcgccgcaggccaggccggccatgatggtctggaggtcgccgtccacgatgcggggggcgccgtcgccggccagggcgccccggtagaggcagtcggccgcctgggcctccatgacgatgaacttgggcgggtcgttggggaacaggttggtgaagtagcccaccaccgcgccggccagggagcccacgcccgcctggacgaacacgtgggagggacggttgacgccgagctggcggagctgctcggcggcctcgctggccatggtgccgtagccctgcatgatccaggaggggatctcctcatagccctcccaggcggtatcctggacgatcacgccgtgctcggtctgggcggcctcggcggcggccatgcggacgcagtcgtcgtagttgacctcctcaatggtgacggcggcgccctccttggcgatgttgtcgtaccggggcttggagctgcccttgggcatatgtaccacagccttctgccccagcttgttggccgcccacgccacgccgcggccgtggttgccgtcggtggcggtgaagaaggtggcctggccgaactccttgcggaaggcctcgctggtcaggtagtcgtaggtcatctcggacacgtcccggcccatttccttggcgatgtacttggccatggcgaaggagccgcccagcaccttgaaggcgttcaggccaaagcggaaggactcgtttttgacgcacaggccggccagccccaggtattgggccatgccgtccagccggtccaggggggtgacggagtactgggggaaggtgctgtggaaaaagcgggccttggccacgttggagagcgacatgatgggcagctgccggtcgtcgctcttgggcatggtgttgaggacccatttgatctggtctttcattgggacggtcgcctccaaattattttgaagttgcacttactttttgttttacgagaccatcataccacgtcccgttcagatgtcaagaggatattctaaaaaaaatggtgtaatactaaaaaatttttagcatccataaaaatgcgcctgaaatataagggaaaaacaggaaagcgggaccccggacggccggccgccgggaccccgcggaaggtcagggggcggccttcttggctggctttttatagaaggtgtcctgcatgggcaggctggtgcgcaggatgtggtcacgggcgtagtaggccccctgggccgccggcgcggtggggatggtggcgatctcgccgatgcccttggccccgtaggcgaaggggagcagctcctccttctccacataaatggcgtggatgtcgggaatctggtcggcccgcatcagccccagggtgccgaatttggcctggggcacgcagtccttgagggggaagtcctcggtgagggcgtagcccaggcccatgagcacgcccccctcgatctgcccctggatggaggtggggttgaccaccttgcccgagtcgtgggcagcgtagacctccttcacccggccctcgccgtccagaatcaccacatgggtggcgaagccgtaggccacgtggctcttgggattgggcttgtcggcccccagcttgtcggtgggatcgaaaaactcggcgctgtactccagcccctccagggcggacaagtccccgcccgccccgtccagatcggccctgagctcggcggcggccatgcgcaccgcctcgcctgtgatcagggtctggcgggaaccggaggtggtgcctgagtcgggggccacctccgagttggcccccatgttgcggagcttttccaggggcaggccggtggcctcggccagcatctggaggaacacggtggcgcagccctggccgatgtcggaggccgcggagtacagctccaccaccccgttgcgcaccgccagcttgcaccggcccttgtcgggcaggcccacgcccacgccggagttcttcatggcgcaggcgatgccggcgtgatccgcgttttgctcgtagacgtccttcaccgccagcagggtctccttgagggcggtggagcagtcggcaatctggccgttggggagggccttccccggctcgatggcgttgcggaagcggatctcccagggggagatgcccactttttccgccagcaggttgatgttggactccagggcgaactcactctggcacacgccgaagccccggaaggcgccggcaggggggttgttggtgtaccagccgaagccgcggatgtcggtgttctggtagcagtaggggcccaccgagtgggtgcaggcccgctccagcaccggcccgcacagggaggcgtaggccccggtgtcgaagtggatctcgcagtccaggccggtgaagatgccgttctcgtcgcagcccagggtgaaggtgccctccatatagtggcgctttgggtggaaggcgatggactcctgccgggagagcttcgccttcaccgggcggcccaccttgagggcggccagcaccgccaggtgctgcaccgacacgtcctccttgccgccgaagccgccccccaccagcttgttctccaccacgatgcgctcgggctcccaccccagcatgatggagatctccttgcgggtgtcgtacaccccctggtcggaggtatagaccttcaccccgtccttgtaggggaaggccacggcgcactccggctccaggaaggcgtgctcggtgaagggggtgcggtaggactgggtcaccacgtacttggactgggccagggcggccctggcgtcgccccgggtgacgtggcgctgctggcacaggttgccgccggggtggaggatgggggcgtccgccgccctagcctcctggatggtgcgcaccggctccaggggctcatagtccaccttcaccagctccttggcctgcttgagcacggtctcattttccgccaccaccaggcagatggcgtcccccacgcagcgggtgatgtcccccttggcgatcatcacgtcccagtcctgctggagatggcccaccttgttgtggggcacgtcgtcggcggtgaggacggccagcaccccgggcagggccagggcggcggaggcgtcgatgtccagcaccctggcccgggggtactgggagcggacggcggaggcgtgcgccatgccgtccaggtacagatcgtcgcagtacgccccggtgcccagtaccttggcccgcacgtcggtgcggaaggcccgcgcccccacgccgtaggcgtccccgtgctccagggcggggtcgacggcctgctccccgcggaggatggccccggccagggcgatgccctcgatgattttcttgtagccggtgcagcggcacacgttgccccggatggcctttttgatctccgcctcggtggggttggggttctgatccagcagggccttgcccgcgattaccatgccggggatgcagaagccgcactggaccgcgcccaccgcgccgaaggcgtagacgaaggcctcccgctcggcctccgagaggccctccaccgtcacgatctccttgcccgcggcccgcttggtggacaggatgcaggctttgacggccttgccgtccaccaggatggtgcaggtgccgcaggcaccctcgctgcacccgtccttcaccgaggtcaggcgcagctcgtcccgcaggtagcgcagcagaggcttctcctcctccgtggagcaggggacgccgttgaccacaaaggaataacactcactcatggcaggttcctcatttcctgattcagattccatgggcgtgcggaaagccccagcgaaaggctgaggctcaccgccgccggattatcccagcagataggcgtagttttcgtataccgcgcagatcaggcggcgcagggggtcgtacaggccgcaggcggcgtcggacacgtcgtagtcggccacctggccgcccaggcgcacccgggttctgccgtcctccaggcggaggaagccctcgttccggctgttctcaaagtcgtccgcgctccagaacagggtgaacttgtcctggtaggggcggctgtcataggggcagaaggtggcgcagttgccgcactcgttgcacatgccgtccacgtggatgatctggcgctggcgcatgccgggcacccacactgccacattggcccggttggggcacacctcggtgcaggtctcgcacacggtggcgcagcccaggcagcggatgtcctcacaggaggcgcagtcggtgcacacgtcgccccgcttggccaggggcttctgatagtcggggttcacgttctgctccacccaggcgtccgcgtcgaaggggtggatggcctgggccgccttggcggcgccggcgatggcctccaccacggtgccggggcccttctggccgtcacccaccacaaagacgtgcttgacggaggactccagagtatccgggttgaccacggcgcggccccgttgatccacagaaaggccgttggcggtgtaaagctccgtgtccaccttctcgcccacggcggtgatcaccgtgtcggcgggcacctccgccgtccggccggtgtccacgggggagcggcggccggtggcgtcgggggcgcccagctccatcaccctgcaggtgagcacgctgtcccggacgcccacgggggcgagcagctcccggaactccacgccgtcggccagggccagctccagctcctcctggtcggcgggcatatagcggcgggttctgcggtacaccagggagacggtctccacgccgggaaggcgcttggcggcccgggcggcgtccatggcggtgttgccgccgccgatgaccaccacatgccggcccaggttcagggtatcgggggccttcttggcggcctccaggaactcgatgacgttgtgctcctcgccgtactccagcccggcgctgcccttctgccacgcgccggtggccaggatcacatgggtgaagccctgggcgaagagctcctgtacatccttcacctcggtgttgagctccacctttacccccatggcctccatgaggcgcacgtcgttgtcgatggcctcgccggggatgcggaacgcggggatcacgtggcgcacgatgccgcccagggcgtcccggcgctcgaagacggtgacgtccacgccggagcggcccaggaagtaggcggcggacatgccgccggggccgccgcccaccacggccaccctccggcccgcggcgggggcggcggggcgcagcttgggcagcagggcctcaaacccgccctcggcggcctttagcttctgggcgcggatgtagacgctctcgtcgtaggcgttgcgcatacacttgtcctggcagcggtgggagcagatggtgccggtgatgaagggcagggcgttgcgctgggtgatgatgcgcagcgcctcctcgtacttgccctcgcctaccttcatcagataggcggggatgtcctgctcgatggggcagccggagcggcagggggcggagaagcagtcgatgaggggcacctttttgtccagcttgcggctggggatgggcttcatgggcttttgatagtggccgtcggcggagatgccctccgccagagcggccgccccggccgcgtccaccccctcccagggctcataggagatgtccgccagggcctggccgatctggctgaaccgctggtagccgccgggcttgaggacggtggtggccatggtgatgggccagatgcccgcgtcaaagagggcccgcaccgagtaaatgtccgcgccgccggaataggagatgcgcagcttgcccttgaactccttggccagacgggccgccagggacagggacagggggtagagggagcggccggacatgtacatctcctcgctgggcagctcgccggcggccacgtccacggggaaggtgttggtgatcttcacgccgaactccaggccccgctcgccggtgcgctgcatcagccggtggaacatgggcaccgcgtcctcccactggagatcctcgcggaagtggtggtcgtcaaactggatgtagtcgaagcccaggccgtccagggtcttgcgggcgaactcatagcccagcagggtggggttgcacttgacgtaggtgttcaggttcttttcggtgatgaggtaggtggcgatgcgctcgatctcgtcgggggggcagccgtggagggtggactcggtgatggagttggacacgtggggggtaatgccccggacataggcctcgtccaccttctcaaaccggtccagattggccagagtccagtccatgcactcccgccacacctcggtgccggaggcgtccttcatcccctcgatgtaggcatccaccttggggctctggatgcccttgagattgtagcccacgctcatgttgaacacaaagccgtcgggatcgcccagctccagctccttcgccagcagcttgcaggcgaaccacgccttgacgtattcggcgaaggcctgggggacgtagagctcggtggaccactcgcagttgtagcactcgtccgcggcggtgatgcagggtttgctgacgcacttggacagctcctcgccgtccatcacctgcacggtcttgacctcaaagaagcggctgcccgcggcgtaggccgcgatgatgttctgggccaactgggtgtgggggccggcggcggggccgaagggggactcgatcttctcctcaaagatgggcagggccttcccgccggcgtggcacaccagcttggatacgccgaacacggagccctgggcgcggtactcgctcaaaatccagttcatcaggtgggcaaagggcatgggtctcataatatcgctcataacggatggcctcccaaatatgattcagatgtgttcagactggcgggcggccacaagggccgcccctacgtccggcgcttacggtaggggcggaccttgtggccgcccgcgctcccgtcaatcggtgcggtggttgagctcgccccacagcttcttggactgctccatgcagaaggcattgattttgccccgcccggcggggccgtgcgggggccccgagcgatttgatctgcccggggcgagtgaatcgccccggacatcaaggttttgccggtggcaaaacgcttggtgaggacaaaatcaatgcgggacggttaataagttctgtggttgagttcaccccacagcctcttggactgctccatgcagaaggcattgattttgccccgcccggcggggccgtgcgggggccccaggagatttgatctgtccggggcgagtgaatcgccccggacatcaaggttttgccggtggcaaaacgcttggtgaggacaaaatcaatgcgggactgttaataagttctgtggttgagttcgccccacagcttcttggactgctccatgcaaaaagcattgattttgtcctcgtcaatgcccacgaactcccgatccttatagagcaccttgccgttgatgatggtggtgcggcagttcttgccctccatgccgaagagcatgtgcccgtccacgttctcatgggagaagggggtgaagggcttgtaatccatgatgatcacgtcggcggccgcgccgggcttgagcacgcccaggggctttttgaagtaccgggcgcagattttggcgttgttttcaaagagcatcccggtggcctcccgccagcccacgttgggcaggcaggcgttgtgccgctgcatgggcaggagcaccttcaggctctccagcatgtcgtgggtgtaggcgtcggtacccaggccgatgaggatgcccttctggaacagctggagcaccggcgagcagcccaccgcgttgcccatgttggattccgggttgtggcacaccatggtgcccgtctccctgagaatgtccatctcggcgggggagatgtggatgcagtggcccagcatggtcttttcccccagcacgccgttgtagagcaggcggttcaccgggcggcagccgtagttccggagggagtcgtacacgtcgttcatgccctcggccacatggatgtggaagccggtcataccgtcgttggccttcaccatctgctcgaaggtcttgtcggagatggtgaacagggcgtggccgccgaacatggccttgatcatgtcgtcgtcctgctccttcgcccaccgggcgaagtcggcgttctcccggatggcctggccgcacttctccgcgccgtcccgctcgctgacctcatagcagaggttggcccggatgcccagctcctgacacacgtccttgatggcgaagagggagccggggatttcgcagaaggaggcgtggtggtcgaagatggtggtcacaccgtcccggatgcagtccagcaccgtggcgtaggcgcaggcccgggtgccgtccagggtcagatgtcggtcgatgtaccaccactggccgtccagcacctccaggaagttggtggggttgaacccgtcgatggacaggccccgggccaggcccgagtagatgtgggtgtgcacgttgatgaggccgggcatgatgacgcccccccgggcgtccacaaactcggcgtcggggtatttggccctcagctcggacagggcccccacctccttgatgacctcgccgtccagcgccaccgcgccgtcctccgcataggggaaggcctcgtcccgggtaatcagtcttccgtttccaaccagcagcatgcgtcattcctcctttggatttcaaccaacaaaaaagtgcccattccctatgaatggacactcgactctgtgacggcggtgcgccagcaccgaaaccgaatcccatgtccattcagcccgtgcgcgagagcactccgttgcagccacaaccgatcttcaaattgtttgtatagtatatacagtttaactggttttacatttgaattttagcacaaaagcgcccaagatgcaagagggtttgttggaaaaactaaaaaatttttagcctttataatttttgttgaaaaaatacctggaagtggtataataacaacaaaagcgccggcaaaggagagaaaacagtatgccagaagcgtccacgctgcaatttttatttcagcttgccaaagggattgccagccagttcggccccaactgcgaggtggtggtgcacgacctggattccaacgacccggagagctccatcgtggccattgagaacggccaggtcaccggccgcaaggtgggggacggcccttcacacgtggtgctggagaccctgcggggcgaccgggagaagcttcaggaccacctgtgctacctgaccaagacgaaggacggaaagattctcaagtccaccaccatctacatccgcaacgacgacgggacccccatcggcatcttcggcatcaactacgacatcaccctcatgctggccatggagaacatgctccgccagtttaccgctacggagaaggagtcccgggagccggaggccatctcccgcaacgtgtccgacctgctggacgagctcatcgagcagagcgtcaagctggtgggcaagccggtggcgctgatgcacaaggaggacaaggtaaaggcgatccagtttctcaacgagacaggggcctttctcatcaccaagagtggcgacaaggtgtgcaagtacttcggcatctccaagtacaccctctacagctacatcgacgagtcgaaggaataaattccgtgcccggcttcctctggaagccgggcgcgtttgtcaatcagccgttcgcggagggctccttgggcaggatcaggttgagcaggatggccatgagggcggccaccaccacggaggaggagccgaacacggtgttgacccaggcggggaagccctcgccggccaggcagccggacacctgggtgatccccacgcccagggccaccgacaggcccaccacggagctcttgcggggggtgaagcccccctcggtgatcatacggatgccggtcatggtgatggtggcgaacaccgagatggtggcgccgccaatgacgcactgggggatggtggtcagcagggaggcgaacttgggtaccagcccggccaccagcagaatgagggccgccaaggcgaagaccgcccggttgatgacccggttgacggtgacgatgcccacgttctggctgtaggtggcggcgggcaggccgccgaagaaggcgcccagaatgctcatgacgccctggcccacaatgccgccggagagctccttgtcggtgggcatgcggtccatgccgcccatggtggtggaggagaggtcgccgatggtctgtaccgcattgaccacgtagacgatgcccagggacacacaggcggcggggacgaactggatgtcaaagggcatgggcctgggcagggcgacccaggccgcgctgcccaccccggacagatccacgatgcccaggaaataggcaatgacatagcctgtcagtatgccaatgaggatggaggccagcttggtgatgcccttggtgaagtggttgaggaagaccaccaccgccagggtgatgagggccaccgcccagctcttggcgctgccgaaccactccgaacccgcgccgccggccatgtacttcacggcggtgggatagagggacaggccgatggtgaagatcaccgtgccggtgaccaggggagggaacagggggcggatccacttgaccagcaccccgaagacgatggcaacgatgcctcccacgatctccgcgcccagtatggtgggcaggccgaattcgccgccgatggcctggagcgtggggatgtaggcgaagctgatgcccatgatgacgggcaggccggagccgatgcggtggaagatgggaaagagctggagcagggtggccagggcggtcaggatcagggagacctggatcatcagggtcttgtccgcgctgctcaggccgcaggtgtccgcaaccaggatggccggggtaatgacgccgactacggcggcgaccacgtgctggagtcccaacgggagaagctgtccgggctgcgggatgccgcgccattggaaaacggcatccttgctggtggtgtcggggtgactcattccaatcgcctcacaaaaattttttgaagtacaaatgcatttttagcacattcaaactatatcccatttttaggctggatgcaagtggaatttctttgacggaatggaaaaaaaccagactgctttttgtgaaagatgcttaaagcagccgctgcggacaggtaaaaaaagaacggatttcccaggcgcaaaagcgcctgggaaatccgtcttcgatgcagggcggggcttacttgacagcaatggcctcaatctcgcacagggcgcccttgggcagatcctttaccgccacgcaggagcgggcgggcttggaggtgaagtacttggcgtacacctcgttgaaggcggcgaagtcggcgatatcggccaggaagcaggtggtcttgaccaccttgtcgaagccggagccggcggcctccagaatggcgcccacgttcctacagctccactcggcctgggcggcgatgccctcgggcatggtgccgtcggcaggatttaccggaagctggccggaggtgatgacaaggccgttggtctcgtaggcctgggagtaggggccgatggcgccgggggcgttcttggtgtcgacaataagcatgaaagagtcctcctatcagtttaaaatgatcctcttcctattatagaggcgggaaaaaataaatcaagggccactgaacaaaattttggaaagaaaaccgtcagagtcgcttcacaaaagtgtaaggcgggatttagttttttttaagatccctttgataagcttttctcagaatcaaaggaggtctgaacatggagcaaattctgagtgtggagcatctgcgccgggactacggcggacggggaagcgtcacccacgcggtggacgacgtaagcttttccgtggagcggggggagtttgtggggatcatgggtgcctcgggaagcggaaagagcaccctgctcaactgcatcgccacaattgatacccccacagcggggcatatccgggtggaggggcaggatgtgacggcgctgaagggccgctccctctcccggttccggcgggagcggctgggcttcgtgtttcaggactgcaacctgctggacaccctcaccgccttcgagaacattgctctggcccttaccatccgggggactccggcgggggagatcgaggggcgggtcaaggagacggcggagctgctcggcatcaccgactgcctgaacaaatacccctaccagatgtccggcggacagcgccagcggacggcggcggcccgggccatcatcacagaccccgctctggtgctggccgacgagcccaccggcgccctggactcccgctccgccaagctgctgctggaccggtttgaggccctcaaccgggaaggccgggccaccatcctaatggtgacccacgacgccttcaccgcaagctactgccgccgcattctctttttgcaggacggtgcggtgctcacccagcttgagcggggcgggcagagccgccgggcgtttttccagcagatcatcggcgtggtgacccgcctgggaggtgatcagagcgatgttctctaagctggccttcaaaaatgtggggcgcagcatgaaggactacggagtgtggtttctcaccatcgccttcggcgtgtgcctgttctatgtgttcaactccctggaaacccaggcggtgttccaatacctgggcagcggtccccaggctcccacggcccaggccatccgggagctcatcggcatgctctccgtctttgtgtgggtggtgctggcctttctgatcctctatgcctccggcttcctgattcgccgccggaagggagagctgggcacctacctgctgctgggcatggagcgggggcaggtggcccgcctgctcctgctggaaaccctgtgcatgggggtgctggccctgctggcaggcctggggctgggggtgctggcggcctggggcctgtccgccttcaccgccgggctcttcgccgtgcccatgacggagttcactttctccgtctccctggcggccatggggaaaacggccctggccttctcccttatcttcctgctggtaatgctctgccacgcctttgccgtctcccggtgcaggctcctggatctgatgcaggcccggcgggtgaaccaggagctcaaggcccagagcctgggggtgtcggtggttctctttctggcgggggcggggctgctggccgtcgcctacgccatgctcctcacccggggcctgctgcgggtggacgcgctgttctgggtgatgatcggcctgggcagcctgggcaccctgctcttctttcgctccctgtccgggttccttctgcgggtatgccagagcagcaagcggctctactacaggaacctcaacatgtttgtcctgcggcagttcaacgcccgcatcaacaccacctaccgctccatgacggtgatctgcctcatgctcctgctggccattggcatcaccgccagctcggtggggctcaacaacacggtggagcagatgacggtcgagcaggccccccaggacgtggagctgatcttctacccggagcaggagggagaggtggacctccccgccctgctggcggaggggggctttgatccggaggcagagtgcgccttctcgctggccgttccggtgtatcgcaccggggaagaacgggccatcacccaatccatgcacgacgccatcgcgggccgctggggccaggacgcggcgtacgctttccgggcgcacaacggcctggccgttcggccggatgatgcggcccagggagctcacatcgacggctggtatttcctggccgactatgccggggacaaatatgcggcggaggcgcggtttcaggaggcgctgtctaccctgaacaccctgggcgtctacggctgcaccacccgtatcgggacctggatggaggttatgggcaccaaggtgctggtgctcttcatcggcctgtacctgggggtggtgttcctgctggcctcggcggcggtgctggcccttcagcagctcacccaggcggcggacaacgccccacgctaccagctcctggcccggctgggcgcgccggagcggatgcgggcccggtcggtggatatccaggtattcctctcctttttcctgcccctggccctggcgctggtccacgccgccgtgggcatgacggcggccaacgcggtgatcgccgaggtcgggaaggtggacgcggcggcctccagcgccgtggcggcggttctgctgctggtcatctacggcggctatttcctggccacctgctggggcagccgccggatcgtgcggggcggctgagaaatgcgaaaaaatgcttgaaatcggcggggaaatgtgctacgatagaatccacgtttgaaatcggcgcgggataactgcgcccatagaccatagcgtatggacgaatgatgccccatccggggccgaaaggacgatgcagcgtgaatatcccccagttgattctgagcattgtggacgtggcggccgcgattttcctgatcgccgtggtactgctccagtccggaaagagcgcgggcctgtccggtgccatcgccggcgtggcggatacctttatggccaagaaccgggccaagacctgggacgccaagctggccaagctgaccaaatgggtggccatcggctttgtggtaattacctttgtcatgtgcctgctctaagaagcacaaaaaccgccctcccgttcgggagggcggtttttgtatctttcgatgccggatgagacaaaattatggtacaatagcagcagacgccgcgcctgtgggcggcggcacccggagcatcccggccggaggaccggagtgcggaagaaagggaacgatgatatgaaacaggataagcaggccggcgggctcgccggaatctatcaggccaccagccggggcttcggctttctggtaccggaggacggcggggggcgggaggatgactggttcattccgccccgggcggagggcggcgcgtggcacggcgaccgggtgctggcccggccggaggacgagggaggggaggagggccggcggcgcaccgcccggattaccgccgtggtggagcgggccaacaagacggtcaccggcgtgctggtccggcacaaccgggggctgtggctccggacggacagtgaccggctgcccagccccatccaggtgctcaccaagcgtaagggagtgcgggccggggaccgggccgccgtggccatgaccagcttcggaagcgccaagcacccgcccatgggtaccctgcgggaggtgttcggcccagccggggaccgagagagcgccgtggccgccctgctgtaccagtatgagatcgaccgggaattccccgatgccgtgatgctcgaggccaaggcagccccccaggcggtggaggagagcgccgtcgccgggcggctggacctgcgggacaaggtgatgatcaccattgatggggcctcctccaaggatctggacgacgcggtgagcctggagcgggacggcctgggccgctgggtgctgggggtgcacatcgccgacgtgagccactacgtgcgccccggctccgccctggatctggaggcgtgggagcgggggacctcggtgtactttgccgaccaggtggtgcccatgctgccccgggagctgtccaacggcatctgttccctcaacccccgggtggaccggctggccctgtcctgcgtcatgaccctgacgccggagggggaggtggtggaccacaccgtcgccaagagcgtcatccgcaccacggagcggatgacctatgaggactgcaacgcgctgctggcccacagcgaccccgctctggcggagcggtacgcccggatactccccatgctggaggacatggccgcgctgtcccgggtgctggagggccgccgcaggcggcggggcgccctggagctggacacccgggagagctatgtggtgtgcgacgagagcggcacgccggtggacgtggtgctccgcacgccggggatcagcgaggggctcatcgagtccttcatgctggcggccaacgagtgcgtggccgagcatctgaaccggctggacaagccctgcgtctaccgggttcacgagaagccctccacggacaaggcggagacgctgcgggccatgctggcccccctgggctacgatttgaaggaggctgacggcccctccctccagaagctgctggacacggcgaaggggaagccggaggaggcggcggtgtccatgatggtgctccgctccctgatgaaggcccggtacgacggggaaaacctggggcacttcggcctggcggccaaatactactgccacttcacctcccccatccgccgctatcccgatctgatggtccaccgcatcctcaccgccctgctggacgggaggctgtccggcggggtggagagaagactggccgccgcggtccagaaggcggcggtgcagtcctcccagcgggagctggccgcccagagcgccgagcgggagattgagaagcgctacatggccgaattcatggcgggccatgtaggggagacctttgccggcaccgtgtccggcgtcacccgcttcggcctgtttgtcctgctgcccggcggggtggagggcctgctgggggtggaggccttgcccggccggggctaccactacgacgagacccgcctcacgctgacggaggaggggggcgggacggcctacaccttcggtatgcccctggaggtggtgtgcgccgccgccgatcccgccaccgggcagatcgattttgtactgcctggcggccagcttgccccgcgtcccacccgtccggcggagcgccgggaggagatgcccccgcgccgggggaaagacaggcgggccatgcatgtgcccaaggggcggaaagggaggaaaaaacgatgacaaaacggatgctattggctattttattactaattgtattcgctctgcctgccggatgtcaaaaacaggggggagaaccgactcagcccaccgcccccgcgcccaccattttgcccacccacacgccagagccgtcccccacccccacccccgatccggtgggggaggccctggcggggatgacggtggagcagaaggcggcccagctcctggtggcggggatcgagggcacagagccgggggaggacgcggtgcaggccgtccagggctatcaggtgggcggcgtgattctctttggccgcaacgtggagagcgcggagcagctggcggcgctcaccaacgggctgaaggagctcaacggggactacacccccctgttcctctgcgtggatcaggaggggggccgggtggaccggatgccgccggaggtgaccgatctgccctccgccctggactttggttccattgccgaccccgaggctcggatggatgcctgctttacgctgggccagaccctggcggcccagtgcgctgccttcggcttcaacatggacttcgcccccagcctggacatctggtccaacccggagaatacggtgatcggcgaccgggcctttgggacagatgccgcaaccgtcaccggagcagccaatgagaccgccctgggcatcctgtctgggggcgtcatcccggtggccaagcacttccctggccatggggacacggcggtggactcccactacggcctgcctgttgtggacaagagcctggaggaactggaggagctggagctgcggcccttccgacaggccatcgacactacctgcgtctacggtacctatgggggggacacctccattcctgccatcatggtggcccacatcctcctgagtcagatcgacccggacaacccggcctccctgtctcccgaggtggtgacggggctgctccgggaggagatgggctatgagggcgtggtatgcaccgacgacctgaccatgggggccatttccaacacctacggtatgggggaggccgccgtactggccgtggaggccggatgtgacctgctgttggtgtgccacggcgcggacaacctggccgcggcccacgccgccctggtggaggcggtggaaagcggccgcatctccatggagcggctggacgagagcgtgtaccgcgtcctctccctcaaggccgtctacggcctgagcaacgcgccggtggaggcgccggacatagaggtattgaatgaccggattgcggccctcgaacgctctatagaggcagatacatcgcagtaggagaggatagaaagcagccccggcggatttgtccgccggggctgctgttattggcttcagttggcttcgatgtagtccgcgaaggcggccagacagcggttagcctctccgcgggtgagggtgcccctggggaggaagaggtccccccgcagtccggcggcggagagggcccccgttcggatacagaactccaccgctgggcgggcccagaccgcgatttcgccgcagtccagcagcgcggtggcggaggggccggaggacggggtcttcagccccaggaatttggcgtaattgtagagcatgacggcagcctgctcccgggtgacagtctgggtggggagaaatttgcctgtcccattgccgctgaccacgccagtctcggcggcccacaccgccgcgtcgctgttggacacgtcgataaaggcggcgctggctccgggcttgggctttccggctatctcatagagcatggtgacaaactccaggcggttcagcgggccgttgacggagccggtgtagagactccattcgctgctccgctggggggagagcatgcccagcaggtgggtctgctcggagagatacccggccaggactgcggcggggatgccgctctgggcggcaaagcggctgtcacgggcggcggaccagaggggggtgcagtccgggaagttgggggcggacaggcggtcggcggacacggctacgcggaaggtctgcccgtcgtccaccagggcgccctcaaaggcgaggccgtccacccgctgtccctcagaagcccccagatagagggcgtagtccataccatagagcacgtcggcaccctctccgccggagatggagccgtccggctccgcctgataggcctccgcgctgcggtccagccactggcgcagctcggcgccggtgagctccaccaggacgacggggctgtccccgggggccagcgcggcgcagtcccgcagggagagcgccgcagtgtcatcctccccggagaaccgggaagcggcggaagcgccgcccagggcggcgggagagagaagggccgcgtcggcatcggcggcccacagcatggcctcggccaccagatccaccgtgccgctctgcacatacaggggagagccctcctctgaccagtcgccggacagggtgccgacggcagcctgcatgcggtcagacgctgcgctttgggcggcggatagggccttgttcaggcggtcgtccggctcatagtcggacagggggagcagggtgctctcacccaccacggcctcccccttgggggagagggtaattgtggtgcgggtcagggacgtgccgccgccgctgaccagggagaccggctccccgtcggcgttctggagggtctccgccgccgcctcgccgtggccgcccaccagcaggtcgatgccggtggtctccgcagcaaagcgggccagttcgtcctgtccggcgtggcagaccaccaccaccaagtcgcagttctccttttccagccgctcctgccagtagccggtccactcccaactatagctgccggaggtgttgtcccggtgggcaaagcgcacgccggagacaaaggactcggggagctcctccggcgcctccatggcgcccaggcccagcacgccgatgcgcaccgcgcgccggcccagctccacagtaaagacctcgtaggcatcctcctccgggctttgggtgtcctcgtccaggtagttgcccgagaggacgcgcaccggggcgccgtcctccgacgcttcacccagggcggcgaagaaatcgtcccgggcctccgggcccaagcggaattcacccacagcgggcaccagggcgtcatagccgatggcccgcagggccagggcctccgccgcgccgccgtcctggaccagcccgttgtccaccgcgtcaccgctgtccagcagcagggcggcgtccaccgaggcccgctccgcctccatggcggaggccacattctgatagctgtactccactgcctccccggtcacggggtcctcacggtagagccgcccccccatgtccccggtggtgtagatgcccagggtgggggcgggagtgtccgccgccgcggcagtgccgacagcagcggccagcagggccgcgctcagcagaaccgccgggcaccgtttgagaaaatgccgcatccgcgccattcaaaatcgcctcttttcgctccatacaaggagaagctttgttccgttcccagccattatacgtcccggccggacgggatgcaacggattgggggcgaatgttaagaaaaagaaatattccgccgccaaaaccgaaaaaaggtcccccgtgcgtttgggacgcacaggggacctggggaattggggacttagcccagcctgcacagctcggcggcggtctgggcggccagccgggcattgttgaacaccagttggatgttggagtccaggctgtcaccgccggtgagctccttcaccttggccagcaggaagggggtggtggccttgccgtggatgccctgggcgttggcctgggcgacggcctcgtcgatggccctgttgatcacctcgtggtccatggcgaactcctcggggatggggttggtcaccagcatgccgcccctgaggcccagatccagggaggcccggaaggccgcggcgagctccgcgggggtgtccacccggtagtccacctcgaagccgctcttgcgggtgtagaaggcgggcagctccttggtgccgtagccgaggacgggcacgccgtgggtctccaggtactccagggtgaggcccagatccaggatggacttggccccggcgcacaccaccatcacgggggtggaggccagctcctccagatcggcggagatgtccatggtggtctcggcgccgcggtgcacgccgccgatgccgccggtggcgaacacctggatgcctgccatgtgggcgatcatcatggtggtggtgacggtggtggcgccgtcggccttgcgggagaccagcaccgccagatcccggcggctggccttggtcacgtcctggcccttcttgcccagatactcgatctcctcggcggtgaggccggccttcaggcggccgcccagaatggcgatggtggcgggcaccgcgccgttgtcgcggatgatctgctccaccttgagggcggtctccacgttctgggggtagggcatgccgtgggagatgatggtggactccagggcgaccacgggcttgcccgcggccacagcggcggctacttcaggggcgacgtccagatacggattgagattcatggtgattacctcctgtaaaatatatttataaaatacggattgcggagtgatcaggccggagaggaagggccggcggccgggcggcggagatcaaagcgccacacggccagcgcgaaggagcagaaggcggccacctcgatggcggcgccggtataggagccggcgatcaggttgtaggcgaacaccggaggggagttgaggagaaacagcagccgggtcaggcgcatgttccgcgtccagagggcggcggtggtgagcatcatggccgcgcccagcagaaggcagtaggggccgtcccaggtgaggaggggggccgccccataacaggccagaaagagggccagccaaaggcggctgcgggcccagggccggtcgttgtaggcgcacaccacgccgcgggccaggcccagcaggttgatgagcacccccgtccacgcccccagcagcacgtactggacgacccagagcacgcagcacacaagctgaaggccgatgatcttccggcggctgccggtctggacggcggtgaaggcgagcagggagccgatcagccccaggatttgcgcggtccagaaggtcaaggcgtctccactccctccccgaagcccgccctccggcggagcagccgggcgctcatgtcggggttgatcgtctcggcgctctccatggcgatggccccggcggccatggcggcccgggcggtgtcctccagcccggtgccctccagataggcccaggcgatggcggccatgcccgcgtcgccgcagccggtggtgttcaccatctctccgggacagcagggcacgtgtacccgcccgctgtggtcggcggcgaacaccccgtcgccccccagactgatgaatacccgccgcaggccggtggccagcagggcgtcggccgcggcgttgaggctcgccgcgtcggtgatggacacgcccgagagcagctccgcctccagccggttgggcttgagggtgtggagcttccccagtacggggcgcagcttctccgccttggcggtggacaccgggtcggcgaagatgggcaggcggatattctccgccagccaggcgatggactgggccgggatgttggtgtccaccaccaggagctgggcattttggagcagccgggcccgcccggccagaaaggcgggggtgacatgctcatagatctccatgtcgctgaccgccagggccatgtccccgtgcccgtcggtgatgaacagataggtggaggtggccccgccgggcacggtgaggcactggctgatgtcgatgcccagctcgccgcaggaggcggcgatacgctgggcgttcatatcgtcgccgaaggcggtgagcatccgcacgtccagccccatcagagccatgttgtgggcgatgttgcgccccacgccccccaggctcatgcgcacctggccagggttggagtccgccgccaccagctccccgtggggccgcccgccgatgtccaggttgacgccccccacgactaccacataaggagcggtgcggacgatgtagcccttgccggcgatatggccctgcttcatcagattggagatgtgtaccgccaccgacgagcgggcgatgcccgctttgtccgccagctcctgctgggagatcagggggttctcctcaatccacttgagaatctgccgttcccgctgagtcatggcctctcctcctaaacataagctgttgatataatcatatgcttatagagggcctctgtcaagaggaatctccccggttcaggaactttttccacgtcccgccgtccaagaggggaaaggaggaatgttccatgaaaaaaagcctgctgctgttcgcccttgtgctcctgctggccgggtgtgcatccaccggaaaccaggccgcccccgcggggggaaccccggcgggctccccctcggaggagcccggcctgactgcgggggctcccgaaaaaatgacttgccgcattgtggatggggcggaggaaggggagctggtgctggctggcccggggggcgcgggggacgtgtataccctggatacagaggggctggcggtggatgggcccctggctgacggggcgatggtggaggtcgggtttgacggaatgattctggagacctatcccgccaagttcggccatgtgaccggcgtgaccgtgctggaggagccggcggatgaccgctgcgggctgtatctccaggtgctgtccgacctgtgggaggtagatactgccctcaacacagggctggaggagctgggggtggatctctccggcctcaccgacctggctgagagtgagaaatccgccctggcctgggtgtttgggaacgcccacggcctgatgcccatcaccggtactctggaggagatctgggaggcgggctacctcacccccatgaccgagccggcggaggggtacgaggacagcgtggccctctaccgctgggaaaacggctgcctgttctccctgtccggctccgccgaggagggctttgaggcgcagaagtgggcctccggcctgggggcgtatttctttaccgactgcaccgcccggcagaatgccgacggcacctggacctatgaggtgggggtcgaggccatcgcgtaggggcggttacaaggggccgcccctgcaggggacagggcgagcgccctgttccgctgaacccggagcatccggtctctgtggcgcgccccggcggggagcaaaccgaatatcggcccattggggccgtctgtccgaaatcggtggacagacggcccttttttcgctatagtggggttgaaaggggggaagggcatgaaggtagagctgcgcatcgacccgggctgcgacgggatgtcggttgtgatcaacgcccccgccctcaccgacgaggtgaaggctctggccgcccggctggaagggggcggcgtcctcgtcggctggcaggggggccgggccgttcccctggccgcggaggacattctccgctgctacggcgaggagaagggcgtgaagtgccagacccccggcggggtgtacgatctgaaggagcggctgtacgagctggagggccggctggaccggcacactttcgtgcgcatctcccactcggagatcatcagcctgcggaagatcaccgccctggatctctccctcaccggcaccatccgggtgacgctggagggcggcgcggtgagctacgtgtcccggcggtacgtgaggaagatcaaagaggctttggggctgtaaaaaggagggaacgacatgctgttcgacgacaagaggagggccctccgccgggcgctggcaggggctctgctgggcctggcccgcggcgtggtgtgcgcctagggcggcggggtctctcatagcgggctcgcccagcgccctcgcgctggcgttcctgaactgcggtttaccccgcgggctggagggggtggggattgccctgtccttcgctctctatgccctgttcggggcggaggtgggggtggccaccctgcccttcgccggggacggccccgccctggtggggcggacgctggcccacttcgccctgacggcggccaccgtggggctgtgggcggggctcaacttcggcgtgcgtgagacggcggccttcctggtgcccctggtgctggtgtatctgctggtgtggctgggccgctgggtgggctggtacgccgaggtgtccgccatccgggagcggctgggtctggctccggggccctccctgttccactggcgggagaccctgccctatgtccccttcgccgccctgctgtgtctgcttctgccctttgtgctgcggctgtgcgacgccggcgacgtgccggtgctctccggcctgctctacccctacctcctgctgcccgtcggcgccttctgttccgccctgtccctggggaagcggcagggcttctgccccctctatcccgtggtgtgcgcggggctcctgttttgcttcgccctgctggcaaggctggtgtccaatgtggccgacgccgacatgctccccattgcctttctcgccgctctggcgggcaatctggccggcgcgaccctgcggcggcggaggggaggcgtggggaaatgatggttacgctggcgtgctggctggggattctggccatccccgccctggtctggcgctttgcgcccggcccggtttgccttaacgggagggcgaccctgcgcttcctgcccccggctctgctggtctgcacccttctgcccgccctgctgggcggcctcgccggggaattagccacggtgctggcgggggtctatctcctgccctttggctgcctcgccatagggatgtccctgggaaagcggcacggcctgtgccccctcttccccgtggcgtgcgccctgtgcctgctgatcgtggtaggaaagcggactcccgcgctctgcctcgttcccgccctctccgccctgctgggcaacgcggcgggggcgtatccccgggagaggggcggaacgggttaacgggccggatgccttttccggacgcacctggggtggagctgcgccgggcgccctttgaaaagcggcgggggcaagcccccgccctatgggcctgcggagccgtcaccggcagctcccggtgaagagagaggatgtgtgcttatgagacgaacggatcaatggcttctggggtgcttcgcggtcaccatggcggtctatactgcggcctttgccgcggccttttccgatctgcctctgaacataccgtcctggcaccagctcctgctcctgtacttccatgcgttccctatgttctttctccagctgctgctgtgccggcgggccagggcggtgtggcggcttctggtgcctctggcgcttctggcggtgccaggggtgatcttcctgagcgcggcgggctggatggtcatgggatggttcctgctcctgtggtggtgtgccgcgccgctgctggggagcgcactggcgtggctggtgtgggcagtctctctgcgaaagtcaggccgggggctgggaaaaccggccggaaggtgctataataggttcatctgaggaaaaatgagggatctgaatgggaaagaccggcgggaagggcatcagctatttcggcctggtggccatgggaatcgggtgcatgctgggcacgagctggctgctgctgacgggcacgtggctggagacggcggggggaccgctcaatctggtggtggccttcgccctgtgcatcatcattgaactgccgtttgccttcgcctacatggaggccatccccttgctccccctgcccggcggcgaggtggtgtactcctacgccgctttcggcagccgggggggcttcgccgtggggtgggcgggcatcctgatgaacaccatcgtgttctgctgggtggatctggccgccgtctccctgctggacgagctgttccccgccctggggcggacggcggtgctctatgagctgggggatttccccgtcaccctgcccaatgtggccatccaactggccctggcgggggccatcctgtgggtgcagctccggggggccaacgtgtgcgcctccctggccaagctggccacggtggtgctgctgatcatgtgtgccgtggggctggcggtgtgctttacccacttcgacccggcggtgtacgcctccgatggggggctggacttcgactttgccggctcggcctcccttttgtccctgctggtgttctccgtggccgggtgggagacggtgtccaaggctgccgccgacgcctccggccccgccgcccgcaaggcgggagccgccctcatcacctgcctgttcctggtgacgggcatcctctgcttggtgtccaccgctgtggccgggtgtatgccctggcgggaggcggtgggccgcaccgcccccttcgccgacgtgctggtgtccatcaccggcgtgcccgccgtgcgggtgctcttcctggccaccgcctttgtgggcgcggtgggggtgatgaactccaccctctactcctccgcccagatgctctacggcctgtcccgctttgcactggtgtcgagggcgttttccgccctccacccgaaatacggcacccccgcccgctgcatctggttcaccgccgccttcgtggtgctcacccccttcacgggcaggctcttctttctgcccttcatcaatatcgcttccctggccaccatcgtcatgtggatcatgtccctggccgcggtgctccgcctgcggcgtgcccggccggacctccgccgcccggtgcgcatgcccggcgggcgggtgacggctgtgctgggggtggccgcctcggttttcctggcgggcaacatccttctcccgttcagccccggcgcgctggacggcctggagtacgccctggccgccgccctggccgccctgggggtcctcctctacgggttccgcgaccgtaccctgtctgacgaggcgcgggaggcgcttatcttcggcggacccgaacggaggtagtcctgccttttttccctcagcccttgcaaaatggttgaaaaatggtatactactacccattgatactttatttttaagaatagagggagcgaccaatggaacgcacaaaaatcgcacagatctttgccgaccaggagcagttcggcgggaaagaggtgctggtgtccggctgggcccgcaccatccgggatatgaagaccttcggcttcgtggagctcaacgacggctcctgcttcaagaacctgcagatcgtcctggacgccaacgccctggacaactacagggagatcgccggacagaacgtgggcgcggccctgtccgtcaccggcaccgtggtactcaccccggaggccaagcagcccctggaggtgaaggccgcctccgtggcggtggagggcccctccgcccccgagtaccccctccagaaaaagcgccacagcgtggagtacctgcgcaccatcgcccacctgcggccccgcaccaacctgttctccgccgccttccgggtgcggagcgtggcggcccacgccatccactgcttcttccaggaccggggcttcgtctatgtccacacccccatcatcaccgcctctgactgcgagggcgccggcgagatgttccgggtgaccaccctggacctggagaacccgccccgcaccgaggacggcaaggtggactacagccaggacttcttcggcaagcccgccaacctgaccgtctccggccagctcaacgccgagaacttcgccatggccttcggcgacgtgtacaccttcggccccaccttccgggcggagaattccaacacccagcgccacgccgccgagttctggatgatcgagccggagatggccttctgcgacctcaagggcgacatggacgtggccgaggccatgatcaagcacatcatccgcaccgtcatggagaagtgccccgacgagatcaacttcttcaactccttcgtggacaagggcctcaaggagcggctggagcatgtggcctcctccgacttcggccgtgtgagctacaccgaggcggtggagctgctccaacagaacaacgacaagttcgaatacaaggtggagtggggcaccgacctccagaccgagcacgagcgctatctcaccgagcagatcttcaaaaagcccgtgttcgtcaccgactaccccaaggacatcaaggccttctatatgcgcctcaacgacgacggcaagaccgtggccgcctgcgactgcctggtgcccggcatcggcgagatcatcggcggctcccagcgcgaggagcggctggagcggctggagggccgcatccaggagctgggcatgcgccccgaggactattggtggtacttggatctgcggcgctacggcggctgcaagcacgccggcttcggcctgggctttgagcgcatggtcatgtacctgaccggaatctccaacatccgtgacgtgctgccccacccccgcaccgtgggcaacgcggagttctaatctatgtcaaattggccccggcgtccgcaccgaacggtgcggacgccggggcctgattgtttgccaggggtaggggcgacccttgtggtcgcccgcgggcggccataaaggccgcccctacaagtgtgctgaatggaaggtatggcagagaaagacaggccggtgcggcgggggcgttacggagtaagcccccgccgccggaagaccaccaagagaacagcctgggggaagttccaagaagggggaatcgcaattcccccttcttggccgtttcaaggggtggattgttaaggcgggggaaatcggaatcccccgccttaactggctctttcgcccctttctggccactcagaaaggggcccgccggaggcatgacaagaaaacagatacgaaaaaggttcccatggaaggcgtttcagcccggaataaggcgggccgatgtgggcatcggcccctacggagcaggccgggcggccataaaggccgcccctactgagccgcgaatgcacaggccaataggtgcaagagaggccgccccggggcgtcggcccctacgcaaaacgccgggaatcgaaaaaggacggctgaactgtcagccgtcctttttttcatatttctttaaaagatcttcaattgcctcatccagaagccgagattttggaacacgggtctttttggagagcgcattcaatggctcaaccaatttgttgtcaagagaagatataaacttcttacgatttaccaaaacagattcagccatttaaatacctcctatataggtactataacattaccactttttttaaacaagtgggttgcatatggtgacctaatggtatatattatgtaaggaggtgattgcaatggacggggaaaagacctgtgaaacctgccgacattttcgccggcactatgtaaaaagggggcggaattggtacatacccatcaagctgggccactgcggagaaccccgcatccggtacaagcagacggatacgcccgcctgccaccgctactccgaggcgcagaaaaagggcggctgaatgttcagccgcccttttttcaggcgttgtccttggccagggggagggtcacggtgaaggtggagcccctgcccaccgcgctctccagcgtcagggtgccgccgtagagctggacgatgtgtttgacgatggccagccccaggccggtgccgccgttcttgcgggcgcggcccttgtccacccggtagaagcgctcaaagacgcggctctgggcctcgggggggatgccgatgccggtgtcggacacggcgatgacggcctgcccgtcccggacggagacggcggtgtggacggtgccgccgggctcattgtacttgatgccgttgcccaccaggttgagcagcagctccttgagccgcccctggggaacggccacagtagcgggaccgccgtctacggagagggtgacctccgcggccttggcggtgggggtgaggaaagcggcggtgtcccgggcgatggtgagcacgtcggagcgctcctcgctctgggggatggtgaccgactccagctcagagagcttgagaatgtcgttgatgaggtcgatgagccggtccacctccacgccgatcatggtgatgaagcgcttctgatcctcgggagaggccaccatgccggaggccagcatgtcggtgaagcccttgatggaggtgaggggggtcttgagctcgtgggagacgttggcggtgaactcgctgcggatgccctcggcctttttgagctcggtgacatcggagatgaggatggacgtgcccacggcctgcccctcatactggcggccggagacgggggagacaaacaggcgcaggctctgggcgtcctcggtgagggcatccacgtccagcaccacggaggagtggcggacgcgggactcctgaatggcctcccgcaggcggcggctgcgggtgaggagcagggcgccgtcgtcctcctccccctcggggaagccgaacagggtgcgggccgcccggttgatggctagcacgttccccgcctcgtccagcaggatcagcccctcgtccatgcagtccagaatcaggcccaccttgtcccgctctgcggtgatggactggatatagccgcccagacgctccatcagcttgtcaatgtagcgcaggatggggcgcagctcgtcgtcggcctggtagtcctccagcccggaggcgcgggtgccgtccagcacgctctggagggcgctgcccacggcgctgagtggggccaccacctggttggcggtgcggcgggccagaatcagggccagcagcagtccggccgccgaggcgatgaggaaaccccatacgccgttccacactaggctgtcgatggaggacaggggcatggaggcccggcccaccatgccgtcggcaaagcgcttggacacgtagagcatggaggtgcccagggtttcggagtggcgcaccgcctcgccccagccggtggcggcggcctgctccacctcggggcggctgttgtggtcctccagcgtctgggggttggcctcggtgtcagccagaacggtgccgtcggtgtcgatgatggtcagccgcttgtccggcgcggcggcgtggaactgctgggccaggccgtcgggatcggtgatggcgctctgagcgtccatcagcaccagcagctcctgaagagtgttgcgggcggcgtccatctcccggctgcggaacaggagcacgcccactaggttggatatgagcagggcgcacaccacggtgatgagtgtggcgccgatgatgcgttttttcactggtcagacctcccaatcgggtgtttcctgcggggccgcttcgcagtgcttcacccgccccgcgggtgaaaagaaatcagaacgtccgaaggcgaatttactgcatagccgttggcggctttgctgccttacggatatggtgtgccccttgcgggtacttcgccggaggacacaactgcccgctccgccgccgcccggccggcgcggcggccgcgtattcaggggggatgcaaccccctggaggccgtcagaccattttatatcccacgccccggactgtagtgatgatgtcctcgcccagcttttggcgcagggccttgacgtgcatatccacggtgcgggtctcgccggtgtagtcgtagtcccagacggcctggagaatctcgtcccgggtgagggccacgccccggcgggaaaacaggagcttgagcagctcaaactccttgtaggtcagctccaccggctttccggccttgtgtacctcccgggcggcggggtccagttccacgtccccccaggtgagtacccggtcgccccggcgctcggtgcggcggagcaccgccttgacccgggcttggagctccatgatgccgaagggcttcaccacatagtcgtcggcgccgttttccaggccggccacccggtccatctcggcggagcgggcggtgagcatgatcacgggtacgtcggcggtgtcccgcccatcccgcaggcggcggagaatctccagcccgtctatgccggggagcatgatgtccaggatgtaaagggcgggcaggccgaggccctcctcgccggcaaagagggcctcgccggactcgtaggcccggacggcgtagcccaccgattgaaaataatagcggagcatctcacggatactctcgtcgtcctccacgaccgcaatggccttggacatggggacacctccttacccgagaatttcgccggtcacacagaagatggcccactgggcgatgttcaccgcgtgatccgcgatgcgctccaagtacttggcgataatgatgaggtcgatggcctggtcggcctcgtcccggttgcccgcaatgagctccaccagctcccccttgatggtgcggaagagggcgtccacctcgtcgtccagggcaatgacagcctgggctgcctcggtgtcccggttgacgtaggcgaagatggaacgcttgaccatcacgccggccttctggctcatggtgcggatgtcggccagggtgcgggtctgcttctgctccttgagcagcagggagatctcggcgatgttggcgcactggtcgccaatgcgctgtagatcggtgaccattttcatggccgccgagatggtgcgcagatcccgggccacgggctgctgctggaggagcaggcgcaggcagcggttctcaatgtcccgctccatctggtccatgctgcgggtcatctccacggcggacttggccgccgcgtcgtcgccggaggccagggactcggtgaccacgtcgatggcgtcctctgccgccgccgccatgtcgatcatttcatagttgagctcctggagctccgcgtcaaaggtctttctcatggggcctcctttttaaccaaaccgcccggtgatgtaatcctcggtgcgcttgtccctgggcatggagaagagctgggtagtgtccccaaactcaatgagctggcccagcaggaaaaaggcgcacttgtcggacacgcgggtggcctgctgcatattgtgggtgacgataacaatggtatatttctgcttcagatcggcaatcagatcctcgatcttggaggtggagatggggtccagggcggaggtagcctcatccatcagcaggatgtcgggctccacggccagggcgcgggcgatgcacagccgctgctgctggccgccggacaggcccagggccgacttcttgaggcggtcctttacctcgtcccagatggccgcgccctgaagggacttctccacaatgtcgtccagcctgctcttgctcttgatgccgtgggtgcggggaccgtaggccacgttgtcatagatggacatggggaaggggttgggcttctggaacaccatgccgatctgcttgcgcagccaggttacgtccacattgggggcatagatctcctgcccccggtactgcaccgagccggtgatcttgatgccgggcaccaggtcgttcatgcggtccagtgtcttgagaaaggtagacttgccgcagccggaggggccgatgagggcggtcacctgcttttcggggatatccatgctcacgcccttcagggcctgggtggggccgtaccagaggtcaaggcccttggcggagaggatgatgttttcgtccatggtaagggctccttattttttctttaatgttctgcccaccagcttggcgctgaggttgatgaccagggtgagcagcatcagaatggccgcgatggcaaaggcaacgtcgaactcagcccgctcacgggcgtacacatacagggccacggtgagggaggcgccggaggagtggatgaagttgcccaccgagccgaaaaagttgttcaggctcatgcccatgcccgcggtaaagagcagggcggccgactcgcccacaatgcggccgatggccagaatacagcccgtcacgatgccgtccactgaggaggggagcaccacggtgcgaatcatatgccacttgcccgcgcccaagcccagggccgcctcccggaaggactgagggacggtcttgagggactcctgggtggtgcggatgatggttgggatggtgacgatcaccagagtcagcgagccggccagcagggaagcctgaagccccagaagctggcagaaaaagagcatgcccaccaggccgaagatgatggaggggatgccggtgagggtctcggtggcaaactcgatggcggccaccaggcggcggttgcgggcgtactcggtgaggtagatggccgcgccgacccccaggggcagggtgatgatcagggtgactcccacgagatagactgtgttgaggatattgggcaggatgccgatggtgtccttgatgaagctgggctgggtgctgaggaactgccaggtgacatggggcaggcccttgaagaagatatagccgatgatgaagagcagcagggcgcaggtcagggcggcgcagaagtagaggagaaagcggagaatccggtcataggctctgcgccggccggaaagaggcttcatttccatatcagtatatcaccccttcttccgcttgagaagcgtattgagaacaatattgatgagcatgatgaagagaaagagaaccagggcgatggagaacagggcctgccgttgcaggccggaggcgtaggccatctcgctggacacggcggtggtgaggaagcggacggactggaagagaccgggcatgttggccacattgcccgccaccatgatgaccgccatggcttcgccgatggcccggccgatgcccagcacgatggaggcggcgatgccgctggaggcggccgggacgctcacccggaacacggtctcgatatgggtggcgcccagggccagcgaggcctcctcgtactccttgggcaccgccttgagggcagtctcggatacggagatgatggagggcagaatcatgacggccagcaccagaatggcgcagaacaggctggcgccgtcgggcaggtggaaggccactcgcaccgcaggcaccagaaccatcatgccgatgagaccgtacaccacggaagggatgcccgccagcagatccactgccgggcgcaccaggctggccagacggggaggcgctaccttggccaggaacactgcggtcatgaagcccaccggtacgcccaggacaatggccccggcggtgccgtagatggaggtaaggatgaagggcagtatgccgaatttgggctcggcggcggtggaggcccactcagtgccgaagaggaagtccaccagcccgatctcgcggatggcgggcaggccggacacgatcaggtagatactgatgaagaggacaaagacgaccgcgatcagaccgcagacaaaaaacaggaggttcataaagacttccagcggtcggagcttctgtttcatggcaaataaccggcctttcgtaatggtgtaatcatgccgaatgccccctcgggctcgagggggcgatccggaagagagggacggattactcggctaccggcacagcgccggcgccggcgatcaggtcggaggcatcggcggaggtggcgaagtccacgaacgcctgggcggcctcggagagcggggtgctgtcactgacgatgaagttgaagttgcgctggatggcgtagctgccgtccagaacggtctcctccgtgggttccacgccgcccacggtgatggccttcacggtctcgtccacggcggacagggaggcgtaaccgatggcgttggggttggaggccacggcggcgatcacctcgccggtggaggtcagctcattctggtacttgcaggcgtccttggtgccggtgatggactcgaagccgtcgcgggtgccggagccggcctcacggcccatgaagaccacctggccgtccgtgccgcccacgtcggcccagttggtgatctcgccggtggcgagctgggcgatctgctccacgctgaggtcggccacggggttgttggggttgacgatgatggcgatgccgtccttggccacggtgatggccttgacgccggtttcgtcatccttcaggtcgcgggaggccaggccgatgtcgcaggtgccgtcctgggcgccggtgacgccggcgctggaaccggagccggtgtagttcaccgtgatgccgggctgcacctccttaaagccctcggtcaggtagcccatcacgctctccatggaggtggagccgttggtgttgacggtgccgctcagggctgcggtggattcctgtgagggggtctcgctgccgccggcggcgggagtattgacgggatcgttattgccgctgccgcagccggccagcaggccgacgcacagggcggcggagagcatcagagcaagggttctctttttcatgacattcattctccaatcatgcatcgttttggttgccttcgggaacggttatcagtatacagacggattgtaaagttgtccttcaacgaattgtaaagagtgtgtaaagccgctctccctcataggattcccggctttacaaaaatggataccaaaaaagcggccgcccgtcgggcggccgctttgcggcggggacatttgattcagttgaggcccagccactgcttgagatcccagagatccccggccacgtggtcgcaggggatgcgtctggtctggaattcctcaaaggtggtggtgccgttgagcaccgcgcagaagtgagtgccagcccgccgggcggcctccccgtcgatgacggtgtcgccgcagaacagaacctcgtggggttccagccccagggcggtgagggaggccagaagtccctccgggtctggcttgggggcggaaacctggtcgccgcccagaatggaggacagcaggggagtaatgcccctggcctccgctacgtcgcggatggtggcggtcttcttggtgctgacaatgccggtgggaataccacggcgcttcagggcggtgagcagctccagcgcaccaggaaacagccgggtgacggacacatgcatggggccggctttctcggtgtagagctgccggaactctgcccggcgggcggggtcggcctcgccggagagaaaggtgaactcgtcttccaaaaccatgccgatggtggggcggatggcttcctccgtgggctcgggcaggcccatccgcccaaaggcgtaccggaacccggccacaatggcctcggtgccgtcggccagggtgtagtcgaaatcaaaaaagacagctttgaagttcatcgctcagaaagctcctgacgtttcatattgcttgcggccggtggtgctggggatgcgcagctcgtcccggtacttggccacggtgcggcgggagagggagcagccctgggcggacatgagctcacagagcttttggtcggacaggggctttttcttgtcctccccggcgataagcttcttcagcagcgccttggccgcgtcgggggaggcggcctcgtcgcctgcggcggggcccaggctgcgggagaaaaagtagctcaggggatacacgcccatggagcactggatatacttctcctttaccgcccggctcactgtggactcgtggacgccgatgcgctcggccacgtcggccagggacaggggaaccaggtggccgggccccttgcggaaaaaggactcctggaattccagaatacactcggcgcacgccatgagggtggagcggcgctgctcgatggccttgaccatccacttggcctggcgcaccttgccggtcagatagtccttcacctggctgtcgtcactctccttcattaggcgggtgtagtatccgctgatgttgagggtggggaagtaatagtcattggtcagcagctcgaagtggtcggggaagctgaccacgatgatgtcggggttgatgtaggttagattctcccgggcggcgaagccggttccggggcgggggttgagggagcggatcacgtcgcaggcggcacgcacctcctcaggactggctttcagttcccgggcaatgaggccgtagcggctcttggacagggcgtccaggtggcgctccacaatacgtaccgccagctcgttcaccggcgtgcggcgcacgagctggagcttgaggcactcggccagatcccgggcccccacgccggcgggctccagggactgtaccacctccagggcctgggccatcacctccggcccgcagccgtggccggcagccagggcctccagaggctcgtccagccagccgttctgattgagactctccaccaggaacaccccggcgtccatcacctctggctccagctccagtacccggagctgggagaggacataatagtagaggttctcgtcgtcgtcctgtacggtgccgaagttgttaagggggctgtcctcctcctcggtgtcctgctggtggtagtagcggttctgcgggtcggtggactccagccactccagcttgcggcggaggacggagaactcgtcctgcttgtcataggtctcctccggctccagcaccgggttttcctgcaccgcctcctcgatgtattccagaagctcctgggagcccatctgtagaatctccatggactgcatcatttggggggacagggtctgcacctgcttctgtgtgagattaagttccaatgcctcggcctccctttgcgaaaaacggcgattttcattcgggagacagtataccacggaacggccggccattcaacctttcacccactccgtgggtgtagaaaaatcagggcggtccctccgccgccgcgttcagaaaggcctccgcgccgtaccgcaggcagcggcgcagccgggcctccccccgcttgatggtgcgggctacggtggacttgtccacccccagcttttccccgatctggcgggtgttgagctgctcggcgtagtagagcagcagcacctcccgctggcggggagtcacgtcctcccgcagcgcccgcaccaggttgcgtttcacccggctgagctgggcggagttatcggcggccatggcgcgggcgtataccgccatgtcggcggcgtaggccccgccccgcctatagcgtgtatttgccattgcggcagtaccccctctcgtagtagcgctcacacaggacggccagctcccgggcctcccggcacatggcgcgcagcagccggatacgcccctccagcagacggcgtccgtccccgtccgcccctctcagccggtgctccaggagcagcacccgctcccgcagggcggcggcactggcgcggtattcgcccgataattccagtaaggtcatttgtgtgtctgttctcctcctcttgttgtgtgcggccgcgctccagctcggccaggcaggcgggacagagtccccgctccccgctgtagagctctgagcggcaccgggggcaccagccccgcggcggaacccgctgcacatcccgcagcggatccgcccatacctctggctggatggcgcattcctcccgaaaaaaatttgtaaaaaaatataccactttcccttgacaaatccctccgtgtctgttaaactaaccttcgctgtggacgagctggtatgctggtgtagctcagttggtagagcagttgatttgtaatcaaccggtcgggggttcgagtccgtccaccagctccaacaagttcatacggaggagttcccgagtggccaaagggggcagactgtaaatctgttgcgattcgcttcggtggttcgaatccaccctcctccaccaaaaaatgtctcgccagtcggcggggcattttttcgcatctgggatctccaaatggtgatactgaacgaatgaaatagaacttatgttcgattacgaggctataataacaccaaatggagataacagtcaagggcttttttctggtttctgttgcaaatggtgataaaatatgataggatagccccaataatgggacaggagggacggacagatggagcgggagagcagccttggcggccgcctgcgccgcctgatggaggaagagggactcagctatgagcagctgggggagcgcctggggatgaacccgcagacgctgaaccgctatgtgctgggccagcgggagccgaaaatcggcacggcctccgccatggccgccgccctgggtgtggatcccctgtggctgttgggctacgatgtgccccgccgtaccggacagcggcagtccgtccccatcctgggcaccatccgggcggggctgcccatggcggccgagcagcggagggagggatgggcccacgccgacgtacccgatccggagggctatttttacttgcgggtcaccggcgacagcatggtgaacgcgggcatccgggacggggatctggtgctcctgcggcggcaggacacggcagagaacggccagattgtggcctgcctggtggacggggaggacgccaccctcaagcgcttccgccgccagcgggacatggtgcttctccagccggagaaccccgtctatgagcccaagctggtccccctgtcggattttgagaccggcgcggcccgcatcgtgggcgtggcggtgcgcctggtgcgggaactataaaaaggagagatgcggaatgctgaccgaggattggatgatgcgccaggtggacgccctggcccgctccattgcctatctggtgtttcagaaggagtccacgggctatgtgcccgccggggcggcggaggacgccgcgctggacgagctccaccgccgcctgctggagaaggtcaacgccggggacatcggcggggcggaggatctgctctttgcggagagcgatcccgacgaccggcgttatctggagctggcggtggacttctatgcccggctcaacgacctaaccgacgcccagctggaggcggcgggcttcggccgggacgagctggaggagggcctgcgggatatggcgggccggttcggcgtatcgctgctgtagtcagaggaggagttggaatgaaggtggaattcggagccatggaggagaccgccatccccgggttcaagggcggcgagggagtgacccacgccaggatgtttgcggacgggcgcaaccgcatcatgcgggggcggctggagccggggtgctccatcggcctgcacacccacgaggggagcagcgaaattgtgtacgttctctccggcacgggtaaggccctgtacggcggcggcgaggagcgtctggccccgggagactgtcactactgcccggaggggcacgcccactccctggtcaacgacgggacacagacgctggagttcttcgcggtggtgccccagcacgggtgaacggaatataggaaaaggcccggcggacgcgtttgcgtccgccgggccttgcttcgtctgccgccgggcggctattccccgcgcccggcgcggaactcctccatgaactgctcgtccttgcgctccaggccccgctccccggcgcggccctcgatgtggtgggtgaactcgtgggccagggtggtgtaaagctcatcctcccagtcctcctccgtccagtcctcctgcccggccagggcggcgaaggagccatagtagaggttgatatatttgcccatcatgtcgttgcagtactcgcccatgatgtagagctcgccgtgctccccctccgggtcttccttggcctcgggcagcagggcgatgccgccgttgagctcgtcgtagaactccggcgggaactcctccgccatctcgtccagcagcgcgcccgcctcgtcaaagctgagaatcataccgctcctccttttggcttcttcatggtgagggaaatccgctttttcttctcgccgccccccgcggccatggccgcgcggggatccctcatttccctgaactcgcccgaagtgaattcgggcgagttcagggttccggcctgccggccggaacgcttggcgcggcatgcgccgcgtcccgcctgcggcggggcccgtcaaggctggttcagccctttggcttcttcatggtgatggaaatccgctttttcttctcgccgccccccgcggccatggccgcgcgggggcccctcatttccctgaactcgcccgaggtgaattcgggcgagttcaaggttccggcctgccagccggaacgcttggcgcggcatacgccgcgtcccgcctgcggcggggcctgtcaaggccggttcagccctttggcttcttcatggtgagggaaatccgctttttcttctcgtccacctccagcacccagacggtgacgatgtcgcccacggcgcacacctcggaggggtgctgcacccggcggccctcccggagctgggagatgtgcaccagcccgtcctggtggacgccgatgtccacgaacacgccgaagtcgatgacgttgcgcaccgtgccggtgagctccatgccgggcttcaaatccttcatctccagcacgtcggtgcgcagaatggggcggggcagctcgtcccgggggtcccggccgggcttcatcagctcgcccacgatgtcccgcagggtgggcactcccacgccgcacgcctccgcggccttctcctcgccgtaggcggccacccgctcccgcagcccgtccaggccgccggccttcacgtcggacaggccgtagccgcacagggtgagcagggcctccgccgcgccgtagctctccgggtggacgccggtgtgatccagcacgttgcggctctccggcacccgcaggaagccggcgcactgctcaaaggccttcggccccagcttgggcaccttgagcacccccttccgggtggtgaaggccccgttctcctcccggtacttgacgatgttcctggcggtggtgttgttcagccccgccacgtaggacagcaagggggcggaggcggtgttgagatccacccccaccgcgttgacgcagtcctccaccacgccggagagggtctcgtccagccgtgcctggggcatgtcgtgctggtactgacccacgccgatgctcttggggtcgatcttcaccagctcggccaggggatcctggagccgccgggcgatggacacagcgcttcgcaggttcacgtcgtagtcggggaactcctccgcggccagcttggaggcggagtagaccgaggcccccgcctcgttgacgatcatgtagctgacgccgccgcccagccgcctgatgagctccaccgtcatctgctcggtctcccggctggcggtgccgttgccgatggcgatgtgggccacgccgtggcggcggatgagctttgccagcgcgtcgatggcctcctccttcttccgctggctgaacgtggggtagaccaccgccgtgtccagcaccttgccggtggcgtccaccaccgccaccttgcagccgttgcggtagccggggtcaagccccatggtgacaaagcccttcaccggcggctgcatcagcaggggcttgaggttgaggccgaacattttgatggccccctcgtcggcctgctcagtgagcaggccgcgcatctcccgttccaccgaggggaagatcagccggtcgtaggcgtcctcggcggcggcgcggacgaaggccatggcgggggcgccggggttcagcaccgcccggcggacggggatcagggccgcctcgcgctccatctccacgctcaccttgagcacgccctcccgctctccgcggttgatggccagcacctggtggccctgtacccggttcaggggggagcggaaggcgtagtagagccggtagacggtgtcctccggctccttggccgcggcggcggagaccagatatccctttttccacaccagctcccgcaggcgcttgcggatgtccgcgtcgtcggagatgcgctcggcgatgatgtcgctggctccctggagggcgtcctccgccgtctccacccccttctccgggtcgacgaaggcgccggcggcctcctccggcgcggggccgtccgcggcctgggcgaagagcagctcggccagaggctccagacccttctcgcgggccacggtggcgcgggtgcggcgcttctgcctataggggcggtagagatcctccacctctgccagggtggcggcggcgtcgatggcggcggagagctcctccgtcagcttgccctggccctcgatggcggacttgacctcctcccgccgcttgtccagattgcgcaggtattgcagccggtcggccagggtgcgcagggcggtatcgtccatggccccgtggagctccttgcggtagcgggcgatgaaggggatggtgttgccctcgtcaatgaggcgcaccacgttctccacgtgggcctcgctccggcccagctcccgggccagtatctgaatgatggtatccatagtggtactccttacaagattgggataaggctattttacgcgaatttgacggggaagtccagcggatttccttgcgctttcccttcggaagccgtagaataaaggaaaaggaggggaacggcatggacgagcggctgaacgagatcaacagggagctcaaggagctgaacgaggccctggcccggcagggacggatggaggcccagtggaaggatctccaggaccagcgggccgagcgggaccggcgggtgatggagaccggccgggtgttccgcaaggagcaggacgacgtggaccggctggagaaggggggcctgcgggccctgctgctctccctcaccggggacagggaggtgcgcctgtccaaagagcggcgggaggccctggccgccaagctccagtacgatcaggcccagcgggatctggaggatctcgacgggcgcatcggggtcctgctgcgggagaaggacggcctgcgcatcgaccgcatccggcgggacgccctgctggaggagaagggagagctgctcaaagccctgggcggggagaccggcgcccggctcgcccggctggaccagcagttggacgagctggagcaccagcgccgggaggtgggggaggccatctctgccggccgcacggcggaaagcgccctgtccgccgtgctggacagcctggacagcgccgaggactggggcacctgggatatgctgggcggcggcctgatggccaccatggccaagcacgagcacctggacgacgcccgggcgggcatcggctgggcccagcagtgcctatcccgcttccgcaccgagctggcagacgtgcgggacatggagattccccaggtacagatcggggagttcgccacctttgccgactacttcttcgacggttttttcacggactggtacatccagtcccggatcaacgacgcccagcggggggtggaggcggtggattcccgtgtatgcgaggtgctcaatcgcctgcaatggatggatcagaagctggcggaggagcagaacggcctgaagcgggagcgggaaagcctgctcctcaggagcagcggttcggactgaggacgggacaggttcggctcggctgtgggaagagatataaaactaaaacgggaggtgcggacaatggtggaagaaatggattccagactgaaacgctgcccctgctgcgggggcgagaccgtgctcggctccctgtacggctgccgcccgtgggtgacctactggcttccccggtaccggagcctgctgagtccttttttctccaggcggaacatcgagaagagcgggggctttctcctggccaaggggcgggagtactggtaccgcaccccgcccgcgcccaaccagagctattactgccccaactgcaagctgctcctcacccgggtggacgggttccgcaccccgtagccacaacatggtatggtacgaaaaagcgtgcgcgcctctagtgaggcgcgcacgcggagactgtcgataaaccctccagcgaaaaggattcggagggaaggatagtgtgaaagggaaccgtcagggttccctttcgcgttggatcaaacaactttttgaaacgtttctaaagtttcaaaaagttcggcagcctgtcgaaaagactttttcgacaggctgagcgtgcgcgcctctagtgaggcgcgcacgcggcctgttcggagatccgcttgaggtagggcagctcctttttcagatcgctgcgcacgctcatgtgccagaaaaattcccccaaaaagagcagcttgtggatggggtcctcccgcaccagggcggagaagagccgccgccaggagtagattttccggctggcccggatgtgctccagttggagctggtagggggtcatgcggcgggggaagtggacggcgttgccgttgtatttcgaccagtcctggtggagcagccggtcccggttggcctcgtataccggcgtgccggggacgaagtacatacactggatcagggtgccctggatgtggttctggatgacgaagtcggccagctggtcgcccacgcccgcctcctggtcgtcggagcccaggatgaacagcccccggacgctgaggccgtgggcgcggatgttgcggatggcgtcgatgatctcctgccgggtgctcttcttgtggtaggtggcgaaggaggcgtcgtccagaaactcgatgcccagatccagctcgaagaagccggcctgcctgaggagatcgagcatctcgtcgtcgaagcccacctcgtaccgggcctgtacgttgaagcggtagcggatgccgctgtccacgatggcccggaggacggacatggcccagtcccggtcggcgaagaagttgtcgtcggtgagccagagatctttggccagccggacgtggccccggtggaagaagcggatggactcccggatgtcggccaccacattttccggcgaacgggtgcggacgcggcggccgaagtggcgcaccagggcgcagtagtcgcagttatgggggcagccccgggaggcgtgtacctggggccagagggtgctgtgccccaccattttggaataattgtggactaaattacggtctgcaatcgtctcgaagcgctccggcgggggcggatagccggtggagcgcagctcctccccctccatccaggccaagccggggaagtccggccgctccccgcggcccaccgcctccacaaaggcgcggatggtctcgtccccctcgcccagcagcacatagtcgcagtggcgcgccgcctcggcgcagttcatggaggcgtggagaccgcccagcaccaccaggccccgcccgtgggcccggaggtggtcggccagctcgtagccccggacggcggcgaaggtgaaaataccgatgaacacgatgtccgcgtcctccacgtcgtccatgtcgatgcgggagatggactcgctgtacatataggtgtcatccaccagctccttgacaatggtagccagggtgttgagtcccacggagggggtacggatgtagcggtcgtagacgaagtagttgaggggcgtgggcttgtaggggcggttgcccggctcgagaaaacggattttcataggatacctcctcgccacggcggcttgggtatggggagcttgttttccctattctatcactttgtacctgtggatacaaggagagggaggaagaccgtctgtttggggggaaaacctctccttgacgatggcgggcgggcgtgggataataaaaggaaaccaatctttgggggagacagcatgatcaatcggctggtgcggcttttcatccaggactgcgacaatgtgacggacccggcggtgcgggagaagtacggcgtcctgtccggggcggtggggattgtgctcaatctgctgctgtctgcgggcaagttcttcgccggcgttgtgaccggctctatcgccatcacggcggatgccttcaacaacctgtccgacgcgggctcgtcggtggtgactctggtgggctttaagctggcgggacagaaggccgacgatggacaccccttcggccacggccgggcggagtacctggcggggctgctggtgagcctgatgatcctcctggtggggctggagctgggcaagacctccatcgggaagatcctccgcccggaggcggtggacttctccccggtatcggtggccattttggcggcttccatcctggtgaagctgtggatgagccacttcaaccggacactggggaagaagctcggctcggcggccatggcggccaccgccgcggactccctctccgacgtggtggcgacctccgccgtgttggcgggcaccctggccggacacttcgcccacctgagcatcgacggctgggcgggggcggtggtggccgtctttattctgaaggcgggttggggagccgccaaggacaccattaaccccctgctgggggccagccccgacccggagctggtccacgcaatccgggaggtggtgctgtcgcatccccaggtggtgggaatgcacgacctcatcatccacgactacggcccggggcggcggctgtgctctttccacgccgaggtaccccaggatgccgacatcctggaggcccacgacgccatcgaccacatcgagcgggagatccagcagaagttcggcattgagaccacggcgcacatggaccccatcgccaccgacgacgagtcggtgaaccgcctgcgggaacaggtggcggccctggcaagggccgtggagccggagatgaccatccatgacttccgggtgaccaaggggccccagcacaccaacctgatttttgacgtggtggtgccccaccgctgccgcctgcgggacgaggagctctgcgaacgcctgtccggggcggtgcgtgccctggacgagcggtattttgcggtcattcaggtggaccgggcctatgtggagacccggtaacccccttttacaaaaaattcacccttgtggggaaaaaagccggtataatactggagagaacaacatagaaaaggacggtgcgctatggccaggaaggtcctgattgtggaagacgactccaacattgccgagcttctccacctctatctggagaaggagggctttgagacagcggtggccggggacggcggcaagggggtggagctgttccgctccttccacccggagctggtgctgctggacatcatgctgcctgtaatggacggctggtcggtgctcaagaagatccgggagaacgacaagaccccagtcatcatgctcaccgccaagggggagacccaggacaaggtggccgggctggaggggggcgccgacgactatatcgtcaagccctttgagatgaaggaggtgctggcccgcatccacgcggtgctccgccgcttcggcggcgaggaggaggggagcggcgagaagaagctcaccttcgacaagctggtcatcaacctggactcctatgagctgctggtggacggcaagcgggtagatacgccgcccaaggagctggagctgctctaccacctggcggcctcccccaaccgggtattcacccgaaaccaactgctggatgaggtgtggggcttcgactacttcggcgactcccgtaccgtggacgtgcatatcaagcgcctgcgggagaagctggagggcgtcagcgagcagtggagcctcaaaaccgtgtggggtgtcggttacaagtttgaggttgtgagcggcgcatgaagagcctgtacggacggcagttcctgctgacggcggggatgattctcatctccttcgccctgctggggaccgcctttatcggcctgtcctaccagtatacaatccgggaaacccgagactccatggagcgcaacgccgattatgtggccgacttcaccgccaaggtgcgggccgaagggatcgacgtgcgggacatggcctaccagctctatgttgccaatgtggcccacatcgccaacgcctttgtcctggtcaccgaggcggatggggagctggtactctgttccgatggagcgacgatccagagcgggctgggggggaactatctgccccagtccatcgtcagccagctccaaaaggagggcagctacagcggtatgaccactctgggcggcctgtttccggagaaacgctttgtggcgggcacccccatcacggtcaaaacggtgaacctggccaccgggcagaccgagcagaccatgatcggcgtggcctatgtggcggcggagacctcggacatcaccgagctgtggcaggcgttcatctccatctttttctttaccgccgtggtggtactgtgcgtggctttcatcaccagctccatcacctccctgcggctgaccaaccccctgaaggagatcgccgagaccgcccgcaaattcggccacggcgagtacgaggtgcgggtgcagggctatgagaagcggaaggacgaggtgggcgagctggccgaggccttcaacgccatggccgactccattgccaagagcgaggcccgccgcagcgagtttgtggccaacatctcccacgagctcaagacccccatgaccaccatcgccggcttttccgacggcattctggatggcaccatcccgccggacaaggagcgcgccgccctacagaccatctcctcggaaacccggcggctctcccgcctggtgcggcggatgctggatctgtcccgcctccagtcggcggagaatgtcaccgcccaggagcagttcgacgtgtccgaggtcatgctgcgggtgctggtgagcctggagaacaagatcaatgcccgccatctggacgtggacacccagctccccgacgggcccgtgctggtgtggggggatccggatgccatcacccaggtgtgctataacctgctggacaacgccatcaagttctcggccgaggggagcaccatgggcctgtccatcaccgccaaggggggcaaggcccacgtggcggtacgcaaccacggcgacaccatcccccccgacgagctggccatgatcttcgaccgcttccacaagagcgacaaatcccgctccgtggaccgggagggcgtgggcctggggctgtatatcgtcaagactatcctcaacaaccacaaggagaacatttccgtcaccagccaggacggcgtgacggagttcgtatttaccctgacgcttgcatgacgccccggcagacggggcaagaaggagggcccatgcgcggctactattacgatcaaacgggggaggccccccggagcaccccggcgccgattttcgcagggcgccgccggcggtggagcggcgcagcggcggtgctcctctttctcctgaccatggccctgctgggcggcctgactgcggcggcggggctgtggagccacagccgcctggaggagctgccggccctggccgacagcacctggcagccccttcccgtccgggaggagctgccggaggaaaccacggtagagcgggcccccaccggggacggcaccaccctcaccatctcccccctgcccagcggcggggcccacagcctccaggagatctaccgggagaacatcgcctccatcgtcagcatccgggggagcaagggggacggcatgagcctgggcaccggcgtggtgatgtcggaggacgggtatatcatcaccaacagccacgtcattgagggatgcggcgccgtggatgtggtgctccaggatgagcgggtgttccaggccctgctggtgggacaggatgcacagagcgatctggcggtgctgaagatcgactgcgccggcctgacgcccgcccagttcggcgactccacccttctggaggtgggggacacggtggcggccatcggcaatccgctgggggaggagctgcggggcaccatgaccgacggcatcatctccgccatcaaccgggatgtgaacgtggacgggtacaccatggtgctgctccagaccaccgccgccctcaactcgggcaactccggcggggcgctcatcaacgaccggggacaggtggttggcattaccaacctgaaaatgcgggcctatgacaacacggtagagggcctgggcttcgccattcccaccaccacggtcaagacggtggtggatgccctcatcgcccacgggcgggtggagggccggcccaccatcggcatcaccggctataccgtgacggaggagctggcggaggagtacgggtgcccccggggggtggcggtacagagcgtccgggggggctccgacgcccaacggcagggcgtcctgcccaacgacgtgatcgtggcggtcaacggcgagacgatcaccgacatggaccagctccaggcgatcaaggaggggctggcggtgggggacgtgctcaccttccgcctctggcgcggcggccactacctggagcgggacgtggccctggtggaccagtacactctggaggagtagataaaaaaagagcgccccgtcctggggcgcccaagagagatgtgtgcgggagaatggaagaatcgcgggttggaattacactcgcctattggataagctgtgctcttatcatactatgatttccataaaatgtcaaatagaacttttgtcgaaaggcggcgaatggctaatgctgattctcaacggggtagttcaccccatggacgggccggtgattccccgcggcttcgtggcttttgagggggagaagctcaccgccgtagggcccatggaggccctgcccgccggggcggagggccccgtgctggatgcggagggggggcatatcctgcccggctttatcgacgcccactgccacctgggcctgttcggggatgccctgggctttgaggcggacgacggaaacgagtccaccgacccctgtaccccccagctccgggcagtcgacggagtgaatcccctggaccggggcttccgggaggcacgggaggggggcgtgaccacggtgctcaccggccccggctcggccaaccccatcgccgggcagttcctggccctcaagaccgacggccgctgggtggacgagatggtgctcaaggcccccgccgccatgaagttcgccctgggggaaaatcccaagtcggtctacaacgaccggaaggagacgccggtgacccgtatggccaccgcggccctcatccgggagcacctggccaaagcccaggagtaccaggacaagcaggccaaggcggacggagatcccgaccaggacatgcccgattacgacgccaagctggaggcgctggtgccggtggtggcgggagagctgcccgcccacttccacgcccaccgggccgacgacatcgccaccgccgtgcgcctcagccgggagttcgggctgaagctggtggtggttcacggcacggagggctatctggtgcccgagctgctggcggaggcgggggtgccggtcatcaccgggccatgcctcaccgaccgctccaagccggagctggtgggccagaccttggacaacccggccctgctccaccgggcgggggtgaagatcgccatctgcaccgaccacccggaaacgcccatccagtacctccccctctgcgcggccatggcggtgcgggggggcctgaacccggaggaggccctggcggccatcaccagtagcgccgccgagattgcgggcctctccaagcgggtgggcaccctcacccccggcaaggacgccgacgtggtggttaccaagggccaccccttcgactggaacggcggcataaaggccgtctttctcaacggccgccgggtcaaataaacggcaatggaccccgtccacagggacggggtccattgccgtcttacaggaatatgtacttgagcaggaagagtacggccagcaccgccagcacggggctgaccttcttccggctctccgcgccggtaaagaggtggacggccacataggagatggtgcccacggcaatgccctcggagatggagtagcagaagggcatggccaccatggtcagataggcgggaaggctctcccgccagtccgccgggtccagcgcccggaggctgccgagcatgctcagtcccacgatgaccagcgccggagcggtggcaaagccgggcaccgccagaaacaggggagagaggaagagggacaggagaaacatcagggccgtgaccacgctggtgaggccggtgcggccgccggcggcgatgcccgccgcgctctcggcaaaggtcgtggtggtggaggtgcccagcaccgcgcccacggaggtgcccaccgcgtcggagagcagcgcgccccggatgcggggcaggcgtccgttctcatccagcatgtgcccctgggaggccatgccgataatgccgcccagggtgtcgaatacatctacaaagaggaaggagagcaccactgtcagaaaattgagggtgaacagcccagtgaagtccatctgcataaaggtgggagccaggctggggacggccagaccagcggagaagtcgggcaggacgctggccatgcccagctcggcgttggggacatagaggccggtgagctgacagaggatggccgccccccacacggccaggatgcccagcagcagggcgcccttcaccctgcggatagtgaggatggcggtgaggaggattccggcgaaggccagcaccgcccccaggcccacggaacgtatctccccggaggcgatggcctcccggaaggggtagaccgacagcatggtggaggggtcggccacgatcagcttggagttctgaaggccgatgaagaggatgaacaggccgatgccccaggtgacgcccagctttagaggccgggggatggagttgaagatggcctcccgcaccgaagtgacggagaggacaatgaagagcaggccctccaggaagaccgcagccagggccatctgccaggagtagccctgtttgatgaccacggtgtaggcgaagtaggcgttcagccccatgcccggggccagggcgaagggatagttggagagcagggccatgagcagggtagcggcgcaggcggccagagcggaggcggtaaagaccgcgccccggtccatgccggcggcgcccagaatggccgggttgaccgccaggatatacgccatggtgacaaaggtggtcaggccggcgaagcactcccggcggaccgtggtgccgttctccttcagatgaaagagccggtcggcaagtacagatttcacaccaacacctcacaatagaacaacttgtgacacaacattccttattataggaaattcatggacacctgtaaagagtaaaaaagagcggaagggccgcgcccttccgctcttttttgtttgtatcccactcaggcgcgggccatgtgggccgcacggttgcgctgctggatctccagcatccgcatggcgtagagggagtcggtgatcaccttcagaggcttggagtagtccagcgcgaaaagccccaaaaacgagcgggcatccacccggatggagtcgtcttcattggcaatatatacgggcttatccgcctgaacggccagccgctgcagctctgcaagctcagagatggaatcaaacttcaattccagtaccataaatcatacctcctttatgggctgtttaaagtatagtatggacatgggaataaaacaataggcagactcaccgaaatcagaggtgggtggacaagaaaatgcgtacaaaaacgatgtgtcaactgattaagggtaaaaaccgtgtgagttttcgtaaaaaaataacaagaaaaggcatcttaagtggagggaaaggaaattaacacgcagttaaactcaaaaatagattattgacatatgccaaaaacgtgctataataaatggcataagccggaaacggaggagacgctatgcccagacccaaaaaatgcagacgcatctgtgccctgccccgatgcagcagcttcggccccctggagggggcagcggacggccgggtggagatggcggtggaggagtacgaggccatccgcctcatcgacctgctgggctgcacccaggaggagtgcgccgcccagatgggggtggcccgctccacggtgcagcaggtgtacgacaccgcccggcgcaggctggcccaggccctggtggaggggaggcgcctgcacatctctggcggagactatgtgctctgcccccggggagaggagtgtcccggccgggactgcgcccggcgggattgcggtatgggacgctgtggctgcggcgcgtgcctgcggtccaaggaaaattaggaggttatgaaaatgaaaatcgcggttacctatgaaaacggacaggtttttcagcacttcggccatacggagcagttcaaaatctacgaggcggcggagggcaaggtggtctccgcccgggtggtggagacaggcggctccggccatggcgccctggcgggtttcctgcggggacttggagtggacaccctgatctgcggcggcatcggcggcggcgcccgcagcgccctggctgaggcggggattcagctctaccccggtgcgtccggcagtgcggacgcccaggtggaggccctgctggctggcagcctggcctacgatcccaacaccgtatgcagccaccacgaccacggtgaggggcatacctgcggacaccatcacgagggcggtcacacctgcggcggccatgaccacggctgcggacatcacggctgattgggcatagaaccaaaaaattcataaaataaactgtgacaattgggaaacttcgtggtataatcaaagcaaggaggccgggcctcccggtctccggaccataaccctctccggagggtggaaggagctgaaaactatgaagttcgtgttcacagacaaaaaggtcaacctgcccaacaaggtccacgcctatgcggagaaaaaggtgggtaaattagaccgttattttaaggcggacgcggaggccgccatcgtcttcagcgtggagaaggaccggaacaacgtggagctcaccgtgcgctccggcagcacgatcatccgcgtgtctgagagtacctccgatatgtttgctaccatcgacgcggcggtctcctcgctagagcgccagcttcgcaaaaataaggcccgcttggagaagcgactgcgccaggatgcattcgtccgaaccgtggatgccgaagaggtttcctcctttgcccctgaggaggaagaggaggaattccggattgtccgcaccaagcgcttccccatcaagcacatgacggtggaggaggcggtgctccagatgaacctggtggaccacaccttctttgccttcaagaacgcggatgacggcggagcatttgccgtggtctacaagcgcaacgacggcggctacggcctgatcgaggacgatacctgaccgagtaaaacggcggccccgcagcgcggggccgccgtttttaacatccccttgacaatgggggatgatttgctataatagggatgcttgctcggagggcaactcattcagtggaaatgaggagccggataaggcacggactgagaagtccgcaccttgtccggcttttttgctgtgcaaacgcatagcagacctggccatgtgcccgcttacagcggcacggccatgggatgacagcgcgtgggccgggacggcccacatgcgcaaaaacttcatgcacccaggcccttgcatcgttttgtggtgtgttctgtgtgcatgaagccctatgccggaggagcgaagctcattgggagaaaacggaggatagaatcacatgaaacgaacgaaccgactgacggaggggaacatcctacacaccctcatccgctttgccgttccggtctttttcacgctgtttcttcaggcgctgtacggcggcgtggacctgctggtggtggggcagtttgccgccaccgccgatgtctccggcgtcgccaccggaagcatgctcatgtccaccgtgaccatggtgatcaccggcctgtccatgggcatcaccattctggtgggcgagcgcatcgggcggggtgagccggacgaggccggaagggccatcggcggcggcatctgcctgttcgcggtgttcggggtgctgctgatggtggtactgctggccggagccgagacccttgcccgccttttgcacgcgccagaggaggcctttgccgaaacggtggagtacatccgcatctgcggcggcggcagcctgttcatcgtggcctacaacgtgctgggggcggtgttccggggcatcggtgacgcccggacgccgctgttcacggtgatgctggcctgtgtgatcaacatcgggggcgacctgctgctggtggagggctttcacctgggcgcggccggcgccgccctggccacggtggccgcccaggcggtcagcgtggtggtctccctggcggttatccgccgccggaaggaccggctgcccttccacttctcccgccggagcgtccgctttgacgggcgcatcatcgcgctggagctgaggctgggcctgccggtggccctgcaggagctgctggtgggcacctccttcctggtgatccagaccatcgtgaacaccttcggcgtcacggcctccgccggcgtgggcgtggcggaaaaggtgtgcgtgttcctcatgctggtgccctcggcctatatgcactccatgtccgcctttgtagcccagaacatgggggccggccagccccgccgggccaagcgggcgctgggctacggtatcctgaccgctttcgccgccggactggtgatggcctggctggcctttttccacggcgacaccctgtccctgctgtttgccaaggacgcggcggtggctgccgcgtcccacagctatctcaaggcctacgccatcgactgcatgctaacccccttcctgttctgcttcatgggctactacaacggctgtgagaagaccctctttgtcatgattcaggggatcatcggcgccttcggcgtgcgcatccccatcgcctatctggtcagccgaatccccggggccaccctgttccagattgggctgggcacccccgcctccagcacggtgcagattgtcctgtgtctggcgatgttcctctacctggagcgccgccagcgccgggaggccctgtgcggggcggttactgggccataaaccgggccagaaattcccgggttctgggctggctgggggacgagaagaaggcgtcgggggcgcctgactcacagatccggccgtcagccatgaaaaccacctggctgctcacgtcgcgggcaaaggccatctcgtgggtgaccaccagcatggtcatgccgctggcggccagcgcccgcatgacggccagcacctctcctaccatctcggggtccagggcggaggtgggctcgtcgaagaggagcacctccggctccatggccagggcgcgggcaatggccacccgctgcttctggccgccggagagctgcctgggcctggcattgatgtagggcgccatgcccacctgctccaggtagcgcagggccctggcccgcgcctcctcacggctccggcggagcacctttaccggtcccgccatgcagttctccagcacgttcatattggaaaagaggttgaaagactgaaagaccatccccacccgggtccggtaagcggaggcgtccgtcccccggccggtgatggaccggccgtggaagcggacctccccctgattggggcgctccagcagattgatgcaccgcagcagggtggacttgccggagccggaggagcccagaatactggtgacatcgccggggtgaacagtgaagttcacatcccggaggacctggtgcgtcccaaaggacttggagaggtggcacacctccagaatgggttccagggtcatgtcagcgcccccccttcgtcctgggggcgggtccggcggcggtaggtgccggcggtcatggtcagggcgtcggcctggaccagctcgtagctgctctccccgtccatccgccgctccgccagccgcagcagggcggaggccgccagcgtcatgcaaaggtagcccagcatctcgatggccgcggaggggaagtacatggggttgacgccggtgatgtagcggtgggcggcgaagaactcggtgaagccgatgataaacatcaccgaggtgtccttgacgttgatgatgaagttattgccgatctggggcatgatattgcgcagggcctgggggaggatgacgttcaccatggtctgtacgtggctcatgccgatagccttggccccctcggtctggccggggtcaacggagaggatgccgccgcgaaccgactcggccatgtaggcgccggtattgatggagaccaccagaagggcggcggcccatacgttgtcaaagcgcatggcgttgttggtgaagtagggcaggccgtagtagaggaacacggcctggagcaccatgggggtgccccgaaagacctccacatagatacggattacggcccggagcagccgcagcaggactcgccggggcaggcggtcctgtgggtggatggggatggtgttgagcaggccgcaggccaggccgatcaggcagccgaggacggtggccgccacggccagaagcagggtgttcaccacgccgctcaggtagaggggggcgtacctggtccacaggagcgccatgtcctgtccgagtgcgagaacgcgttccatggcttacacctcgggctggacggctatggcctggtccatcagggtgttgaagtcgtcggcggtcatcccgtccagtacggcgtttatggcgtccagcagttcggtgctgcccttggccacggacatgccgatgttcacgttttcggcccgctccgcctcggaggcaaactggaagtcgccgtcggtgccggcgaagttgagcacgatgaggtcagagtcgtttgctgcggcggcggtggcggtgggcaggtcggtgcagacgaagtccaccgcgccggtctggagctgcatgaccatggcgggggcggtctccgcggcggtctggatctgggcatcggggatctggggcagacaggtgtcgtaccagatggtgcccgactgggcggtgcagcggccgcccgccaggtcggcgatgccctgggcggcggcgtaggcactgcccgcggtggtgaggcagacgatgtcggcgtagtagtaggggcccgccatgtccacctgggccatacggtcggcggtcatggactggcccgcgatggccacgtcgatggtgccgctctggagggcggggatgagggaatcccaggcggtggaaaccacctccagctcccagccgttggcgtcacagatgcgctgggcgatcatcacatcatagccgttggcataggcccccggcacgttggagacgggcaccgcgccgttggagtcgtccatctgggtccagttgtagggggcataggcgcactccatgcccaccgtgagcacgccgtcctccacgccgccggacggtgcgccggatgcggcggggggcgtggatgcggccggggcggggctctgagcggttccgccgccggagccgcaggcggccagagtgagggagagagaggcggtgagggacagggcggcgagggtgtttcgattcatgtttgtttcctccagtctagtttttcggcgcttttttaacaaaaaaagcgccatgaaccttcctggtggaagcgttcatggcgacaaagagcgtcgaaaaccggcctccctcgggcgcggcggtaccggggagcggcagtaccggctccagggcatgcgggcagagggaagcacagcgacgaaagcccttggcctcaatgatagcgctccacacagatgatatgtggcagtccgtgagatgttatcccaacggcccaggcaaccggtcctccaggcaggggaccggcccttcggcggaagggccctttctccggcggggtgctctgccccattgcagggtatgccggatactcttgcgattccgcgcctctatcattgcagcgggggtaatccgcaacaactggttcttgcggtttattataggcgtgcccgccgcccggcgtcaagggaaaagatcaccgcatctcgtcctgtgaaatcaaaaaagattggaaaaagcgacaaacattttggatttactccaggggatagacctgccaaggtgtgggggaggggatgggaacgggaaccaccaccccgccgccggcctccccttccgccggaggctcgtgccctgttatgggatgaattctggcgttcagatgctctgtggtgaagccgctgtcggcaccggtgccgtaccacgccagcacctcggtcagccaggtggactgtccggcatcgggggagaggtattcaaaggagacgccggtgccgcccgccaggaagtcggcagcgcaggtagtcagcgtccggccgtcagactggccgcagaaggaggccgtggtgacgggaatgccgttgaccgcctgggtagcggcctcctgatacaccacactgcggggggggagccggccgggggagagggcgagccgcaggcggtcgtccccgcgcacaccggtgatcaccacctgcaatacatctcccttctcgttgtaaaaaacttggccgtccagtccatagccctcccacagcagggaccagggaacctcccccgtgccccccagagcggtgatgatctcctgggcggtcagcttctcctcaaaggaactcaccccccaatcccggtccgtcaaccggggagagaaatcagtgcagtcggggaaatttagggcgggtatgtcgaagaagttgtgggcctccccttcggcaaagggcccggggcccacagtgagggtgtgctcccaagcgggagaagatgcagccggggcgggggtggcggccatgccggcggtggggttggggatgggggcggagccgcccagccagagcagccgcccgcccgccacagccagcacacagcaggcggacagcgccgccagccggagggtcagccgccgggcgggcctgcgagggcgcgccccttgctccgccgcctccagcaccctttgccggagtccggcgggcgcggtgatacggtccatataagagcgatagtgcttcattcgtattctcctttcagcacttggcgcagtctggtccgggcgcgggtgaggcgggagcgcaccgagccctcccgcaggccggtgagggcggcgatctccgcggtctggtagccctcatagtaatagaggtggagcaccgcccggtcccgggcgggcagggcctgcatagcctccagcagcgtcccctcctccggcgcggcggcgggataggcgtccagcagaggggcggtgcgcctccgccagggggcgcgcaggcggctcttgcagccgtttaccgtcacccgcagcagccaggcccgggcgtgggccgggctctcaaagtccggggccttttccagacagcgcagaaaggcgtcctgcaccgcgtcctccgcctcgtgggcgtcgcccagaatggccagggccgcgcggtacagcgtggtttcgtaggtgttgacaagttcctccaaccggttggggccgtccatctcggttccccctttcaccctatatacgctttggaacggcaaattgttgcagggggtgtaaaacttcatgcgcacaggaccttctttgcccggcaaaggcggagcaaaaaagacgcgggacggatacttccgtcccgcgtccggcgggtaaaattcagttcttggccgcgtgcagcggggccacgtcgtccttgccgacgatgagggtccgccagatgaagatgcccaggaacagggcggcggccacgatgcccaccggataggcgatggcggtggacaggcccaggcactcgggggcctggaagaagtaggtcacggacaccgcggacatgaaggtggcgggcagggccgcgatgaagcacgccttgggcggatagccgaacttgtgcaggaacacggcgccggtccacagcacgatcatggccagggtctggttggcccaggagaagtagcgccacagcacgtcccaggggagggccagggcgattaccgcgcccacggccagcaggggcactgacagggcggcgcgggggcccaccttggcctggtcgatgtggaaccagtcggcgatggtcaggcgggcggagcggtaggcggtgtcgccggaggtgatggggcaagcgatgacgccgatcatggccagcacgccgcccacggggccgagcagggtggtggagatctggtataccacgtcgcccgcgccgccggcggcgatggcgttggtcaggccggtcatgccgtccagcagggagccgtggttggtgtagaaggtgacgccggcggcggcccagatcagggcgatgacgccctcggccaccatggcgccgtagaagatggtgcggccctgcttctcgctggtgatgcagcgggccatcatgggggactgggtggcgtggaagccggagatggcgccgcaggccacggtgacgaacatcatggaccacttgggcaggctgtcggggtgcaccacggtgaaggccgcggcggtcagctccggcatgtcggagccgcgggtgagcacgatggccccgccgatgcccagggccatgatgatgaggcagatgccgaacacggggtagagcttgccgatgattttatcgatgggcaggaaggtggcgatcaggtagtagaccatgatgaccaccagccagaacatggtgcccagcatgtcgggggtcagcttggccagcaggccggcggggcccacggagaagttgacgcccaccatcaccagcagtaccacggagaacacccgcatgataaaggtgatgaccttgcccatgtagaggcccacgacctcggagatggacttgccgtcgttgcgctcgctcatcatgccggacaggaagtcgtggacgccgccgcccaggatggtgccgaagacgatccacaaatacaccaccgggccccagcaggcgccggacagggcgccgtagatggggcccaggccggcgatgttcagaagctgtaccaggaagatgcgccaggttttcatgggtacgtagtccacaccgtcggggtgagccacagcaggggtgggacggtcgtcgatgcggaagatcttctcgacgagcttgctgtaggtgaagaagccgacgatgaggagcaccaggcagacaaaaaatgtaaccatcagtgattcctcctcagactgtttggctccgtgccgcctctcagtcctgcacggaaccggcgggagctgcggcagcatgccggccggcatgcacagggggcccgggccccctgatgcgctgctgctccaattcccccaaagcggcgcgcgtgggaaacggcgcgcctctgctaaagcacttttattatacttccccgatgggaaaagtcaagggcaaaattgtatgaaatacggtgggataattgcaaaacagagggtccatgtgttatactagcgatcaaatgaagctgagaaatgcttgagagaaacgaggttgaataccgtgaagaatggaatcaaggcggtggttctggcggcgggcaagggcacccgcctgcgcaccgagggggtggatctgcccaaggtgctgcggcaggcggcgggccgccccctgctgggctatgtgctggaggagctgtccttcctggagaaggaggacgtagtgctggtggtgggttacgagcgggaaaaggtgctggcggcctacccggagtacccccacgccgtgcaggagccccagcagggcaccggccacgcggtgcagtgcgcccgggaggccctggcgggctttgacggcagcgtgctggtgtgctacggcgacatgcccctcatgcgccgggccacctacgagtccctcattgagacccacaagcgggagggcaacgactgcacgctgctctctgccgtgtccgacgaggagctgccctacggccgcatcgtgcggaaaagcgacggctccttctcccacatcgtggaggacaaggactgtacccccgaggagaaggccatccgggagctgaacgtgggggtctacgtctttgagagcggccccctgtgggaggccatcgaccagctcaggcccaacaacgcccagggggagtactacctcaccgacgccccggcctacatcctctccaggggcggcagggtgggggcctgccccacctgcaccgccgaggagatgctgggggtcaacaccgtggagcaactggcccaggtggaggagcttgtgcgccgccgggaggggttgaaatgagactctatctgagcgccgacatcgagggcacctgcggcattgctgactgggcggagaccgagcgggccaccatggacgactacaggcccttcgccgcccagatgaccgccgaggtggccgccgcctgcgagggggccgtcgccgccggggcggaggacattctggtgaaggacgcccacgactccgcccgcaacctggacgcggcccggctgccccggcaggcccgggtgctccgggggtggacgggcgatcccctgtgcatgatggcggggctggagcggggggccttcggcggggtgctcttcacgggctaccacgcctggggctgctgcggcggcaaccccctgtcccacaccatgaccaccgcctgcgaccaggtgacgcttaacggcgtcccggccagcgaattcctcatcaacgcctacaccgccctgtacttcggcgtgccggtggccttcctgtccggcgaccgggagctgtgcgcgtttgcccaggactggctgcccggcctggtggccgtgccggtgaacgagggccggggcggcggggtgctgtccatgcacccccaggctgccgcggaggccatccgggccggggcggaggaggcggtgcgccgcctgcgcgccggaggggcgggcatgtccgtacccctgccccagcggttcgccgccaccgtgcgctacaaggagcacaaggacgcctaccgccgcagcttttaccccggcgcccggctggaggacagcaagaccatctcctttgacgcggaggactggtacgaggtgctccggttctgccatttcgtgctgtaaggagggggagatatgtcggaagagagggatctccgcctggcggtgctcatcgacgcggacaacgcgccccgctccgccctgggggacgtgatggccgaggtggcggtgtacggcacccccaccatcaagcgcatttacggggactggaccacccccaacctggcctcgtggaagcctctgctgctggagaacgccatcacccccgtgcagcagtacggctacaccacggggaaaaattccaccgactcggccatgatcatcgacgccatggacatcctctacaccggccaggtggacggcttcgtactggtgtccagcgacagcgacttcacccgcctggccatccgcctgcgggaggcgggcaagaaggtgtacggcatgggggagaagaagaccccaaaccccttcattgtggcctgcgacaagtttgtgtatattgaggtcatccgctccgcggcccagcaggagcgggcggaggaggccgcccgggaggagccgaaggagccgcccaaaccggcccggcgcgcggccagaaagaagggggctgaggccgccccaccccccgcgccggaggccgagcccccctccagggtgcccaaggagatcatcaccctgctggccgactcggtggagatgctggccgacgaggacggctacgcccccctgggcgaggtggccaacctgctggtgcgcaagaagcgggacttcgacccccgcaactttggcttctccaagctgagcaagctggtcaaggccctgccccggttcgaggtggacgtccgccagggcggccagtccaacatgaagcacttctttgtccgggacaaggagcggaaataacaaaagagcgcgccggcggcgcgctcttttttcttgacaaagtgatgagacaattgtaaaataaaagcgaaaagacaattgtcttatgaaagggtgaacggaatggaacggctgccggatgcggaactggaggtcatgcaggccctgtggcggcaggagaagtaccccgtctcctccgccgcgctgatggaggagctggcggggaggcggtggcagacggccaccctgctcaagctcctctcccgcctggaggagcggggctttgtgaagcgggagaaggaggggcggaataacctgtatacccccctcgtccggcgggaggactacctgtccgccgagagccgggcctttctccagcggctccacggcggctccctgcccagcctggtggccgccctcatggacagccgggccatctcccggcgggatctggaggagctggaggagattctgagagggggggacggcggtgcgtgagttcctgtccggcctgtttgaggtgagcctcactatgggggcggtgaccgccctgctgctggttctgtccccggtgtggaagcgccgcttccggccccagtggcggtgctgggcgtggctgttggtggccctgcggctggcggtgcccttcaacgtgagcctgccccgggccccggtggttctggaggcccccgccccggcggcggtgtcggctgcctgggtggaggaggggggattccagggggtggagctgaccgcccggacgctcccgccgggagaggccgccccggaggccgccgggcggggggtgtccctcaccacggcggagctggccttcgccgcctgggccgccgtggcggccggagtgctggcggcgcggctgctccggtacgccgccttccgccggagaacggcccggtggtgcaccccggcgggggcgtatgagggggtgccggtatacgcctgcgctctgctgtcctccccggcgctgacgggcctgctgcggccccgcatccttctgcccgagggggtggagggggagcggcgggcctttgccctggcccatgaggccatgcacgcccgccgccgggatctgtggagcaaggccctgctgctgtgggtgtgtgccctccactggttcaatcccctggtctggctactccgccgggcggcggagcgggatatggagatcgcctgcgacgccgccgtgctggccggccgggacggggagtggcggcggcggtacggcgcggccctgctctcctttgtgcccgtggggcggcccgcccccctgaccagccagttcgccggaggcgcccggggactgaaagagcggttccgcgccctgatggacgcctccgccaagcggcccggccgggccgccctgctcctggtgctgtgcgccgccctgctgggcggccccctggtggcctgccagtcccgcgcgccggaggagagcctgcccgacggcacctactggatggtaccggcgaaactggagtggcaggagccgctggaaaggctggcggtgcacatggcggaggtggacgggaaaaccatggagctcctggacgttggacgtgaaactctggttttcccactggcggaggaggtcattttgggcaactatgcggaacaggggataaaagaatttttagagacgtcggtctcactctcctatgcaaagcaagtgcttgaagtggaaatggaagatgggaaaatcgccgctatgaccagccgcgccgtctttcctcctgatgggctaacagagtatccagagtatcccgtgaaggaaccagatctggccgacggcacctactgggccaccctgtccctgtcggactggtggacggcgggggaggaggggatagagctgctcctctccctggtggaggtggacacagacaccatgacgcttctgcgcgtggcgcctgagaagacgagcctccctgtggcggacgacgtgacactgggcaaccacggcgacagcggcctggatggctttttgcagtgggcggcactctcctcctactggcccatggtactggaggcggaggtggtcggcggcgagatcacggcgctgacctggcatgacgccagcctgccactggatccggatcccctgagccagtgggagcaaaaggcggatcaccccgcctcccactatacagggctgcccgacggcacctactgggccattcctatgagcgccacagactgggaggaggccgggaagcgcggcagggaactctctctgaggagtgtgacgatggatcccgatacgatgaccgtcaccaccacggatggattctccggtatttccctccctgtggcggaggatgtggttctgggcggcggggaaacagagctgagcgatttcttgaaccggccggattggggcacaggggcggtgctggagctggaggtgacgggaggcaaaatcaccgccctgaccgcctgggaggcgcggttcagcgtggaggagcttgccccggacggggactatatcatcggaaacctgtacgatttcagggcggagaacgccagtggatttccaatctgcttcaaggcgcggatgtatgaagtggaggaggatacctggcgggtgacaaatttgatcgggacttccaccttccgcgtggatgaggcggatctctgccgggaggatggaaccccctatgaggggggcgttctctccttcctaaatgaattctgcgccgattcggacgagctgtactggcgtcgtcatccggaaccatatccctttgtaaaccgcctcaccctgcaagccaccgtgcgtgggggatatattacctccctgacccgcctgcccgagccggagtggtgacggccgggcggccacaagggccgcccccacggaaaggtgcaccggcggtaggggcggggcttgtccccgcccgccgtctcacgtcccaccaccggagatcacgaaagaggaggcggccccaaggaccgcccccacggagagacgcaccagcggtaggggcgggtgcccacacccgcccccctacgccagcgggaacacactgcccacggcgtacagcttttcccgaagatccgcccggtagtccggggcggcggggtccaggctgttgatcaccaccccgtcgctgcccgcccgggcggtggagtggatgtaccggtcgttccccagatagagggcgatatggccggggaaatagagcagatcccccggcttccgcgcctcaaaggggatgggccgcgcgggaaagccgtccaccagccgggcgtcccggtagagggacaccccgcagaagaaccaggccatgaaggtcagccccgagcagtccacgcccaggggggacttaccgccccagcggtactgggtgccctggtaggacagggccacctccaccgcccgggcccgcagggcctcctcggacacggcgggtggcgttttgtaatcatcctcccagagactacactttgtatagccctcccggccgtccgggagggctattttctgccagccctccccggcctccccgacgggggcggccagcgccccccggggcagggtgtccagcacggggctctccacctccggccgggccagcacgtcggcaaacggggcgcggacgagccgcttgtttcgcccggtccagtccccggcggggcgcagatgctcccggcgggcccagccctcgtagcggtatttggtgcggacgcggcaccagccggtggagaattcctccagaagctcggcggtccagccgcacagcagctcgtcggagcgctccgcgccggcgctggcggcggcatagagggggcacaggggggcagagactacaacttccatgaaaaaacctcgcaatctttacaattttgtgctacgctagaaaagagcggtttattggactaaaaaaccgctattctgagagagaggaagggggagagaggcatgccgcgaagtgcaaatcaaaagctcaagctgctctgcctgtgcaggattctgtgggagcgcaccgacgaggaccatccgctgacggtgcccgagctgattcaggccctggaggcgtgggacatcaaggccgagcgcaagagcatttatgacgatatggaggccctgcgcaccctgggcatggacgtgcagagccgcaagggaaagtccccgggctggttcctgggggagcggacgtttcaactggccgagctgaagctgctggtggacgcggtgcagtcctccaagttcatcacccagcgcaagagcagcgagctcatccgcaagctggagtcccaggcatcggtgcaccaggcccgccagctccagcggcaggtgtatgtggaccgccgggtgaagagcatgaatgagagcgtgtactacaccatcgacaagctccacactgcgattgcaaaccggaaagcggtcacctttaaatactttgagtataacgtcaaaaaggaaaaggtcttccgccgggagggaaaacggtacaccgtctcccccctggggctcatctgggacaacgagaactactatctggcgggctatgaccaccgctcctgcgagatgcgccactaccgggtggacaagatggccgagctggcggtgacctgcctacccctggagggggcggacggtggttttgatatcgcatcctatgcgcagaagcacttcggtatgttctccggccgggaggggcaggtcaccctgcgctgccgcaacagcctggtaggggtggtgttggaccgctttggccgggacgccattctggtgcccgacggggaggagcacttcaccgtcaccgttccggcggtggtgagtccccagtttctgggctgggtgttcggcctgggggacggggtgcagattctccgccccgactgggcggcggaggagctgaagcgccagctggccgcggtggcggccctctaccaataaggggacgtgccggggcggctgcgccccggcacgtttgcttatgcccagccctgccacacctcggggcagtagcccacggtggcctgcctgccgttgcggacaatgggggttttcagcagcctggggttgtccagcagcttttccaccttgtcggcgtcgtaggccagataggccagcagggcggcgtcggggtgcttggggtcgacgagggcctccagccccacggcgttcagcacgcttttcagctcccctgggctgatgccgtacttccccaggtcgatggactggaaccggatacgccgttccttgaaccagcgctccgcctttttggtgtcaaaacacttgctttttccaaaaatctgaatgttcatggccgttctcctttgctctctggtcacaatattgtatcatacgggggcggttccggcaataatacgggaaactgtgtgtgaaaggatggtttcccaccttgaaagcgatcattctgtgcggggaaggggaggaggggctcgcccccctgacgctggagcgccccctgcccctgctgtccctgttcgacaagcccctgctggcccaccaggccgggctgctccgccgccacggcgtgcgggagatcggtgtggccctcccacgcctgtcccgcatggtggaggatgcgatgggggacggggaggagctgggggtgcgcttcacgtggctgccctgccggggggcgggggagctggagctgctggcggcctgcgccgggtttctgggggaggaggacgccctggtgctccccggcggcggactaggcgacctggatctcagcgccctgctggccttccatcaggtgcaccgctccgccgccaccctggcgctggcccaccgccctccggcggcaggccgggcgctggtgttctccgacggggaggggcgggtggagcggctgctggacgccccggcaggccgtctgctggccagtcaggtggaaaccggcgtgtgcatcctcacggcggcggcccgggccggggcggccggggaggggacgctggccgggcgcctctccgccctgttggaccggggggaggccctgtacggggtagtcccggaggggcagtggcgggagctcaccggcggcgaagcctatctggacgcgctggccgacgctttgtcgggcaagctgcggctgcggtgggacgccccccgcaccgcccccggtgtgtggagcgccagccccctgccgccctcggtgcaggtggtgcccccctgctatatcggtcccggcgtccaggtgggggagggctctctgctggggccccacacggtgctggaggggggctccacggtgggccgccgggctctggtccagcgctccgccctgctgggcgcggcggcagaggagcgcaccaccctgtacggcgcggtgctctgccccggcgcggcggcccgggcgggggcggtgctcaatgagggggccctcctggccgaccgggccgaggccggggaggacgcgatcctgttggagcgggtggcggtgtggcccggccgccgggtacccgccggggcgaggctcaccgcctccctcaccgcgggcggcctgaagccgcccctggccttcgggggcggcggcaccctggagggggccatcggggccgagctgaccgccgagaccctgctcgtcctgggcggcctgctgggccgggagggtaccgtgggcctgggttgggcgggcggcgcgggggcgcggatgctggcccaggccgccgggagcggcgcggccgccgcaggaggccgggtgctctcccacgacgcgccctgtccctccgccgccgcgtggctggcggagagctggggcctgccggtgtccctttttgtccagcaggagggggagcgggcccggctctacttctttgaccgccggggcatgcccctgggccgggcgcgggagcgccggctggagggggccctgctgcgcagtgagctgcggcggatgcccgccgggcgggtgggccggtgggagtccgtcaccggcgtccgcccggcctacgccgccgatgcggccaagcggtcccaggtgacccaggctccgctccggcgcctggaagtggcggtgcccggcagggaaccggcggacagagccctggcggaagccctggagcgcctgggctgcaccgtccgaagggaggcatcccccggcgtgcccgccttccgtaccgggcggggcggcttccggctgctggccgaggatgaggagggggaacccctcccgccggagcagttgctcaccatcgtggccctcatcgaatatgaggatggggcggggcgggtagcggtgcccgacgccgccccggcagccatcgacaccctagccgccggctaccacggcggcgctctccggctgggccgggacgggccggaggcggaggcgcggtacggagagctgccctggctgcgggacgccctctttgccgcctgccgcatctgcgcccacctgggcatgaccggtgagcggctccatggcctggcggggaagattccccgcttcgtcctccgccgccgggaggtttcccttcgaagcgggcagggggaggtgctctctgtgctgctgcgcaccctgcccggggcacagccggctgggggcggcctgcgggtccgccagggcgaggggtgggtcactctggtgcccctggcccgcagcgccgttctgcggatcgtgggagaggcccgcagcgccgagctggccgaggagctgtgcgccttctgtgcccgccgggcggaggaggccgaccggggcctgccggaaaaatagaggtatacttttccgcaaaggtatggtatactaaaataacctatcatggctttatgcgcattttgcgcttgaataagcaggacacagcgggcatagaagagcgccaggcggcggagcggccgccccctctttccggcgaggcagggccggaacgggcgggggaccgggaccgccttggtttcgtgcgcccctgctccgctggtccttacataccatttgtatggattcagaataaaaggagtgttccaagacttactatggctgaaaaactgaaaatcatctccctgggcggactcaatgagatcggcaagaacatgaccgtctatgagtacggcggggacatcatcgtcatcgatgtgggtatgggctttcccgacgacgacatgtacggcattgacgtggtgatccccgacttctcctatctcatcaagaacaaggaccgcatccggggcatcttcctcacccacgggcatgaggatcacatcggctccatcccctatctgctgcgggatatcaacgtgcccatctacgccacccgcatgaccgcggggctggtgaagctgaagctggaggagcaccgcctgctgaacaagaccaagctcatcacctgcgaggcgggcgaggtggtcagggcgggcaagttcaccgtggagttcatccacgtgaaccactccatcgccgacgcctgcggctttgccatcaagtgcggggtgggtacggtggtgcacaccggcgacttcaagatcgaccccacccccatccagggcggcatgatggatctgggccgcctggggcaactgggcaaggagggcgtgctggccctgctggccgactccaccaacgtggagcgccccggctttaccaagagtgagcgcagcgtgggcgactcctttgacgccctgttccgcggctgccagcagcgcatcatcgtcaccaccttcgcctccaatgtggaccgcatccagcagatcatcgacgtggcggcccggtacggccgcaaggtggcggtcaccggccgctccatggagaacgccatgaaggtgtccaccgagctgggatatatgaacattcccgacggcgtgctggtggatctggcccacatcaagagcctgcccaagcacaagatctgcatcatcaccaccggcagccagggcgagaccatgtccgccctgacccgcatggccttcaacacccaccgccaggtggagatccaggccggcgaccgggtgatcctctccgcctccgccatccccggcaacgagaacgccatcggcagcgtcatcaacgagctctaccgcaaggacgccgaggtggtcaacgagcggctgggcgccctccacgtgtcgggccacgcctgccaggaggagctgaagatcatccacgccctggtgaagcccaaattcttcattcccgtccacggcgagcagcggcacctcaagacccatgccaagctggcccagcagatgggcatgccccccaagaacatcctcatcagcgacatcggcaaggtcatcgagctgacccccaactctgccaagatcaacggcaccgtgcccgccgggcgtgtgtttgtggacggctacggcgtgggcgacgtgggcagcgtggtgctgcgcgaccgcaagcacctggccgaggacggcatgatcgtcgtggtggtctctatgtccggggaggacggcagcgtggtctccggccccgacatcatcacccgcggcttcgtgtatgtcaaggagtccgaggggcttatggaggagctgcggaaggtggccgtcaaggccctggaggagtgccggatggacaccatgaacgattgggcctccatcaagtcggagatcaagaacgccatctccggtttcctctacaagaaaaccaagcgcaaccccatgatcctgcctgtcatcatggaggtgtgagtcaaaaaggggatatgaccgcgaaggtcatatcccctttttggactggatgcggcccgccggggccggagataggagatataagaaagcggcatggccctggtgccatgccgctcaagactgctgataaacccttcagccagaggtttcggagggagggatagtgtgaaaggctgccccgcagggcgattcggagcgcaaccgccgctctgcggcggcgtttggcgcggagatgaaccgtcagggttccctttcgcgttggatcaaacgactttttgaaccgtttaaagggttcaaaaagtccagcagcctgtcgaaacgactgtttcgacaggctgagcggcatggcaccagagccatgccgctattcaggttcagttgcagcgcacgatgcaggttagggtcttgccgtccacggtgcaggtgagggtggtttggcccttgcccacgtgcttgacagtgccatcgccggagacggtggccacggcggtgttgccgatgctccaggtaggggtggaggaggtgccgctcaccttcacctggaaggcctgtccggcctccagggtgaagtccgtccggttgagggacagggcgccggaggcgccggagccgctcccgctggaggaggatgcgccggaggtgacggagttgtgaaccagacaggtctgggtgacgccgccggccatggtggcggtgatggtggcgctgccctgcttgctgccgtggctcaccttgccgttctcgtccaccgataccacctcagggtcgctgctgctccaggtgatcttcccggcggagccgtcggggataaaggtgaccgtcagggtgatgggattgggccacttgtcgctgagggtaaactcactcttgctcagagtgaagccggtggccgtctgcccctcggggatggtgtcgccgggggtctccgccactggaggcgtgctctcaccggcgggctcggtctccgacgggctggcgtccggggtgggggtcacgctttccaccggcgtggtgttgtccgccgggccgtccacgtcgcccttggccaccaggggccggatgatggtgatgacgatgatgaccgccgccacgatcagggccagggagaccaccgtgccgatgaccttcagcggtgaagtgcccccgccgtagccgccgccccgggtgttggtcaccaggcgcttgccgcccctggagcggggggcctcgtcgtattcgtcggtttggtagtcgtcctccgcgggctcgacctcgtcacaaaaggggcagtgcttataggtagaggagtagtcctccccacagtaagggcagtggatcatttcgggcttattggcgcgggtccgcttggatgccatcggaaatccctccagtcgacattcttagagttattttacaacggcggacggccatccgtcaacggcgtggggaaaaatgtaaaggttttttaatatttatgtcaactgaactgcctccttgcgcgggcggtctgattcggatataataacactaaccgaaaaacgaggtgttgcagcgtgaaaggttctctcagcgccgccgaggtgcacaagcagtacagtgaaggggtgaccgccttccggcggcagatcgcagacgccaccctgcgggtgaagttcacccaggaggcggatgtctttctccgggcctgcgccctgggcgtgtggcagcgggacggtgcctccctcaccccccgccacgtggagtactataatgccatctataccaagggcaatccggccccctccattctgttctgggagctgtccaccgccgtcagcgagtaccccggcttccgggtgcccgacttcttcgcccggatgcgggcctgcgacaaggtgtccggcacccacctggcccgccgttttatcgacctggtcaccctgatgctcctgctctttgccgctgtggacgacgtggtgagcgaggaggaggcaggcttcgtcaacacctgtgccgacaccctctccgccctctgcgaccgggacggcctcaagggggagaaggcgcccctggacgtgaaggacttcgtcacccggcggcctgcgcctcccaaggcggacgcccccgccgcggccgccgctccggcgggagcgggacaggcggctgcggcggccggggaggaggcggagcccgcccccagcctggaggagctgatggccgagctggacggcctgtgcggtctggacaaggtgaaggccgacgtaaagagcctcatcaatctggtgaaggtgcgcaggctgcgccaggagcacggcctgcccgtacctcccatgagcctccacctggtctttctgggcaatccgggcaccggaaagacgactgtggcccgcctgctggccaaaatctaccgggccataggcgtgctgtccaaggggcagcttgtggaagtggaccgctccgggctggtggccggcttcgtgggccagaccgcgctcaagaccggcgaggtcatcgagaaggccctgggcggcgtgctgttcatcgacgaggcctatgccctggccaaccaggacgcccccaacgacttcgggcgggaggccatcgagaccctgctcaagggaatggaggaccaccgggacgatctgatcgtcattgcggcgggctacaccgagctgatgggccgctttctccacgccaaccccggcctggagagccgcttcaacaagtatttttacttcgaggactacaacggggcccagcttctggcgatttttcagtccatgtgtgcgaaaaatgggtatacgttggatgataaagcgacggaatatgccaaatcgtatttcaaaacactctatgaggagcgggatgagaacttcggaaacgcccgggacgtgcgcaacgtatttgagcgggtggtggcccgccagtccgaccgggtggccgccctggagaagcccggcaaggaggagctgatggccctcacagttgcagatcttcaggaggagggagggccagtcccagacggagccccagacgaaacccttcctgaaagcccgtgagggaggcgttgtagaccagtccgtccttggcgtcgaccaggtccaggggagcgccgtggaagaagggttcccaacgggcggtgcgctcaggacaggcgtcctttttcgggagatagacaaactgatagtagagctcctcgaagatatcgtccatgaaaaaacctccttaatacgatggtgatcatcgttattatatgcgatgattgtcatcgtgtcaatagaaaagaggggtattatgacaaaagaacggttaaaggaattaaggaaagaagccggcctgacccaaaaccaagtggctgaaatgattggagtgcaggggagaaactatcagcgtttggaaattacagatgccttgcccccaacaaggcatttactcgctttggcagattactataatgtctcagtggattatattttagggcgcacggacaaaagggagataaaccgatgagccttacggccgcccggcctgcgggcggggacaagccccgcccctacatcctgcgcgtttcaggggaccgaaaatatgttgtaggggcggcctttatggccgcccgcgggcgaccacaagggtcgcccctacgccgttatgcgttgggacgggcgtccctttagcgtaggggccgacgccccagggcggcctctcttgccccttcggggcaattcaccttctgcccacatcggcccgacatatgccaggctgatgcaccttccatgcaacccctttttgtatctgattttttgtcaagcctccggcgggcccctcgatggttccctcctcgcggcaaagccgctgcggcctacgctgcaaacgtgccactggcacgtttgctttacgctgcggtttcgatttccccccttcccggtgcccatcccccttaaaacgaccaaagagggggcctccgggcccccatctttggaatctcccccaagttgttctaccgatagcgcaccggtctgtatggggtcacggaaaaaagcgccccgcgcacggtgaaaagccgtgcgcggggcgctttttctgggcagcatgtccagtttgatcaccggaggtaggggcggcccttgtggccgcccgccgcggcaggttcaggcggggggttacggcggcatcagccgcacttggagtagccgcagtcacggcaggtgacgcagccgccctcatgctccagccgcgcgccgcactcggggcagaacttggccagcttggcctcggcgggggtcatatcggggtgggggacaggcgtggcagtcttggacgcggcgctgatgggcgcgggggcggggcagccgccgccctgctgggagaccttgagcaccttttccagggccttggcgatggcgtcggggcaggaggtgacgggcacgccctgctgccggaggcaggaggggcagcggatccccttgagctgggtgatgatctccttggggtccatacccgagcggatggccacgctggtcaggcgggcggtggcctcactctggctgggacagcctccggcccggccggtgttggtgaacacctcacagatgccgttctcgtcgtagttgacagtgatgtaaaggttgccgcagccgatgcgcaccttttcggtaaagccgctggtgacggcggggcgcggcctcggctggatatggccgtaggctccggatttgatcaggcaggccgtgccctcgcagccggagtccagcacggcgtctaccaccgggtcgccggtggcggccttgccgtcgttgaccttgccgatgttgagtacctgctcgttgcggcttccgtcccggtagatggtggtgcccttgcagcccagagtgaaggccagccggtagacctcggcgacctcctccttggtggcggagttggggaagttcaccgtcttgctcaccgcgttgtcggtgtaccgctggaaggcggcctgcattttcacatgccagatgggggacacgtcgtgggcgcagacgaacacccgccggatgtcctccgggatgccgtccacgtgggccagggagccctgctccacgattttctgcatcagctcgtcggagtagatgcccgcctccaccagcctgtccttcagaatctgattggtctcgatgaggtgggtgccgtccatcacattgcggatataggcgtaggcgaacaccggctccacgccggaggacaccccggcgatgatggacagggtgccggtgggggcgatggtggtgacggtggcgtttcggatgggcctgccgtccctgtagatgctctggtcaaagagggggaaggggccccggatctcggccagctcctcactggcctggtggccgatggaattcaccgtgtccatgatctcctcggccagggcgacgccctcctcgctgttgtagggcacgcccatgtggaggagcatgtccgcaaagcccatgacgcccagaccgatcttgcgggtggagcgggtcatccggtcgatctcgggcagggggtactggttgacctcaatcacgttgtccaggaagtggacggcggtgcggatggtcttttccagcttggcccggtccagcacccacccggcgggggtcttcatcaggtggttgaccaggttgatggagcccaggttgcagctctcatagggcagcagcggctgctctccgcaggggttggtggactcgatctccccctggctgggcaccacgttgtcccggttcagccggtccaggaagatgatgcccggctcgccggtctgccaggccgaggtgacaatggcatcaaagaccgcccgggcgctgtgctggcccaccacccggccggtggcggggtccaccaggtcgtagggcttgtcctggctcaccgcctccataaacgcctcggtgatgcccacggagaggttgaagttggtgatctcgcgggtatcgttcttgcaggtgatgaactccagaatatcggggtggtccacccgcagaatccccatgttggcgccccggcgggtgccgccctgcttcaccgcctcggtggcggcgttgaacaccttcataaaggagatggggccggaggccacgccgccggtggagttgacggtggagcccttgggccgcaggcgggagaaggagaagccggtgccgccgccgctcttgtggatcagcgcagcgttcttgatggcgtcgaagatgtcctccatggagtcggccaccggcagcacgaagcaggcggagagctggcccagggggcggcccgcgttcatgagggtgggggagttgggcaggaagtccaggctgaccatcagctcataaaactccttggccgtggccaccacgtccgccttggaatcaaagcggcggtcaccctcggccacagcgttggccacccggcggaacaggccgtccacggtctcggtgggctgtccctgctcgtcccgggccaggtagcgccgctccagcacggcctttgcgttttccgaaatgggcatatcgtatctctcctccagttgtattcgaacacaagatattgtacctgtatgaaagagagttgtcaatatttcgttccttgtcggggagatagaaaattgctataatactttggtaatctttttgtggaggtggcgcaatggaggcccgtcaacccttttcccgcctgggctgggccctgttcgcccagatggccgtcatgctggcggcccagtggggggtgctgcttctggccagggtggcacggcccggcctgctgggagagccggtgtttctgtgggcggcgtccgtcctgggggcctacgggctggggattcccgccgcctgtctggtgctgcgggggacggcggccccgcccgccccggcccgccgcccgctggggccggtccgcttcgcggccctttgggccggctccgtggggctggcctgtctggcgaatggggctaccctgctcctcaccggcctgctggggcggctccggggcgcggcggtggtcaacccggtggagtccatcggcctctacccccttccgctccagctcctgctggccgggctcatcgcccctgcggcggaggaacttctgttccgcaggctgctgctgcgccgcctgcggccctatggggagcgctttgcgctggtggcctccgccctttgcttcggcctgtttcacggaaatctgaaccagtttttttatgcctttcttctggggctggtgctggcggagctagcgctctccaccggctgcctatggcaggctgtcctcctccacgcgctggtcaacctcttttccatcctctggggctggctgggcggcccggtggtggtgacgggtgtgctgatgctggcaggcgccatggtgccgttccggctgatccccgcgcttctggcccgtccggacgcagagcgcggaacatggcggcgctttctcaccagccccggcgtgctctgcttcggcgcgctgtccctgtccctggcgctgtcttatttgatttgaaagggtggatcgtattatggtagagctctgcttcaaccagtcggcacagggagcgctgaagatggctcagcactgcggcggcaaaggccgccacagcgtcgggattgcattttgcacgtcggaggacggggagaagccctcccgccgggcagtcagggcgcagatgcggaaggtgcgggccgagcaggaccggctggacaggtatgccgtccccctggggaacaaaagctccgacgtactctgtctggggctggccctgtccctgggggacatcaccgcccctctggcggaggacggaccccggcgggcgctgttccggcagttccacaccgacttcccactggacggggcggaggcggagcgggcggcggaggccgacgcggactggcgggaggtcctggccgctgcggaggagctgagggcccgggccgccgccggggaggaggtgcgcatctgggcggacgacaccccggacggggcctgcggcctgcgccacgcggccgccctcctggccgggctggacgccagggtgaccctggtttccctgccccggtggtgggagcggccggacggcgcggtggtgcgctgggaccggggctggggcgaggtacatcccgaggagttcggcctgcatttgggcggggcggaggagctgacccgtccggtgctgcgcatgctggccctggaatgggagcggctgagggaggagaacgcccccctccgggcggtggtcaacggcagggtgatgggggtatcggaggacttctatgaccccgtcctccgccgttgcctcacggagaagccgcagaaggtggcgaacgtactggggcaggccctggttcagctctccggcgtgggggactggctgctggcccggcggctgcgcgccatggcggaggccgggacggtccgggtggacgaggcggggagcacccgcggcttttacggggccgcggcctgtctggccttaagggctgggccgtgggacgccagcgccgacccagggccgatttatgggtatgcgttccagtacatttccccggcctccaggggaaggccccgggcggcaaagagctcgtccaccgtgcagaacaggtagccctgctggtggagctggtctacaatctggagggcggcgtccaccgactcggggaagatgtcgtgcatcaggatgattccgccgtccctggccccggccaccacctcccgcaccacccggtcggtgttctgatcccgccagtcctccgggtcgatggaccacaggatgatggggcagcccgcccaggcctttacactctcgtccagcatgccgtagggggggcggagcaagaagtcgttgtggcccagggtggacttgagcagggcccgggtggtctccacctgggcgtcgaagtcggtccggctcagatcggtgagcttgacgtggtcgaaggtgtggatgcccacctggtgcccctcctcgtccatccggcgcaccacgtccccgttgttctctatctgggctccgatgaggaaaaaggtggccttcaccccgcgctccgagagaccgtccagcaggcgggtggtggtggagcggcgggggccgtcgtcaaaggtgagggcgatcagcttctgtcccgccggaaccgtggggcaaggctccccctctccggcctccagcactgcatcggcctccgccgccggccccggcgcggccgggagcatccacccggccagcgcaaaaagcagcagcagcgcggggacaaatgcccgcgcccgccgccgccaggaagttcgctccatcccgcccgccgcctttccaaaatcctttggccttagtatgcgctgctggcgggattgcttgcgatgtaaattctgttattgtgcccggggatcggggtcaccgctgagggagagcatgtattcatagtaggggagcaggaactcgtacccctccagcaggagatccaccagatcgtgggaccagagcggctccccgtggggggcgtcgtgggagagggcgaagctctttttgctgtaccagggggtgagcagccgggagggggcggccttggggcgcttgtagtcctccccctccagcacaaatacgtcctgcttctggaagcggcgggccagcttttccatggccttgggctcccggtccatgcgggcgcggaacttggccatggtgacggccggagcctgccagaagcccatgccgtaggagtagccctccgggcccagctcgaaccagaacaccggctcggcgcagccctcctcgtgggggcgggtcaggctcagccacagatggtccttgtaggggccgcggccgaagagccgccgggcgtcccggtagatgcgggacaccttgcagatgaggtccaggtcgggatggcggtcggtaaaggccccgtacacctcgtcggccagcgccttcatgggccgctgaaaggtggtcaggtactcctccttgtgggcctcgaaccagcccttttcgttgttgaaccggatgccccacatgaagtccacggtggcgccggaaaagccttgaaacataaagaaccttctttctctctataagagcggaggccctttgggcctccgctcagcctgtcgaaaaggtcttttcgacaggctgccgaactttttgaaactttggaaaagttccaaaaagttgtttgatccaacgtgaaagggaaccctgacggttccctttcacactatcctcccctccgaatcctttcgttggaggggttatcgacagtctcagcggaggccctttgggcctccactcttgttttagggtcaggcggcgggcgccgctgagggtacggccgccggggtggagccggtttccggcgtgacggccggggtctcctccaccggctccatgccgggaccgacgccagattccggtgtggcggtggcctccacaggaggggtatatgccggcggggactccgggctgggggggacagttggactgggctccaggggaagcacaggtgtggcggttgggacgggcgacggagtgccgcctggcgtcggactgggcgcaggggaggggctgggggacggcgatggggtgggggtgaccggcgtaagggttttcagaccggtggaggggtcaatcccccagcgggccgcgtcagcggggttgtagtagtacaccgcgtcggacgccttgtaggtgttgcggtacagcagggtggtgctgatggtcttgccgttcttgtccaccagcttctgatagagatccaccgtatagccgttgtagcgggagtagttggggtcccgctggggctcggtgcccacgggaatgctgtccttgggctggtaggtgttcttgtagggcacggtggaaatgaccacgtggtagggctctccgtggatgccggtggtatcggtgccgtagatggtcacatggagcttgtggtttttgtccagataggactcaatcttgatggggtaatcggtgttattctggaagcggaagtccaactggtcgctccacacggtggcgtcggtgccgatgacgggcatatagccgccgttgaactggtgcttgtggcgctccacaatctccagattggccttgagggtaacccagtagaggttggacgagagctggcagatgccgccggcggtggcgtccacgctctggccgttctggtaggtgccggcggccttgtagccgctggccagggtgtaggggcccaccgtgtcgttataggagaaggtctctccggggagcaggatggtgccgttgagccgcttggccgccagatcgatgttgtaccagcggttggaggggccggcgcaggtggtggaaccgctgcccagcacatccttgaaaagattggcctccagcttggcggtggtcagcttcggctcggtgagaagcagggggacggacaccgtctctccctccccggccgcatccagcacagcctgggcctgggccgtgtcgaagtccactccggtgaccgaggggacgatctcacgcgtctccttgtctaagtaggcatcggcaggttcggcggcgacctcggaccggatggcgtcaaagtcgggggcggcggggggcgcggtggtcacctgggcctcgatgggggcataggaggccggctcgtcattggacaccagatggcccagccgctcggccagggcatcggtgagggcggctacgtcaatggtgcggccggtgacccccttgtggagcaccagctcggtgtcggtgacctcccaggtggtctgggcctccgggtcggagcactcctccaccgcccgggttaccgcgtccggcgtgccggtcagtgtcacggggacggagtagcggttgccatgcatcacggcggcgagataccgcccgccccgggtgaaaaagctgccggcctggtcggtcagagcggcgtccactgcggcggcggcgtccacggagacagagggatcgtcaccgttcaccgcatagctttggcccgcgcaggtgaattcggcccggctgtccgccagcaggccgggcagggcgccctccagggcggcggtggctccttcccgggactggccgctcacgtccaccccggcaatggaggtgttgggcaggaaagcgctgctgcccgcataggcgcaaagccctacatatccacccgccagtgccaggaccagaacgaggacaacggccagggcgatttttccgccccggggcatgcccggtccccttgcgaccctctttccatcctgattttccatcttcatcaactccaaaacatcacagaggatgtaaaatacgactactattataggacttcgtcccgggaaaagcaattacagaacggttacatagcacttccggcggaaagcgctttacatgccccggatttcgcagtatgatagagaggcttcagcggggcgcaatctaatctttcatcttttttaaagaacttatccagcgaaactttaacacttctgtgatagaataacagacagaacacgcggcagtaacaggagggcggtgcccatggcaagctatcgaaatgaaaatcgaccggattcgggggacctgctctcctggatcattaccatcgtattgctggtcagcccggtctggcccatcggccttattctgctgctccgaaagctgaccggaggttccaggcgcagagcctcccgccacccttatgatatccagcgggagggaggccctgtccccggcacgcagggaatgcccggcgcccagcggcagacgcctccggtggggcggcagcatgtgggccgcagcccccggcagggcaggccggtgaacctggaccggggcaagggcctgaccgtatggggaattgtgttgaccgtgatcttcggcatcgcactcaccggattcccggcggtggccatgagcggcggcttcctctccgccctggcggtgatgtccccggtgatcggcttcttcggcggcggcctggccatgatctgggcgggtacccagcgcactaagaaggccaagcgcttccgcaagtacctggccctcatcggcaggcgggagagcatctccatcaccaccctggcccaggccatgccggtgtcggtgcacaaggcctgtgacgatctccaggatatgctggacagcggtattttagagacgggctatctggatatgtccaccggccgtctgatcctcagtgacgagggccttcaggaagaggcgccccctgcccccgagcccgacgagccggagccggaggaggacgtgctggacatgaacgacgatgacgcggtgctgggggaaatccgccgactcaacgacgatatcgacgatccggtcatgagccagaagatcgaccgcatcggagagatcaccggcaagatctttgcctatcagaagcagagccccaaccgggcgggccagttgcgcagctttttaagctactatctgcctacgaccctcaaaatcctccgggcctacgcccgtatggaggagcagggcgtggagggagagaatatccgctcggctaaggcccgcatcgagggcatgatggacaaggtggtggagggcttcgagaagcagcttgacaagctcttccaggacgacgccatggatatcgccaccgacgtgcaggtgctggagcgcatgctggagaaggacggcctctccggcggcggcatgaccctgggcggttaggtgaatacgcacaggaggcccctgccagcggcaggggcctcctgtatgcggcctttttggaatgatagggggcatccgaacagggatgccccctatcatcattggaatcaggattccatgtgccggcccaggaacccggcgatggtctgggccagcttatagtcggtttcactgctggccaattcgccctccgtgcccacaaagagcacacagcccagtacatcgccctcggatagaatgggggcggcgcaggccacaagatacttgctcccgtcgtcgcttacaggcaccgccttgtcgcctgcctggtactgataaatctggcggccctccataatctgctccagctcagaggagatccgcttgtccgtcagctcccggcgggccaggcccgccacggcgatgcaggcatcccggtcggtgatcacggcgatctcgccggtggtcttgttcagagtctcgcacatctggccggcgaagtcgcccaggccgcccatcagggaatactttttgaagatgacgccgccgtccttgtcggtatagatctccagggggtcgccctcgcggatacgcatggttctgcggatctccttgggaatgaccacgcgcccgagatcgtcgatacggcgcacgataccagtcgctttcatctataaactcctcctgcggttgtggttacagcccttattatccgcaggtttcttttgcctatgcggcgcagacggtggtttcatttggaaagaaaacgcggacattgacagctggagggcaggcgcttacaataaaaccgacacagacggaacaaacgcgagaggggagagggaaatgacaaccgacatgctgcgctgcgccctgcggggggtggcggcctaccggcccatcgtagacgagccggtgatgcgcctggcgctgggggtactggacaagctggccgccggggacggcagcggggccgtggaggactacgcccggctgttctatgccctgcggagcgcggggagccggagcctgggggagtggctggacggccggctccgggaccgggaatccccctacgccgctctggtggagcggggcggggaggaccccgccctggaggcggccgcccggcgggatattgagacgttcaccctgctggcggagctggactgggaccaggtgctcgccgaggtgggggggaaagcgccccgggagtacgggccggtgctggccaacctgccccggtggcgggggagcagcccgttttcttttgcggagctgacggagttctaccgggccaacggcgcggggctctttgcccggcaccgggccttcctgtgggaagatggggcgctctgtccggtggagcagcccgactgtcccggcgcggacgagatgctgggctatgagctccagcggaaccgggtcatcgccaataccagggccatgctggagggcaacctggtgaacaatgtactcctgtatggcgacagcggcaccggcaagtccgccacggtgaagaacctgctcaccctgcccggctttgaggccctgcgcctcatcgaagtgcagaaggaggggctggctgatctgccccggctcatccgtaccctgggcgggcggcggctgaaattcatcctgttcatcgacgatctggcctttgatcaggacgacaagacctactccgccctcaagaccatcctggagggcggcttagagcggcggcccgccaacgtggcagtctatgccacctccaaccgccggcggctggtgcggcagaccttctctgaccgggcgggggacgaggtggacgccagtgagaccattcaggagaagacctccctgtccgaccgcttcggcctgcgcataccctacttggcgctgaaccaggcggagttcctggagctggtggaggggatggcggagcaggcggggattgccttggaccgggatagtcttcgtgccgaggcggtcaagtgggagatgcgcaacccgggccggacgccgcgaacggcgaaacagtttattgccagcctgagcctgtgaccgggtgtctcgcatctcccacgggcgcggaagcgccccgccgccccgcggcgcacaagcgttttgccggaggcaaaaccttggttgaggcgaattgacttcgcctcaagagaatggaaaaagggggcccccgcgggagggaacctcccgtggggtgagatgcgcaacccgggccggacgccgcgaacggcaaaacagtttattgccagcctgagcctgtgaccgggtatcccgcatctcccacgggcgcgaaagcgccccgccgccctgcggcgcacaagcgttttgccggaggcaaaaccttgattgaggcgaattgacttcgcctcaacagaatgaaaaaaggggcccccgcgggaggggacctcccgtggggcgagatgcggaatccgggccggacgccgcgaacggcgaaacagttcatcgccagcttgagcgtgcggagagggaagatatagaaaacaggccgccccatggggcggcctgcgcggtttgaagcgggtcaatcgtcaaattgcagcagcttgtagggcggaatctccagcgcctccgcgatgaggaaaagggtgctcaaggaaatgcccaccgccatgccgggggcctccacctgggagagaaagccggggctgattcctgcgcgctcggccaactgctcctggctcagcccccgcagctttcggaagtaggagatgcggatgccgatggcgatatagtgatcccgaagccgggcgttgtgctcctcttttttcattgcgtctcacccttatgtaagggtatcatcttgacagagagattattacatgctaaaacatagatattactagtatagaactagtataactgcgtgtatagcagaggcagacccacgctgccgcaaattgcggttgacggcgggaccgggctgtggtacagtacatgtggaaagcgagctttacaatttgacgagaggagcacatgacatgaagcacaatcggatgcgccggctgctggccggcgtcacggcggcggccctgctggccgcgcccgcgctggcggcggaggataccgctccggcccctcagatgcccgacgcctgggcggtgggagagctggcggacagctacgccatggggctggtggacgacaactacactacgtacattcagagcgccgtcaccagcgagcagctctcggccatgaccggcatcgtggccgacaagctggccctgctggagctgccccagcgggcggcggacaccgaaggactggtggtggacaccacccggggcggcgtgatgaacgcgctgtaccaggaggcggccgcctacgacatcgacggcgtggaggagggggccgcggccttcctcaccggcctgggcgtggtcaggggcgatcaggccggcggactgaacgaagaccggccctgcacctatcaggaggccatggtcatggccgagcggctgatcctggccctctatgacgccaacgacgccggctccagaggtctgctgtggaaggccgtcaacggggacaacaccctctacctgctgggcaccatccacatggaccgcagcaacgtctatcccctgcataagtcggtgcgggacgccctggacgcctcccaggtggtgagcttcgagctggatctcaacgaccaggagggcatggccctgctggcccagcttcaggcctactccgacggcaccaccctggccgaccacatcagcccggagctgtacgcgcgggtgcaggcggcggcggtgagcctgggcatggagcccaacggctttgacgcatataagccctgggccctggcctccaccttcggcgtcctgagcctccaggacgacaccaccggcgccaacgccatggccattgatgtgtatgtcaacgcctacgcggtgaacgcgggcaagaccatcgactccgtggagacctacgccttccagggcggcatcttcgacggcctgtccgccgagtaccaggaggcctatctggacgccagcctggccgggtacgaggggatgctcaacggcgaggcggccgacgagacggcccaggcgctggcccaggcccagcaggagcagattgccgccatgttcgacgcctggaaggaccgggaccccgatgccctggcggaggtctacgacaaagaggccatcctcaacagcgatgacgagctcaactccaagctgttcaccgagcgggaccccggcatgattgccgcggcggcggagtatctggagaccgagggggagaatacgttcttcctggccgtgggcgcgggccacatggtggacccgggcggcattgtgtccggcctgaaggagctgggctacaccgtagagctggtaccctgaataaaagatatgggccgccgcacgcaacgggtgcggcggctgaggctagcaataaaccctcctgccaaaggcttcggagggaaggatagtgtgaaagggaaccgtcagggttccctttcacgtttgatgaaacgactttttgaagcttctttagagcttcaaaaagtccagcagcctgttgaaaagtctttttcgacaggctgggccgccgcacgcaacgggtgcggcggcttttctgtgcgggggcggaaagttccgattgatctctccggggacgggtgataggatagacggagacaaaagaaccggaggggaccgccatgattttcaagggcaactttttatacactcccgcgctgggcgagctgaccgtgcgggagggggagtacctggtggtggagggggagaagtgcgccggcttttaccgggcgctcccccaggagtacgccgggcagtcggtgaccgacttcggccgggcgctggtgctccccgccttctgcgacctccacctccacgccccccagatggtgaaccggggcgtgggctacgaccaggagctgctgccctggctggagacctacaccttcccggtggaggcccgctacggcgacgcggactttgccgaggcggcgtggaagcggttcctcaaccggatgtgggccaacggcaccctgcgcttctccgcttttgccaccatccacaaggaggccgtctggcggctgatggagctgaccgagcgggcggggctgtccgccctcatcggcaaggtgaacatggaccgcaatgccccggacagtctgcgggaggacaccgacgcctccctggcggacacggaggagctcatctgccgcagccgggcggagctgaagcacgtggggtatatcctgaccccccgcttcgtcccctccaccaccgcccggctcatgaacggcctggggcggctgggggagcggtacgggctgcccgtccagtcccacctgtcggagaaccggagcgagatcgcctgggtggcccagctccacccggagtgcgccagctacaccgaggtgtaccgggactacggcctgctccgccgggggcgcaccatcatggcccacgccgtccacctcaccgggcgggaggaggctattctccgggaggagggggtcaccctggcccactgcgcccagtccaacactaacctgtccagcggcgtcatgcccctgcgccgcagcctgtcggaggggctgcgctgctgcgtggccagcgatgtggccggcggccacgccgccgccatgaaccggcatgtggcggccacggtggggctgtccaagctccgggccctggaccacccggaggagcggctcctctccctgccggaggccctctacctggccaccaaggggccgggggaattcttcgggaaggtgggttcctttgagccggggtatgacttcgacgccctggtggtggatgtggacgagctggacggccgcctgccccgcacccccttcgagaagctggagcagttcctctacgacggggacgaccgggatatcctggcccgctacagccggggctccctggtggaaaagccctttacggaataatggaagaaaagaccgccccggagcgcgtgcgctccggggctgctttttccgcggaggagggcgggggagagtcccggcgctttttctttacttccgatgggaaacgtgctaaaatacccccgactggtttccaaacccggtccaagcgcggccacggccgcgttcgttcggggggactcaccgccgttctctaaagactaaaatggaggtatgatcacacatgcgcaaatccaacatccaacagctcaccctggccgcgatggtggccgccgtctacttcgtcctgtgctacttcggcaacatctttcagctcaccttcggaccggttcaggtccgcttgggggaggcgctgaccgtgctgcccttcctgtttcctgccgccgcgccggggctggcactgggctgcctgctgaccaatattctctccccctatggtcccatcgacatgattgtgggcaccttggccaccgccatcgcagctttcctctccatcaagatgccccgttggtatctggccgccctgccccccattgtggtgaacgccctgctgctgccgcccatgtgggcttgggcggaggcaggggctgtcaacggcgctttctgggcggcgtatggactgaacctgtggacctttgtggcaggggaggccgtggcctgctgtgtgctgggcacgattctcctgaaggccctgcccagggttcggtatttccgccccatgattcccgccgcacatctgcaataacggcgggcggcgttccgcccgctctgctggaggttttttgttatgaaagttcgtaaggccgtcatccccgccgcagggctgggaacccggatgctccccgccaccaagaccgtccccaaggagatgcttcccatggtggacaagccggtgatccagtacatcatcgaggaggcggtggccgccggaattgaggacattctgatcgtcaccaaccgggccaagtccgccatggacgattacttcgactactaccccgagctggagacccgcctgctccagtcgggcaaggagtccgagctggtggaggtgcgccgggccgccgacctggccaacatcttctacgtgcgccagaaggagacgaagggcctgggccacgccatcggccgcgcccgccgcttcgtgggggacgagcccttcgccgtgctgttgggcgacgacatcatgcgggccaaaaagccggtgactctccagctggtggaggccgccgagaagtacggcgcgtccgccctgggggtgcaggaggtggccaccgaggccatttcccgctactcctctgtcaaggtcgcccccctggaggagcgcatcttcgacgtgtccgacatgaacgagaagcccacccctgagcagaggttctccaactacgccattctgggccgctacgtgctcactccggagatcttcgatattctggagaacgtcaagcctggttacggcggggagattcagctcaccgacggcctgcgggagctgtgccggagaagccgcatggtggccgtggactttgagggccgccggtatgacaccggcaacctctgcggcttcctggaggccaccatcgacttcgccctggatcacccggccaccggtgcgtggctcaagggcttcctgaaggagaaggccgagacgctgcgccaggagcgctgacaaaagaacaaaagaaacgcggcgccccaggcattgcctggggcgccgcagacgggcgaaaaaccttccaggaaggaaagcctcgcagaattcctgcggccacagccgcaggaataacatgaaaatcagtcatttccggggacatgcgccccggaaatgacacttccgcgcaagatgagccgacttttccgtcgagaatcaaggttcatcttgcgcgcatctccctcgaaaaagtggctcttgccgcttttccgacaagcagaacccctccggtttagccggaggggttgatttattccggggcgggggactcagcggcccacctcgatgccggccagataggcgctgcgggtggcctgatccaccttgccgggctggatggcgtcgccgatgacccaggtcttgagtccggcggcctcggcggcggccttcaggggggcgatgtccacgctcttcatgcccagggcaaagaggacggtgtcggcctccagggtctggacgccgccggcgttctccaccttcacgccggtgggggtgatctccaggcagcgggtcttgggcagcatggccatgccgcatttctccatctcccagatcagggcctcccggtacatgccgaaggactcgttggccagccggcccagcagctccaccacggtgacctcgtggccggtcttctggaggaagaggccggcctcgcagcccaccaggccgccgcccaccataacaatcttgtggccgggcttgaccttgccgtcgtacatgtccatggccttgtgggcgtgcccgatgccgggcaccgggggacaggagggcagggagccggtagcaaagatgacgccgtcggcgccgaaggaggtgatgttctccggcgtgatcacagtgttaagccgcacgtcgatgtcacggcgctccacctcgcgcaccagcaggttcttgaagttcatcaggtcgggcttgtcggtgtccacgtcggtgaaccgcagcaggccgcccaggtggggaccctgctcggccaggatgaccttctgaccccggtcgcaggcggtgatggcggcctgcatgccggccgcgccgccgcccacgatgagtacggtctcctgcttagaggcgggggccagggtgtcgggatcgaagggcaggtgggccagggggttgatggtgcagtggcccacgtagagggccagctcctcgctggtaaagggcaggtcgtcatagccctcctcgggggagccggggaagcacttgtagcagcgcaggcagcggcggatctgatcctcatggccgcgcttggccttgttggcaaactcggggtcggccagcatctggcggcccaggatggcaaagtcgatcttgccctcggcaatggcctgctcgcacagctcgggggagttgatgccgcccacggcgcccacgggcagtttggtgtacttcttgatgatggcggcgttgtcgatgttcaggccgtgggggtggaacatggagctctcggtgcccgacttgaccgacgcctcatagataccgcaggtcacgtggacggaggtgatgtagggctcggccatggcgacgaacgcgccggtctcctcgggggtgatgccgccgggctggtggtcggtgccgtcgatgcgcagctccaccaggaagtcggggcccaccgcctcccggacggccttcagaatctggagggggaagcgggcgcggttctccagagagccgccgtagctgtcggtgcgggtgttcatcaggggggagaggaactgggtgaagaggaagccgtggccgccgtggatgagcacgccgtcaaagcccgccttctgcatgtaggtggcggagacggcgaagtcgcgggcgatgcgggccatgtcgtcctcgttcatagggcgcaccttcacgccggccaggttggtggtctcgatggggccgatggcctcctgcccggggccgaagggcaccttctccttgccgcagtggaccagctcggccagagcgacagcgccgtggcgcttgatgcggcgggcatactcgcccacggcgtcaaaggtctcgggatcctcctcgggcttggcaaagtcaaaggggcggaagccggggatgcgcacggcgtccacaaagtttacgtcggtctcgcccacgatgacgcagccgttgccgcccttggcgctggcctccagcttgcggtaggtgaagtcccgggcatccgggttctgaacaatgaggccgaaggccatgggggcgctgacaatgcggttgcggtaggtcaccttgcccacctgcatgggggaaaacagatgctcaaatttcatgacactcagactcctttcttagatgccggggaactggatgctctggtacttgggcaggcgctcggccaccagctggcgcttggccggatccaggaagaagccgccctgggtctcggcgatctcgtcgcagtgaaccccgcggccctcctcggtggtgcggtcacgctccagcccgttctcggcgatgacgaatttccagcgcccgtcctcggtctgctccagggtgccgcccgcgccgcacaccacgcactcgatggggtactgtagccccttccactggggctcgcccaggcacagggcgttggagtggcagttggggcaccatccgtaatcgggatcgcccagccacttgcgctcggcggggggcgtgttgagggccttcatcacgttcaggcccatctcccgggcccgggccaccttctcctcgtagagaagcacctgggcgggggcgggaacctgggtggccatgtacatgtccacaattttgaagctgttggtgaaggtggtggcctgcatgcactccagggccatggactgccaggagcgggtggagccgcccacggcgatgagcgcgcccacccggtcccggggcgcgatggcgccgatcttggtcaggaaggccgactcataggccaggttgcggtgcatgaacttcaaaaacagggaggagggcatcagatcataggtgggggcggagaagatcaccgcatcctgctccagcatcacatccatgattttctgcttgtcgtccttgtccgccagggaacagccggtgttcttccccatggacatgcccatggtacaggcggtgcagccgttgcagtccaggagctcgtaatccttcagatcgatcatgcggacctcggccccctgctcccggcaggccagaagagcctccttgagcaggatttcacagttgctgtccttgcgtccggcggtcacgcccattacttgaaacgccacgcgcatcactcctcttttataatcgggcaaattgtatcactccgggcgaaaaaagtgaaattcacgttttttccaggattgataaaaaagcgttatcaatttataatacgagcagggagaggagggagcgcaatgaacaccgagcagcttcgctatttcgtgtcggtggcccgttaccggaactttaccgagacggcgcgggaattctatgtgacgcagcccgccgtgacccatcagatctccgccctggagcgggaggtgggcgcacgcctgtttctgcgcaccacgaggaacgtgtcgctcacccgggccggggagctcttcctggaggacgccaagcgcatcctggaccaggaggagcgggccctgggccgcctgcgccagctagagtcctcgggatgttgggagctgcgcatcggctacctcaattccccctcccgccactttttgccccggctgatcgccgcctatcgggaggcgtatccccaggtccgcgtggagctcatccggcgggacgccaccggcatccaggcgggcatcgacgcggcggcttatgatgtgagcttctcggtgctctccgacttgaaggggatgaacggctacgcctgccgcaagctgggggccgacttctactgcctggtctgcccgcgggagcacccctgcctggacaacgccgtgatcgactacgccaagctggccacggagccctttgcctgcctgtcccacaccggcggggcctatatgtataagcagttcctccagatctgccggggactgggtttcaccccggcgtcggtcacagagtatcccgccctggaggatgtgatctttgccgtggagtgcggacaggcaattgccattctccctttccggattcgggagtacatgcataccaccggcctggcctttgtcccgctggaggggcatgggcagaccatcgagctgggggtggcgtggcgggagcccagtgacaatccggccgtggagtggtttatggccatggtcaaccgctggcttctggagcatccggagctgttttaacgcagacgcaaaaaagtaccgtcaggcggcagcgcctgacggtactttcgggtacggagcggtttgcgaaaggaattagtcgtagatgctgtccacgtcccagtcggtgatgacgccggtggcggcgttgatgtcgcactcatactccatggtgcccgagaccatcttgatctcatagatatagcggccgtcgtcccagtccaggtggcagcgtaccacggaggcgccggagggggcttttgccaaagcgatctccttggccttggcctcgctgatcagattgttggtggaggtgccaggggtggaagggttggcggcgttgtttccgggattccatagggagaaatcatcccagtcatggtcataggagcgaatggcgcctgtcgtggcgtcgatgctgtaatcgtactccgtgttcccggcgtagaattccacctcgtactcggtgcggccgtcgtcccagtccagtccggccttcacgaagatggcgtcggcggccttcacgccggcgtggttcagggcgatctccttggccttgtctacggagatgtagttggaggcggagggggtggaggcgatatagcggtcgggggtggtgaggacggcggtatagttggcggagtcaaagtccaccttcaggccggcggcctcacagatggcgcggacgggggcgtaggtggtgccgttataagagaacagggggacatccctgcccttggcgtccttgggggagaagaccgcaccgttgagggtgatgcggatgttgtcatccacggtgatggtgcggctggccgccatggccgacacacccaggcccaccgtcaaggcagccaccagaataccactgcaaaagccttttccaaaaccctttttcatcatcaaaactcctttatcctgtcaaatctgcggcggggtttcccgcccgttctgacagtaaaatgaagcagaggggccgtttattgcacggaagccaaaaaatattatttttttggaaaggcttgactttttcgctgattcctatataataatatagcttgtttcaaaacaggccatccttgcccccgcacaagggcgggggccatacgtccataaggaggtgcaaagaaaatggcaaaactgagcggaaactacgaggtggtcttcatcctcaatcccaacctggatgaggaggccaccgctgccatggtggccaagttcaagaccctggtggagcagaacggcaccctggctgaggttgaggagtggggcaagcgccacctggcctatcccatcaacgacctgaccgagggctactacgtgctgatgaccttcaacgctaagcccgagttcccccgtgagctggatcgtatcctgcggatcaccgacggcgtgatgcgttccctgatcgtctgcaaggacgagaagtaagaagggagcggcagacatgctgaaccggattattctcatgggccgtctgacccgtgatcccgagctgcgccacacccagacggggacccccgtggcctccttctccctggcggtggaccgggacttcaaggacaagaccaccggcgagaagtccacggacttcatcgacatcgtggcctggcgtcagaccgccgaatttgtctcccgtttcttcaccaagggccgtatggccgtggtggagggccggctccagctccgggactggaccgaccgggacggcaacaagcgccgcaccgcggaggtgatcgccgacaacgtgtacttcggcgactccaagcgggacgcggaggcgggcggctatgccgcgccctccggcgggttcggcgctccggccggcggctacgcgccgcctcccgccgcgcccagcggcggctactccgcccccatgggcggcggcgatcagttcgccgagctctctgacgacgacggggagctgcccttctaacacattttgcgcacgacagtcggtgcgcagcaataaaacaagacgggctgaaggcccgtgaaaaaggaggttccctgttatggctatggatagagagcgcccccgcggccgcaagcgccgcaaggtctgcaccttctgtgtggacaaggtggagcacatcgactacaaggacgcggtcaagctgcgccggttcctgtctgagcggagcaagatcctgccccgccgcaccaccggcacctgcgccatgcaccagcgtcagctcactgaggccatcaagcgcgcccgtcagatcgcgctgttgcccttcgtgaccgactaattgcagaagcaaacgagaggccagcccttcggggctggcctctcgttgtttgcattgggggacggcgggcggccacaagggccgcccctataaattggtaggggacttcgtaggggcggggtttatccccgcccgcctccgccgcagcaacgcaccgtgggccgtccctccggctgcgccggcgacgtaggggcgggtgcccacacccgcccgtccgccgtgttgccggagctcgcaggtctacccagcccctgcggccggggcgatgtgggcagaaggtgaattgccccgcaggggcaagagaagccgccctggggcgtcgccccctacacgacgccggggacggcgggcggccacaagggccgcccctacaaactggtaggggactttgtaggggtggggtttattcccgcccgcctcctatgcgttcgcgggcagctccggcccggcggcctccgggaaggagaccacggccttgaagaggtctccgtcgatgtccagacggaaggtgccgccctggagctcggtaaggctgcgggcaatggacaggcccaggccggagccctcggtggtgcgggactcctccccccggacgaaccgctccatgagccgctcggcggggatgttgaggggctggcgggagatattcttgatggacaggaccaccttgccctcccagcggcacacctccacatagatgcgggtgccctccagggcgtacttgttgcagttggagagcaggttgtcgatgacccgccacaggtggcggccgtcggccaggatggagcactcctcctccgggaaggcgggcaccacggtgaggcggctctgggcaaatttctcctcaaactcccccagggcctgctggacgagctgcaccatgcccagccggtccaggtgcaccgacaggcttccggtggacgccttggacgcctccaccagatcctccgtcagcttcttgaggcgctggctcttgcggtccagcacctcgatatattcctgggccttgggattgtcgatgtcctgctttttcagcagatccacatagttgatgatgctggtcagaggggtcttgagatcgtgggagacgttggtgatcagctcggccttgaagcgctcgctctggatgcgctcgtccacggcatttccgatggcggcgcccagatcgttgagctgcccggcgtgccgggccaggtcactgtacattttgtgggtgtcgatcttgaagtccgggtcgccccccacgatgcggccggtgccctcccgcacccgcttccattggatggtccagcggcaaaggcagtagagcacaaagccctgaaacacggggatgaggaagatggtcagcgtggtgaacagggtgccggccaggtagagcagaaagagcaccaccacccggcccgtcatgggccagctccgggccgccgcccggcagccccgggcgatcagcttgcacagcatatagatgagggtattgctccacagggtgcgggtcttgatgcgggtggccacggtaaggcagaaggccaggacacagcccagaatggctacggtgatgacacacatgccgaccagcaggtcggtggccagttgggatacgttgaggccgaaggcgatcgcgtcccccgcgttgagaaggagggcgatggcccaaaacgcgccgaaggccagcagatccagcgggatgcggtcgaaccagttgcacctcgggcggctctcctccttccgccagccggcagcccggagcagaaacaccagcaggagtatccctgcgatgtccagcaccagggccagcaccgccagggcggggaggtagctggcgtactgctggtagtcctggtagctgtcccagaactcgtcctggacggtgagcgggtcggttgcgccgtattccagggccagcacggaggtggtcacccggctgtccatctgctcgtcatagttccaggtatagccgtcaaaggtgtagccgtattgggcggcgagcccggcatcctccggggtgacgagctgcttggtgccagcggcgtcgggaagggcgatatagaggaggtagtactgctccttcccgttccagaccacataatcctgctcgcgggcggccccgttctgggtgagggagagctcctcctgctccacggcgtgaacgctctcgtccagggaggccgccccctccaggttggagtagacgagggtgccggtgtcgttgcgccggatggcaaaacggaagttggtccgctccggggagagggcctcctccagcatgtccagccgccgctggtccaggtagggcagggcgccgttccactcctggttttggagcagccgggccagctcgtgcacctgactggagcggttatacaggtcggagtaatagtcgttgctgtcgtaatacccgctgcccagccacagggtatcccactggtagaggataaagacagtggaccagaagccgccggcgcccacggccagggccagaaggacggcggccgtcttggccgccagactggttcggaatcgtttcatggcattacctcctggaatatgggcggggtgcggccggagcgaacgccccctagaccttttccatcttgtaccccagcccccagaccaccttgatgtaccgggggttggccgggtcgatctccagcttctcccgcaggtggcggatgtggaccgccaccgtgttttccgagccgagggaggggtcgttccacaccagctcatagatctggctggtggagaacacccggccggggttcttcatcagcaggagaaggatgttgtactcgatgggggtgaggctgaccccctccccgtccacggtgaccgatttggccccgtcatccagcgcgatgccgccgttggtgagcagggcgggattggcctccccgccgccctgcttgccgcccaggctggtgtagcgccgcagctggctcttgacccgggcgatgacctcgatggggttgaagggcttggtgatgtagtcgtccgccccgatgttcagccccaggattttgtcgctgtcctcgctcttggcggtgagcaggatgatgggcacgttgcagctctcccgcagcttggccgtggtacggatgccgtccaggccgggcatcatcacgtccagcaggatcagatccaccggctcgctctccgccaggcgcaggcattccagcccgtcgtaggccttcacggtggcatagccctcgctggtcaggtagatgtccagggccgagacgatgtccttgtcgtcgtcgcagatcaggatggtattcatacagtcacctcagattgtaaagtcagtatagcagacgaagcttaagggacgagggggaaaatctttaaaaagcgtttaagaccccggaacattttaccccagaacccgtctaaaaagcaaaccatattataaaaggagggtgttccatgaagaaacgaaagctgctggccctgtgccttgtgccggccctgctggccgggtgcgccgccccggcgggggtgaccgacctgtcccggcagttcgaggcgggcgcccccgcgcccccggaggccgacccggcggcggacgccgccatcggcaccctgggggcggagctgctgcgggcggcccgcgaaccgggggagaacaccctgctctcccctttgtccgtggccctggccctgtccatgacggccaacggagctgcggaggacaccctggcggagttcgaggctctgctgggggcggacgtggcggccctcaacgccaatgccgcctccctgctggctgattacgccgccctggggggctccacggagtgctccatcgccgacagcctgtggctggacgggcggctggaggccaacgaattatttctctcccggtgtacggcgttctatggggcacagctctatcaggccgatctggataccgacggggcccgccgggcggtgaacaactgggtgggggaggtcacccgcgggctgatcccggaggtgctggccgagacgcccgcccccgagaccgtcctgctgctggtcaacgccctctacctgaaaaacgcctgggccagcgaatttgatccgctggacacccgccccggggacttcaccgccgccgacgggagcgagaccgagacggacttcctctccaacggcctgcgcgccgagcaatacttcgccgcggagggggccgccggggtggtgctcccttatgacgacgggcggctgggcttcctggccgtgctccccgacggggagctggacgcctggctggagacgctggacggggataccctgcccgccctgctggcggccgcggaggaggagcgggtgcttctccggctgcccaagttcgaggcggagtggggcggagagctgtccgacgccctggccgccatggggctggagaccgccttcgattccggccgggccgacttttccgccctgggcaccgcgccggacgggccgctgtacgtcagttctgtcgtccacaaggcccgcatcgaggtcaacgagaagggcaccgaggctgccgcggccactgtggtggaggtagaggacgcggccgcgcccacagactaccgggagctggtgctcgaccggcccttctgctacgccgtggtagatttggagcggggcgtaccgctgtttctgggtacctttgagcggccctagcgggcggggataaaccccgcccctacaatgccggaggggggtaagcctgcccgtaggggcggcccttgtggccgcccgccccttcgcgccgggtggtgtgcgcggctctgccgattgcgggcggggataaaccccgcccctacaatgccggaggagggtaagcctgcctgtaggggcggcccttgtggccgcccgtcccttcgcgccgggtggtgtgcgcggctctgccgattgcgggcggggataaaccccgcccctacaatgccggagcctgcctgtaggggcggcccttgtggccgcccgcccccgcgcgccgggtggtgtgcgcggctctgccggttgcgggcggggataaaccccgcccctacatgccggaggagggtaagcctgcctgtaggggcggctcttgtggccgcccgccccttcgagccgggtggtgtgcgcagccctggcgaatacgggcgggtgtgggcacccgcccctacgtttccggcacaggcacaaactcgttcgccgcccctggcagtccgtagagggcgacgccccagggcggcttctcttgccctgcggggcaattcaccttctgcccacatcgccccggccgcaggggctgggtagacctgcgagcaccggcaacacggcggacgggcgggtgtgggcacccgcccctacgtcgccctgctgggggagcttctgcgggcggagtacggactgggggttctcccggcgatggcgcggggggcggacggcaagccttactttccgggggagccggagctgcacttcaatgtgagccacagcgggggcttggccctctgcggcgcgggggaggcccccctgggggtggacgtggaggtgctgcgtccccgccgccctgggctggagcggtatgtgtgctcggagacggaatccgcctggctggagcagcagggcggggactgggggacgttttacacactctggacgttgaaggaggccagggtcaaatgcaccggggagggtctgcggcggcccccgcgggacatcgccgttcctctcctccggccgggggagacgggagagctggatgggctggtcttttccgccttttccggcgaaacctggcgggcggcggcctgctgcccaacccctcagggccagttggagctctttgttagaaattcttaatggctttttaagaattcgagcgaggttttctaaagaatcctcctttatactgatatatgaaaaggagggaacaccgtgaatattctgattctcaccggaaaattcggcatgggccactggtcggcctcccagtccctgcgccagcaactgctgcgggcgttccccggggcggaggtggaggtgctggacttcgtggcggaggccatgcccaacgcctccgaggccatgtataagtgcttcaacctgctggtgacccgtggcagcgggctgttcaacctctactacaagctgacccaggatctgcccgccgacgcccgccccctgtttgagactttgttcctggacaaactggaggagcttgtcgccgcccggcggcccgacgcggtgatcgccacccaccccctctgcgcccggatggtgtcccgctggaagggggagacggggagcgccctgcccctcatcacctgcgtcaccgacctgtccagccattccgagtggattcacaaatacaccgactgctatctggtgggctccaacgacatccgcagccgcctggccgccaagggggtagaccgggacatcatctgcgtcaccggcatccccgtccgctgcgagttcaagcggccggtgcgccgccgcccgggccgggagcgcaacctgctcatcatggggggcgggctgggcctgctgcccaagcgggacagcttttatgaggcgctggacgccctgcccggcgtccacaccaccatcatcaccggcaacaaccgcaagctctacgaccgcctggcgggcaagtatgcccacatcgaggcgctgggcttcaccgaccgggtatacgactacatggcccgggcggatctggtgctcaccaagcccggcggcattaccttgtttgagaccatcttctccgagctgcccatcctggcgtgggagccctttctggagcaggagaagaacaacgcccgcttcctggtgaagcggggccttggccgcgtggcggccaaggagcccgaggagtgcctgtccgccattcgcgcgctgatctacgacgacgagacgctggagtggatggcgggcaacatgcgggccatgaagggacagttggaggaggagagcctcaaccgcatgctggcgggcctggaggccgagaagggggtacgcgtcggatgaaccggaaaaaatccttggtggggatcggcctgatcgcggcgctgatggccctcactggctggctgctgttcagggaccagcccgtcacccggctgctccacaccctgggccagctcaggcccggctggctgctgctggggctggctctcatgctggccttcgtggggtgtgaggccacgtgctcccacctgatcctgggacggctgggccaccgggcccccctccgccgctgcctgggctactccttcgtgggcttttatgtcagctccatcaccccgtcggccaccggcggacagcccgcccagatctactacatgtccagggacggcgtgcccgccgcccacggggccctcaacatgatgctcatcgccgtgtgttatcaggtggtggtcatcggctacgccctggcggtggcgctgctccgctttgatctggtggctaacctggggggcgggctgggcctgctcctgctgttcggcgcggtggtcaacggcgcgctgacggcggggatgctctgcctcatgttcctgcccaatgcggccagaaggctcactggcggcgtactgagcctgctggtgcgcgtccgtctggtccgccgcccggaggaggccagggagaagctggagaagcagatggaggagtaccgccggggggcggactgcgtcaggcgcaaccccgccctggtgcctgctctgctgggcctcaccttctgccagctcaccgccctgttttccgtcccgctggtggtgtaccacgctttcggactgaccggcagcggggcgctggacatcatcggcacccaggccctggtcaccctggcggtggcctccctgcccctgcccggggcggtgggcgcctccgagggcggctttgtggcagccatgaagctcttcttcggcgccggactggtgaccccggcggtgctggtctcccggggcatcagcttctattccttcctgctgctcagcggctgcgtcacgctgctggtgcacctgcgcacccggaaccggcagcctgtggcggtgtccccccggctccctaagaccgcccggggcacagttgtcacctgagcgccgttttccctcttgtgcggcggcccgtcctgcattataatgtgaatacgtttcacgcaggaggggcaagctatgaagtatttgggaattgatttgggcggcaccaacgtggccgccgctgtggtggacagcgaggggaccatcctgggcaaggtgagtctgcccaccccgagaggggcggaggcggtggccgaccagatggccgcggccgcccgcggggcggcggaggccgccggcacggcgctggacgaggtggcctcggtgggcatcggcgctcccggcgccattgagccggacaccggcgtgatcaaatactggtccaatctggacttcaccaatgtgcccatcaccgccctgatgaaggcgcggctggacaaggagatcctgctggagaacgacgccaacgccgctgccctgggggagtacgccgcgggcgctggcaagggcagccagtccatggtggccgtcaccctgggcaccggcgtagggggcggcgcaatcctcaacgggaagctctacaccggcttcaattacgcgggcatggagatcggccactttgtcattgagcacggcgggcggctgtgcacctgcggacgccggggctgcttcgaggcctactgctccgccaccgccctcatcaagcgcacccgccaggtgatggaggaggatcgcacctccaggctgtgggagctggcggggagcctggagggggtcaacggccgcactccttttgacgccgccgcccagggcgatcccgccgcgggcaaggtcatcgacgagtatgtggactacctgggctgcggggtggccagcttggtcaacatcttccagccggaggtcatctgcatcggcggcggcccctccgcccagggggagaccctgatggccccggtgcgctacatcctcaaccgggaggactacgcgcgcaacaacctccaccgcacccggctggtacgggcggccctgggcaacgacgcgggcctcattggcgcggcgctgctgccgctgttccggtagagctccagggctgaactccgctccggcgccgcaacgtcaacggaggacctcccttacggcaggtcctccgttctttcgtacccggcgcaggggccctcttccggggccgctggctctgccccgccctcctccggcgggaaaaggagcagggagagcccgaacagaatggccgccgtgatggcgatggcctgtaccttgtgctcctccagccagggacggtagggctccaggggcgggactttcccggccgccgcgtagagcgccaccgcaaccaccacgcacagggccagccgggtgacggtctgttgtttgtccggtttggtttccataggcgccgcctccttctctccatgtatagcgggggacagggccgggtagaccagcaggctgcttcggatatgaaaaaacggtaaattttgagggggcgtacttgtcccacccggcgcgatccactatactacagaggtatcggaccgaattttgaggaaatcagaggcggaagcatgaaacgcaagcacacaaagcagccggccgcgcaggtcccggccccccagccccggcgggaggtggcccggctcagccccgatccggagcaggggctcaccctgcaccaggtaaaagagcgccagcagaacggctgggcaaacgacccggtggactcccccaccaagacggtggggcagatcgtgcgcgaaaacgtctttaccttcttcaacttcatctttgtggtgctggcggccctgctggtggcggtgggctccttcgacgacatgctctttctgctcatcgccgtggccaataccggcattggcatcgttcagcaactccgctccaagcagaccgtggacaagctcaacctgctggccgccccccgggccaacgtagtgcgggaggggaacctgatctccgtgcccgccgcccaactggtgcgggatgacgtggcggagctggcctccggcgaccagatccccgccgacgctaccgtcctctccggccaggtgcaggtcaacgaggccctcatcaccggcgaggccgacgccatcaccaaggcccccggcgacgagctgctctccggcgccttcgtggtgtctgggcgctgccgggctcggctggaccgggtgggggcggagtcctatgccgcccgcctcaccctggaggccaagaaggatgtcaccgtgggcaagagcgagatgatgtcctccctggacaagctcatccgcatcatcggcatcctgctcatccccatcggcgtggccctgttcgtcaaggagttcgtcttcctggagcgcaccgcccaggaggcggtggtgtccatggtggccgccctcatcggcatgatccccgagggactctacctgctgaccagcgtggccctggcggtgagcatgattcgcctggcccagggcaaggtgctggcccaggatatgaactgcatcgagaccctggcccgggtggacgttctgtgcgtagacaagacgggcaccatcaccgagccccacatggaggtaggggaggtggtgtacctggacgaggagaagtacgccgagaccgtggtcaccgagaccctcaacgccttttaccagtccatggaggcggacaacgacaccgcccgcgccatggcccagaaattccacggcaagtccctgtggcatgccgcccagaccatccccttcacctccgccaccaagtggagcgcggcggtgttccccggccacggcgcctttgtggtgggcgccccggagttcatcatggggaaccgctacgccgatctgaaggaggcggtggacccctggtcggagaagggctaccgggtgctgctggtggccgagtacggcggggtgcccgaccagaaggggctggatccccggcgggtgtcccccatggccctggtggccctgtccaaccgcatccgcccggcggcccccaagaccttccgctacttcgccgagcagggggtggccgtgaaggtcatctccggtgacaaccccgtcaccgtctccgaggtggcccgccaggcgggcatcgagggggcggagaagtacgtggacgccgccaccctccgctccgatgaggacatcgcccgcgcggtgcgggagtacaccgtcttcggccgggtcacccccaaccagaagcgcaagctggtccgcgccctccagcggcagggccacaccgtggccatgaccggcgacggtgtcaacgacgtgctggccctcaaggacgccgactgcggcatcgccatggcctccggctccgacgccgcctgccacgccgcccagctcgtgctcctcaactccgacttctccgccatgcccaaggtggtggccgaggggcggcgggtcatcaacaacatccagcgggccgccgctctctatctggtgaagaatatcttctccttcctgctggccctcatctccctgttcgccaccttcccctatccggtcacccccctccagctctccctgctcagcgccgtcaccatcggcgtgccctccttcttcctggccctggagcccaaccacagtctggtaaagggcaagttcctgtccaacgtgttccgcgccgccctgcccggcggactcaccgacctgttcgtggtgctgggggtggagattttcttcctcaccttcggcttcagcgaggcggagctgtccaccatgtcggcgatcctgctcatcgtcatcggcatcatggtgctctatgaggtgtgcaagccctttgactggaagcggcgggtgctgtggggggccatggcgggctcctcggcggtgacaatcctcggcttcggtggcagcttcggcctcagccccctgggtacgcaggccttcctggtgctgctggtgttcctggggctggcctactccatcatgcgcttcatgttgggcctcttcgaccagggggagcgcctgctgaaccgtgggcggcatctgcggaaacggaggtaacgcatgcacattcgcccctaccgcagctccgactgcccggccttggcggagctgttttatcaaacggttcacgccgtcaacgcccgggactacagccccgagcagctcgacgcttgggcggatggccgggtggagctggccgcctgggacgcctccttccgcgcccacgacacccgggtggcggtggagggaggcgtgatcgtcggctttgccgatctcgggccggacggctacctggaccgcctctatgtccacagggactggcaggggaggggggtggcctccgccctctgcgacgccctccccgccgcccgcatcacccatgcctccatcaccgcccggcccttctttgagcggcggggctggcatgtggtgaaggagcagcaggtggagcgccggggggtgctcctcaccaactttgtcatggagcggtcatgcccgccgccttcccgccctgtgtagggcgcggcatccctgacgcgccgcttttgccgcgttctggcaggcccgccccgccgccgtttttccccgtgcaagcgggccttgcgtgacaaacgggaggttctctgctacgatggaggggagaggggggaggcgtatgcacgacatcgcccgcaatctgaagtgtctgcggcggcagagggggctgacccaggaggagctggccgcccggctccacgtgacccggcaggcggtgagcaactgggagcggaaccggaacctgcccgagctggagatactcctctccgcggcggagcttctgggggtcggcgtggacgagctgctctatggtccccggccggcggagggagcggcggccccggcaaaccagcggaggcgcacggttaccgccggggcgctgtgggccgtctgggcggcgctgtggctggcctaccagctctgggcgctcccggcgcttgaggcgatgtacgataaatatgactactctgcggcgggctggctgctgctctggcccgccctgaatctgctgctgggaatggcggtgtgcgccctggtctctatctggcgggagctccgcccccggcggctggcactccggcgtgccctgttctgggcgggggcgggctgcgcggccctgcttcttctgggcgtgctgctgttgcctgtgcacggggcccttgtggcccttcatgagtccgccatcccttatctgctctgcgggggtctgatcttctgcggctgggggcgaaaagcgggttgatttcccgggtgttttccggtaaaatgaaaggcgcggggcatggctccgcgcttactctttggataaagggggtattcttcatgctgaaggtactctatctgttgaatttcgcaggcaaggcgggaaccgagcggtacgtggagaccctggtgaagtatctctccaccgacgggctggtgcagcccttcttcgcctacaacgagggtgggctgctggtggagcggctggaggccatgggcgtgccctgccgccgggtggagatgcgccgccgcttcgacaaaaaggccgcccgtgaactggcgaagctctgcgccgagtgggacatcgacctggttcactgccactatctgcgggagcactacaccgccctgctggccaagaagtacaataaaaaaatccgcgtggtctataccaaccattttgtcctggccaacgacttcgtgacccgcttctccaaccgcatcatggaccggcggcaggatcagatgatcgccgtgtgcaacaaggggaaggagcagctcgtcgccaacggctggagcgccgaccgcatccaggtcatcttcaacgccgtggatctggatgcctgggcgggagaccgcagccagtccaccctccgcgccgagctggggctggacgacagccgcttcgtcatgctgtgcgcctcccggtttgctggggacaagggacacaagtacctcattgactcggtcaagcggctcaccgagctgtgcgccgtgcccttcaccctggtgctggccggggacggccccctgctggagcctacaaaagcccaggtacaggagctggggctggaggactgcgtgaagtttatcggcttccgcaaggacatcaagaacctctataagggagcggatctgtacgtcaactcctcccagcacgaggccctgtccttcctcattatcgaggccatggccgccgggctgcctgtcatcgccaccgacatggggggcaactccgacatcgtcaacgacgaggcagggtgcggcatgctggtggagtacgataaccccgactccatggccgtggctatgaagtgctttctggaggacccggctttcgcagcccggtgccgggagaacgcgcgcaggaccatcgaggacaagtttgaaatccacaaaatggccagggccacttacggcgtgtatgaaaaagccctccacgattgattgctaggagtattattttttatgtctattactgaaaacagcctctttgtccgctttttcctgtccctgtggctgtgcttgaagaacgcggccgccaacagtgccctggggcgggcctgcgaccggctggagggatggtttctccggcaggcggagaacagcgccatctgtaccttcgtctggcgggagggccgcatccccagggcgtggccccacagcattgcatgtcgcctgtttaccgccatcatcaacatcccctgcgcccttttcaaggccgtctaccgggcgggaaaacgggtgtgggacgccagtctgttctgccgcctgataggggcgctgggcggggcctccttcctcttcctgggactgttcatgatggtcatgctcatgactccccatgctatgtggaacaacgtctacggcctgatgggtgcggtagccctcaccgggctttttgtggtgggcagtgcctcgcgccccaaacaccggctggagctggacaccctggggccctatatgacgctctatatggcctttatctgtatcgccctggcgggctccctgtccacccgcctctccctgcgcttcttcgccttccacctgaccggctttttgctggtgctgctggtggtcagcatggtgcgcaagtatgagcagctccagctcatggtggccctggcggtgctgggcctctcggtggccgccctctacggctgctatcagagctatatcggcgtggatatcgtggcttcccagcaggatatgaacctcaatcagggcatgccgggccgggtctactccttctttgacaaccccaacaactttgccgagcagttggccatgctcctgcccctgaacctggctctcttcctcaattcccgctggcgggggaagctcctttccctgctctccctgggggtggggctggtggccatcggggcaacctacggccgcgccagttggatcggcctggccggggcagtgctggtcttcctggccctgctgaactggcgctgggtgccggtcttcctgctggtgggtctggccgccatccccttcctgcccgagaccatctacaaccgcatcctcaccatcttcaacgccggagaggatagttcggttcagtaccgtttcggtatctatgagactaccaggaacctgatggaggactactgggcgaggggcgttggcctgggcaccgatgtaatgaagaaggtcttccagacctatcccaccaacttcgacggctcctatccggttcatacccacaacaattatctccagatgtggggagagacgggtatactcggtctgctggcctacctgtctctgctgctctaccaactgaagtcgggtgtgaaaggcttctgtgccgccctggacccccgggtgaagcggatgatggccgccgccattggcgccttctgcggtatactggtcattggcgtggcggagtacacctggtattacccccgcaatatgtttacctactggttcctgttcggtgtcatcggcgcctgtatcaagctggtgcgtatggagcaggataagcaggcggcgtaagaggaaaatgtctaccaaatgtctaccaaaaagagcccggaaccgttgcggttccgggctctttttgcgcttggcatgcccggcgtgtctaccagatgtctaccaacgccactttttgccgctcttttgtgccatttggaactgcatgtggggcgaatccctcctttttcatggcttgcaaggggcgtcatacttgactgaaacgcgcagtcgtgagtaggatgccccgaaagctcaaaatttagaaggaggaattccaaacatgagaaacctcaagcggactctcagcctggctctggcctccgtcatgctcgtgggcatgatgagtgtcggcgccagcgcggtgaacgcgagcgatttcaccgatgcggatgagatcgtaaacaaggacgccgtttctaccatgactgccctgggcatcatcaatggtaaggaagacggcagctactttgaccccaccggcaacgtgacccgtgccgagatggccaagatgctctgcgtcgccatcaacggcggtgtggatcccgtgctgggcgtcaaggacacccccacctttaccgacatcaagggtacctgggcagagtcctacattgagtactgcgccgccaacggcatcatcgctggccgcggcaacaacaagtttgatcctaccggcaccgtgagcgccaccgaggccgccaagatgctgctgggcgtgctgggctacaacgccgagaagtccggcctggtgggcaacgactgggccatcaacaccaacgtgctggccaaccagaacggtctttacaagaacctggccaatctgaacgccaacaccctgctgacccgtgacaatgccgcccagatgatctacaatgctctggacgccaacatggttgagctgaacgccgctggcaactacaccaccagccagtacagctacaccggcaccgagtccgtcgtgaccggcaccgagcgcgtgtgggttgtcaagatcaaggacagctctgttaacgatgccgtcaaggctctggacggctccgtctacaacagccgtcaggatgctatcgacactctgaaggacgcgaacggtggcaccactcttgatactggcaagtacactctggagcagaagacccagaatgtttacggcgagaacaccgtgaccaagtacgccgacgagaccatgggccacaagtacctgtccctgatcaccgacggcgacgctgtgctgaccgacgtggagaaggacagcaagggcacttacaccctgtacatgaatggcatcaccaccaagggccagtacaccaaggtcgagggtgactacagcaacctgatcggccagaaggtcgaggttctgtataaggacagcgagaatgtgtacggcgtctatgcctccaccgacagctccctgatcgtggagagcactgccggtaaggttgaggctgtcaagaacggcgaggtcaagattgacggcaccacctacaaggtggacagcaatgtgaccactaccgctctctacaccggtaagctgattgacggcctgaatgtgggcggcaacaaggccgccgctgtgaaggcttacgacaatgacgacaacggcaagatcgacaccgttgtttacgtccccttcaccgccgccaaggtgacctacgtgggcgagaagtccttcaacaccgatgttaacaccaatgttaagtttgaggacgtgaacgcttacgacgacatggccaagaacgactatgtcatcaagagcgacgccgccaacaccgtggatgacaccgatacttatgtcctggctgagacggtcgagggcaagatcgaggccaccaagagcgactccgtccgcattgacggcacctggtacaactatgttaccagcgatcccgacaccgatctggctctggacagcaccgtgaaggccgctgtgctcaacggctacatcgtgaagtccgaggttatcacctccagccacgagctgcaggattacgctgtgatcgtgaacaccgacaaggatatcaacggcgagcaggccaagctgctctttgccgacggcaccaccaaggtggttaccactgatgtcaagtatgatggaacctccagccgcgccaatgttggcgatctggtgacctacgaggtcaagaagggcgagtatgttctgaccaaggctgagacttccgatgccgacaaggccggctttgacaagattgttgctaacacctatgccaatacttccggcaagggcaagattggcggcgagagcatcgcggacgacgccgtgatcttcgtgaaagacaacgccggcaagttctccaccatgactggctctgactttgccaagtacagctccgcttccgtggccagcatctccaacgcctatgccaacaaggacaactccaccggctacaacagcgtggttctggcctatgcgactctgaacgcgaaggtcaactccatcaccagcaactacggttatgtgaccagcgccgtgtccaccaccaagaacgatgacggcgagaccgtgtccgtcttcaccttctgggatggcgccaccgagcacaaggacatcatgaccgacgagaaggtttccctgtccaagggcgacatcttcacctacgaggagaacagcgacggcagctacactgtcaccgaggtcgacaacctgctgcgcactgccatcattgcctacaacgagaagaacggcgatatccgcttcaccgacgcttctctgagcgacaagggcagcaatgttaacgctgagatcaccgacgataccgttatcatcggcatcaacagcgacgacaaggccggcgttgagggcgtggtgcccaccatcgccatcgagaccgctacctccggtgtctaccaggccaacgcctactatgtgatgggcgccggcgacgaggtgaagctgctggtggttgacacctacggcaacatccccgcggttgacagcgtaactactgttaccgacgagagcaatctcggtactgctctgaagcagtacacggatgtgacctttgagggtaatgctactatttccagcaagctggagatccccgctggtgccaccctgaacgtcaagggtgatctgaccgcaaatgctgctatcgttggcaacggcaccctgaatgtggctggcaatatcagcgacaccagcaaggtcagcactcagcttgagtccaccaagaccggcgaaactgtttccgtgtccggcggtgtggttctcggcgacgtgaccggcaatgtcggctccggtagcgctctgtactccggcgatcaggttaagggcaaggttatcgttcagattaccgttcctgcggatgcggtgactgacagcacctctaagattaagtttgacggttccgagccctctacccccacgctgaccaatcgtagcgacatttatctggctatcgatatgagccagtctggccagaaggttatcaccattgacaaggacggcgattggagctctactactaacgatgtgtataccctcaccgtgaagtggtaatctaactgcaatcggcttattacgaagagagccgcccccgattgggggcggctctttttgttagtggaaagctatatagtggtagctcattccggattggtttgcgtccgcgtagaatctgccctctatcaggtcgccgcgggccacccgtattccgctgctggtgatctccaccaggtttccgtcccgcatggtgaccggtgctccttgcagcgccagtccgccataggtataccgatcggactgcattgcgccgtcctgccttaccacaaagactgcccggggcgatacccccagcgaaatatcccggcttcgggcgtcatcccctgtatagcttccacttagaatctcaggctttaaggccagtgctttatccagcacacggaaatcctcgttgaaatccgtgcgcaggaaattgtcctccggctcccactggtgcaggtgatagtgttccgtataagctgccattttcattcctcccgcagggggggggcgggcagtgcctttgctgtactggaaaacgcggcccctgcgggaaaggaaccccgcgtccggctgtctaccggacgcgggggtggccttgcctgcggagggggtaatatagatggcaaactatacagcgcactatcacctgcaccagtgggaaccggaggacagctttttacggagagacttcaacgaggattttcagaaaattgacgcgggcctcgccggacggggagattgcagccttctgttcggctcttacgtgggtacgggaacttgcggcccgtccgagcctaccgcacttacactggggattccagccaaggcgctttgggtaagctgcggttcacgccacgctgtctttctgagggggaacacgcaggcggttaatttcagcaccagcgatggagagctgcttgaggtggagtggacgcaagacggcctgagctggaagctggggggaggactttacaatcacgactaccagcagctcaatgaggctggaaccacctattattacgcggcgctatatcaagaaagcaagaaggccccgggaaatacccggggcctccttgcttcttggggttcggtgctcagaactcagcggatagtgaaggtaccctccacaagagtaccatccccggtgctcttgatagaccaggtgtacttaccggaggtcaggggctcagtcttcatggaaccatcaccagcattgatcaggggcttttcgccaattacctgaacatagaagtagtgggggccgaccgagccgatatcattaaccgtctcagtgtaaacggtgcccttggaacccttaatggtcaggataactttgtcgttcgcagtcttggtgcggaacacaaagtacatattctcgttggcctcgccgtgaacatcactggcaatgtcgttgggagtggactccagaacataggcgccgttgtccaggaaaagcagctcgttcttggaggcaatgttttcggtggtcacgtcgccggcgatctcagccttgtcgctgccggaggaggtggtggaaccgtagaagatggtgacgatctcgccgttcttcacgatggcggtaaccgtcatgcccttctccacatcactcagagagccagtctcgatcttcttgcccttggtgacggcatagacctcgacatcgtcggaaacagcgtagctcttgccgcccaggtcgatgataccatcctcggcctcagccttgacctccatgccgggaagctgataggtgtcgtcagtatccttcttgctgtactcctcgcaggcagaggcatccagaatctcgttctcagcatccgcataggcgataacgttcagcagaatatcggtcttcaggacattgccgctgggatagctgtccttcagctcctcatccatcttgacagtggtgatctcaccgttgacaacagccttgtactcgtagtaggtgttgtcgctgtccttcaccttggtgccggccttggagctgaggacatacacgatgtcgtcagagctggcggacacatcggagatgaagaccatggtagccacagtgctaccgctcttgcagtagtaaacaaagttgccgctgtcgtccttcaggtcgggcacgttggcatagccggtgtaggacttataggtggccttgctgccggtgccggtctgcaccaggaagacggtcttgctgttggcgtagacggtcttgctgttcagggtcatagcggactcgcccttgttgatctcgaccttcacgtccttggtcaggccggaatcgctgacgcccttgatggtgtagatgtccttggagttcttgctgtactccacgatgtaaccctgcagcttacccaagaaatccttcttgttggcaaagtcattgccagtcaggcagtcctcgtcgagctcggcctcgaccacggtgccgtcggccagcagaagcttggcatagtaggagctctcgtcgtcatagcggccctcatcggcaccggtgttcacgacgtaggcgtagtcgctggaggccttggatacgtcgaccttgatgacatagccataggaatccaggtacaggtccagcacgctgtcgaccttgacatcacccttattggacatcttcgcgctgtacttgtaggtctcgccgtcagccacgaagctggaatcgccggtggtcttggtgacctcgacgccctcaaccacctcggccagggtcatggtctggatctcaccatcagccatggtgtagagaaccacgtcgtccttctcgaaggactcagtctcgaacttcttgccgtccacggtgacatagcggtcatcgccgtccttcgcggcggtaaccttggagatctcgcccacgtaggtgttgatgaccaccagggtcacgttgtcgtcgttgtccacaaaagcctcgaccagaacgccgttgccgccgagctcgtcgtcgctgttgcccttttcgatggtgaaggtgccattggccttgccgtcctcggtcacatccacagtagtggtcttatccaggcccaggtcggagtacagggtcttggagctgaccttctcggagtaagaggcatcggcggtggaagcataggtgccgatctccttggtgccgttcttccactggtcggagggacggccgaaatcgtcgtggttattgctgttcagggtcaggtcagagaagtacttctcgcagaactgctgcacctcgtccttgtcgcccttcacggtgcggtaatcatcggtcgtgctgttggcgaccttcacgggggcggaagcacccacgataacctgcatgccgtcggagccgatgacagtggtgcccttgttggtgtagtacacagtgtcggcggtcagggtctggaacgccatctgggcggcctgctcacgggtcatggcgtcggccagcacgatgcccttgggggcgatgcccgcgttcaccgcgtcggcggccacgttgatggcccagtcgttgcccacatagttggcaaccttcgcgtcatagcccagggccaccagcatcatcttcgcaaaggccaggccggtcagctcgccctcggggtcgaagttgccgttgccggtgcccgccaggatgccctgctgcacgcagtagccgatgtagcccgcggaccagcggttggccgccacgtccttgaaggtggtggagttggtgctcagcttattggcgtcctcctcgcccaggagcatgacagccacgatcttggcggcctgctcacgggtcaggatgccggtggggttgaaggcgcccttgtcggtgccctcgaacacaccgatggcggtcatcacatcaaccgcctcagtgttggtgatttcagcagagtcgttgaaatcactgctcacagcgctggcggagacgaccatcatgcccacaatcagggccatggccattaccaggctgagagtccgcttgaggtttctcatttggatttcctccttctgaattttgagccagaggggcgtatgacgccccttgcaaaggagaaataggtacaaatatctgctcgttttcacctaaaaaactcggtgaaggcatggaaaggtttgcttggtaggcatttggtagacaatcctgacagggaaaaagggctgaggccctgaaaccagaagggtttcagggcctcaggtggtagacatttggtagacggaatctccaaacacggctgtagactgtccgggtttgggcgtgcggcggatagtggggtgtccctacatggggaggagatgtaaaaaatatggcaaattatacggaacactatcaactgcaccaatgggagccgtccgacagctttttgcggacggacttcaatcaggactttgccaggatcgacacaggcatgcgggccgccaaggcccaggcggagcggctggaacgggagaaggccgagatcagcacaggagcctataccggcgacaatgccgccagccgcacgattcacctgggattccggcccagggcggttctggtggagatggcgcttggcaaccgctatggaagcaacggcggcgaaagcatcagcggcggcttggcggtagacggctggccagtgttctatcaggacatcaacggaccatgcacgcccgccatccagatccaggccagcggcttcgccgttacccaggacagccggaaccgctcctatatgaactacagcggcaccagataccattatttcgcggtgaaatagaacatccccccgggtatagcccggggggatgtttatacagttgacgttcttggttacggcgcagcaaatgtgatagtggcgccggtggcgggcatcgcaagtgtagcggtggctttattgttaccatcggcggcggtgctgccgggaatctgagcgccgtcgtttttgataacgttagtatcggtgttggcgttggactccaagaagatgcttacgccagtagccacataggacccgctgggtgtaatctcagtggcttggttgtccataccatcgtaggccttgacatcggtaattgtaagaaccgcggcgggaatcaggtacaggtcaccgtgcacagaggtgagagcaacggtgttgttggtagcggtggcattcgcagtcagagcccagtgggtatccgcactattcgcccgaatgacgccggtgccgttaccagcatcgaccgtgatgtgcagggtcttactggtggggacataggcagagtcgttcttgccgaccagaagagcgccgctgccattggtatccttcacggtcacgccgtcaccagcgtggaccataaccacctctgcggtcttgtccagggtgacgtcggaaccgggcatcgcaaaactcagctcattggcggaggtgatcttgacgggggcagcgataccggggatggcccaataagagcccacaacgaagtcggtggagatgatcttcacggtgtcgccctcgctgatgccggtgtaccacttgtcggtgccaaccgtaatctcgttaccggccttgaagttgaccagcacggaagcagcgttaaactggttggcgttgggcagcttcagagtcaggctgccagccgcaggagcggcggccacggtcactttcaccacagcgtcagcagtggtggcaaccttgccggtctcagtgtaagtagccacgaccttgaagtagtgatcgccagcggtgaggacgccagccttcacattcaggacactggtgacaccagaggagctgaccgtgtagttggcatcgttcttcagggagacaggattgctcccggccgcgtcatcacacttgaaccactcgtaggtgagggcgccggtgccgccggcgggcttggtcacggtcgcggtggccagcttggtgctgttggtattcacactagtctcagcggccgcagtgacactgatctgaccggcgtacacgccgtccagggtgctcaggatgtaggcggcgcggacaatgttcttgtcggtgtcgataaccatgacgaccttgcggcccacgttctcggagaaggagccgacaggagccttctcatagctgttgtccacgtcctccacgttccagatgttgttctcgtaggtgaaggtgccgtcgccgtaagcaccgttaaccaggttggtcatggtcttgtcggtgtagagggccacggtgccgttgcgcagctggcgggcatagccgcggaccacgggcagaacaccctcgttatcggtggcgctggtaaagccggggtcagtcagctcggagacgccgttgccgtcggtggtgtaggcgtaggggatgccgaaagcatcgggatcaccggcgaaagtgctgttgtagtcgccgcgggtgatcttcagggtggtcacagtgccgtccatcagaaccacgttcagggtggcgtacttgctgtccacgttgctgcggctcagaacgaaggcatagtccttctccagggtcacaccctcgtagtcgaacaggacggtggaggccagggtgccggacttggcgctcagcttcttggccaggaagttctcgcgattgggaacgtcggtcatcttgtcgtagccaacggccacaccgtagatgacatcgccaaccttgtaggagctgcccacatagtcgcctccaggctgcagatcctcctgaaccacctcatcatagtagaaggcgacggtgttcttgtccacggtgacctgcttgctctgaccgctttcattgtagcggatacgggcggagccggtcttataatcgtgggacagagtgctctttacatccgcggggttgtaggtgactgcggtatcctcgtggttggagcccacgatggacttaatggtcagcacgttgtcatcgttcagggagtaggcgatgacatagccggcggcgcggccgtccttgtagtcggtggcgttggggtttccgccgcttgcatcgatatccttgtgagcaaaggcgccggtgccaccgatggcattctgccagggggcggtagcggagttgtcggagtcggaggtgcccaggaagcccttcagctcctgaatgccctgattcttgctgtacgtctcagtgtggccgccagcgacggtaagatcgtcagcaatctgctcgcccacgttcttggcggaggcggagaagttcagggtgtagatgccctcggtgccgtcggccagcaggaccttgatcttgccggaggcgtcggaggcaaaggcgccgggctcatagccggagtccagaaccagggcgtagtcgtacaggccctgctcggagggacggtaggcaatgacgttgccgttgctgtccaggataaagtcgtagtcggagtcgaactccacgccgccgttgtcgcacttgagcacgtcgaactcataggtgttgtcggcggtgtcagccttgtactggatgtaggaggggtggtactcggtgccgcccacggtgatggtctgctccttctccttgttggcggtgtaggactccatctggccggtgatcacctggggctcggagacatagtagcggccgccgtaggagacggtcagaaccaggtcgccctcatccaggctggcctcggtcacgatgtcctcgttgtcaatggccttgttggagttgaagctgtttagagtggtggtctccttggaggcgctcttggcgatgacctgggacagggtctcctggaggtacagcacgtactcaacctcgccgtcgttatcgttgtcgatggcggtcagctccacgccgtagccgttggtcttgcccttcacgctgttgaagcggtcgccggactcgaagcccatggccttggtggcggcagtctcgctcttcatcacgccgtagttgacgtagtaggcggtatcgccgtccacgctcaggccggtacccttcaggaagtccttcatggtgtcctgggtgtcggcggtggtcttgaccacgttgttgttgccgttcacatacacgcccagaacctcggagttggccagaacggtagtcttgcgcacatacatggtcacagtctgacccagcatgtcgacgggagtggacacgttgaagataacggggttcttctcctcctcatactcgcccacaacggtgttgctggtggtggacttgtagacctttacgtgatccatcttggtcttgccggtggccagggcgtcctcgctgtcggtatcctccagctgggcccactcgttgccggtgaccacgccctccaccttgtaaacgccatacttggtggacagcagggtacggtgatcctcaaaggcaatggcgtagccgttctcgtacttctggatcatttcgatgtccagagcgttgtagatcagcagcgccgcgttgtcgcgggtcagaggatcgccggtgggagcggtcaggtcatcaaagatgcccagggtagaggccagggaggcggtcttgatggcccagtcgttgccggtcaggccctcgagctgcgcgtcgtagccggcggccaccagcagcatcttggcggcctcgttgccggtaacggtagcggcggggtcaaacttgccgttgccgcggccggcgatgatgcccaggctgtagcagtagttgatgtagctctcagcccagtggcccttcacgtcggtcaggccggtgttcatcccgacatacaggccgtccacatcggcgccctgattcaggacggtggcgatcatcttcgccatctcggcacgggtcacattgcccgcggggtcaaagaaagacccatcttccttgccgttgatcacacccagaatggtgagcatggaaacggcatccttgttgacgatctcatccttgtcggagaagtcgtcaaagcccgcagcgctggcggagacaaccatcatgccgatgagcatgatcgccgccagagccaggctgagagcccgcttgaggtttctcatttggatttcctccttctgaattttgagccagaggggcgtatgacgccccttacaggggacgaaacaatgcagctttcgggggatagggatataaaaggcggaaaaacagaatcaaaaggttgctatggtagacgtttggtagacaatacgggagcgggaaaagtgaaaacgccttggaacccaaaggattccaaggcgtttctggtagacttttggtagacaaaaagtaaaaacacaaaagaaaggtggacggaaatgggccactttttcggggatgcggagtggaggtgaggagggaaacgcgtgaagaacgagcgggcacggctgctgcggaggatggagcggctggcaggttgcagagtaaatgacgcggtaaagctggcgttcctggacggagaacagctaggagagatcgacgggctggatctgggagcgctgaaggagttcaagcgcagcggaaacggcgcggtggagctgaagctggtggatcgggcggccgtgctggagcggctggtggagctgtccggcggccgggaggacggggcggaggagtttttccgggcactgcgggagagcgccgatgcggtttagggccttttcccggcagcagaggcgggcgctcacctggtggtgctccgccgaggggaaaagccgggaggcggttatttgcgacggagcggtacgcagcggaaagaccctatgcatggggctgtccttcttcctgtgggccacggcctgcttcgacggcatggccttcggtctgtgcggcaaaaccatcacggcgctgcggcgcaatctgctgcgggaggtgctgcccgcgctgggggagctggggttccaatggagggagcaggcatcccaaaaccggctgacggtacggctgggcgggaaggagaacaccttctacctctttggcggcagagacgagggcagcgcggccctgattcagggcatcacgctggcgggggttctgctggatgaggcggccctcatgccccgctccttcgtggagcaggcctgcgcccggtgctccgtgccggggagccggatgtggttctcctgcaacccggagcacccggagcactggttttacaaggagtggattttgaaggcggaggagcggcgggcgctctacctccacttcaccatggaggataacccggcgctgacgccccaggtgcgggagcggtacgcgcgtagcttcagcggcgccttctaccggcggtttgtgttgggggagtgggtggccgcccaggggcgggtatacgatttcttcgacgagagctgggcgaggcccgtcccggtgggcggcatggagcggtggtgcatctcctgcgattacggtacggtcaaccccacgtccctggggctgtgggggctgcgggacggagtgtggtaccgggtggcggagtcctactatgacgcccgggccgaggggcggcagagaaccgacggagagcacgccgacgccctggagcggctggcggggggacggcccatctggaaggtggtggccgacccgtcggcggctagcttcatcgagaccctgcgccggcggggatggcgggtggaaaaggccgacaacgacgtgctggccggtatccgaaccaccgccgagctgctgcggcggggaaggctggtgatctgccagggctgcgccgacgccctccgggagtttaccctctactgctgggatgagaaggccgggggcgaccgggtaaaaaaagtccacgaccacgccatggacgacatccgctattttgccgccagtgttgcggcgggagagcgggggtacgttggaggcctgtgtgtggagcgggggcggttttagcgcggagtgcgccagggcgaaggacgggaggagagcatgggtatatttgcaaggaaaagagagaatggggccggggcggcggtgcagctccgggaggggggacggcaccccttcggcgtgctggacgggtatgtgcctctgagccagggggagatggagctctaccggagcatacgggaggccgtccccattgtggacgccgccctgcgcaagctggtgcggctggcgggcggggtcaaggtgtcctgccgggagagcgctgcccaggaggggctggactggttcctccagcatgtgaacaccgggcgcggacagcggggtatccagtccttcctggacggctacctggactccatgctcaccttcggccgggcggtgggggagatcgtccccgaccggcggggccgggagatcgcggcggtgctgtgcggcaacccggcggacgtggagattcgggagggggagtcgccgctggagtttaccctgtggggacgggatggggacgggcagctccgggagctgccccggcaggagctgctgctctttaccccctttcagccggaggtgggcagcccctacggcgtgagtctgctgcggtccatgcccttcctgaccggaatcctgctgaacatctaccaggcgatggggatgaactgggagcggatgggcaacgtgcgcttcgcggtggtctacaagccgggggacgcgcccctggagcagtccatggcccaggagcgcagccgccagatcgcccgggagtggtccgcagccatggaggcggggcgggacggccgggtgcgcgattttgtcgccgtgggcgacgtggacatcaaggtgatcggagcggacaaccaggtgctggacagcgaggtgccggtgcggcagattctggaacagctcgtggcccggacgggcataccgcccttcctgttgggattgagctggtcgtccaccgagcggatgagcacccagcaggccgacatgatgaccagcgagctcaccgccatccggcgggggctggagcctgtggtggagcgtatctgcgagctgtggctggccctccacgggtacgaccggagggtgacggtggattgggaggacatcaacctccaggatctggtcgaggaggcccgggcggaactgtaccgtgagcaggcggaggagctgcgattggcgcgagagggcaaagagggctgaagagtgtcggcgcgggcagaggagaccagatcggggtccccgggaaagtgcggagcacttttctggggagaggagacgcagcggaaggagagagccgcgccgcaagcggcgcggcgagggatctggagcgtgtggcgacgaggtcgaggaggcccgggcggaactgtaccgtgagcaggcggaggagctgcgattggcgcgagagggcaaagagggctgaagggtgccggcgcgggcagaggagaccagatcgggggcaccgggaaagagcggcgcgtcagggatgccgcgccctacggagggagaggggcggctcgtcggggtatagggcgcagagtaagatgaggggagcgatgggatgaacgtaaacaaggaggcgggcgtggactgcgggctggagctcagcccggaggagatggagcgcatcaacgccatgagcaaaaagaagctggagcccggggaggtatacgccttcgcggtgcggctgtgcgacaacgagatcgaccgggacaacgagcggttcccggccgctaccctggaggagctggcccccctgtttgtgggcaggagcggcctgtttgaccaccagtggagcacccggaaccaggcggcccgcatctaccgaaccgaggtggtgcgggagagctggatgacggaggcgggcgagccctactgctatctgaagggctgcgcctacctcctgcgcaccgagggaaaccgggagctgatcgccgccatcgaggggggcatcaagaaggaggtcagcgtgggctgcgcggtggagcggtcggtgtgctccatctgcggcgaggagtcccacacctgcccccacgagaagggggcggagtacggcggcaggcgctgctgggccgagctggtgagggccaccgacgcctatgagtggtccttcgtggcagtgcccgcccagagaaacgcgggggtgatgaagcacatgcggatggagcaggaggccgccctggggcggaaatacctggagagcctgcgcggggaggtggcccgtctgggcggcctggccgggctggggctggagcacgccgtgctccggggcatcgcggacaagctgggctatgacgagctgctggccctcaagggcgcgctggagcggcaggccgagcgagtgttcccggtggagacccaactgcggtatggcggcgggcgggagaacgacggagagcgggacggggcatttttgatctgagcggccccgtgcgcagagaggacagaggagaaaggagaaggcagcatgagcaggatttcgtttgagggaattggagaggtggcggccacctttgcctgcggcgaaggggtgaaggcgggacaggtggtgaagctcaccgggaacggcaccgtcggcccctgcggcgacggcgagcgcttttgcggcgtggctctgagcgccggggagggcttcgcggcggtacagctgggcgggctgatccgggtggccgccagcggcggcgcgctcaccgaggggtggaaccggctgctggccgacggctccggcggcgtccggccggacagcgccgagacgcccaccggcggcgaatatctggtggtgcgggcggagagcggcggcgctgtcatccgcctgtgagaaagggaggaatggaactatgggatatcggtttgacaacctgagactggaaaagggcatgtataacgaggcgggccgctccttcacccaagtgctggagcgggaggacccctcggagcagtataagggcacggcgctggaggggctggacgcctatcagcggcagctcaagcgctttgacatcaaggtgaagggcgcgggcagcgacgcggtggagaagttctttgccaccagccagtccgccgtcctcttccccgagtacatcgcccgctccgtgcggcagggcatggaggaggccaacctcctgccccacatcaccgccgccgtcacccggtttgacggcatggactaccgctccatcgcctcggtgccggacgacgaccagagggccctgcgctgggtggaggagggcgccgccatcccccagacccaggtgaaaacccaggagaatctggtgaagctccacaagcgggggcggatgctggtggcctcctacgaggccatccgctatcagaagctggatctgttctccgtgaccctgcggcagatcggcgcccacatcaaccggatgcacctggaggacgccatcgaggtgctcctcaacggcgacggcaacgacaaccccgccgaggccttcaccgtgggtaccgagcccatcggcggcaccgcgggtaccctcacctacgatgagctggtggacttctggggccagtttgagccctatgagatgaacaccctcctggtcagcggcgacatgatgcgccagatgctcaagctggaggagttccagaaccccctgaccggcctcaacttccagggcaccggcaggctggacacccctttgggcgcagctctgctgcgcacctccgccctgggcggcggcaccctcatcggcctggaccgccgctacgccctggagatggtgcagggctccgacgtgctggtggagtacgacaagctcatcgaccgacagctggagcgggccgccatcaccagcatctccggcttcgccaagctgttcaccggcgcggccaaggtgctgaagctgaaatgacggagcagattatggacatggcccgcagcctggggcatgtggacgggggacaggaggaggcgctggaggccctgtgccgtgcggctcaggcggagctggccgggcggctgcggccggaggtgcggccggaggactgcgaagacgcctttatcctggcctgcgcctggctggccctggcggggctggccgccggggagaccggcggcgggcggttcaccgccggggaggtcaccattcaggagggggacggggcggcccgggcggccgccctccgcctccaggccgagacggtgctgggcccctggctggccgaccggggcttcgcctttcagggggtaccgggatgaccggggcttgggggcggattctggcgcagtacgggcagagcgtcaccctgcggcggggggaggaggagcggggctgccgggcgtttctccagccggtgcgggagcggcgggaggactggtaccaggagctgcccaccccgctggggacggtgcggcgggatcagtggctctacctggggccgccggagctctcactggaggaaacgaacggcctgtgcgtggagtggaacgggctgcgctttgcggtgcgggcggcccagcccgtctgcgtgggggaggagacgctgtactggtgggccctgctggcggtggaggacggagaggcgcagacagagcagacgtgagggggaaaacacttggattttcaggcggtgcgggagcagatggcggcgttcctgagacagcagggggtggacgcggtatgcgcctacccggaggagcggcggcggcaacggagcgggccggtggccgctgtgtccctgcgggcctgccagggcgggccgggcggctttcgggattacctgggagagcggtacgacgagagcaccggccagtggcaggagctgtacggccgccgggtgaccctcaccttcgggctggacctctatggagagagcgctggggagctccagacggcctacgaccggatggcggaggcctttcagtgggagggacccgccgggttggcgctgcgggagctctcctgcggggagacggaatttgaccgggcggccggcctctaccgcagggcggtgacggcggtgtgtcagggatacctgtacgccgtagccgacgagggcggcactttcctggactttgttgtgagaggagagggacatctatgagcgtgacaaaccatgagcggccgggggtatactcccggtacgacgcatccacggtggtgaaaggccgcggcggcggcgggtgcgtgggactggcggccctgtgcggcacagaaacggcgggaacgctctacacctttaaccgctatgaggaggcggtgaccgccttcggcggagaggaaacgctgacggagctggtgcggctgctgttcctcaatggcgcggcccaggtcaaggcggtgccggtggccgaagaggcgggctacaaggcggccttttcggtgctggaagcggcggaggacatcgcagtggtggtgtgcgacagcggcgagctgaccgtgcagcaggccctgcgggacagtgtgaaggccgcctctgaggcgcggcgggagcgcatcgccgtggtgggcggcaaggcgggggagaatgccacagccctggttcagcgggccgaggggctcaacagcgagcgggtggtgctcaccgccccggtgggagaaggcggcggcgcggcggtggccgcggcagtggcgggagccatcgccggggagagcgacccggccattcccctgggcggcgcggagctgaaaggagtggacgggctggaggcccggtatggggatacggagatcgacaccctggtgcggggcggggtcaccccggtggagcaggcggccggggtggtcagcgtggtgcggggcgtgaccacccgcaccaagaccggagaggcggcggacgccacctggcgggagctgaccaccatccgcatcgtggacgacgtgatccccaccgtgcgcgacgccctgcgtgcccggttccgccgggccaagaacaccgagcagagccggggagccatccgctcccaggtggtgctggagctggaaaacaagctggcgcgggagatcattaccggatacggcgaggtctccgtagaggccgatgcggacaaccccacggtgtgtctggtggatttttcctttaccgtggcccatgggctcaaccagatctggctgagcgcgcatatcactgtgtgagaatgggggaggaaggaacatgaaggttgcgggatttccaaccagcagcgacatctatctggaggtggacggcaaaaaggtggcggtggtgcagagctataccgccaagtccagccgtaccagccagaccgtggaggccttcggcgaggacgagccggtggccaccataccgggccaacgtacccacgtcatcgaactgacccggctgtacgccaccgatgaggccatccgggatgggctgaacttccatgcgctggaggacttcagcctggtcatctgcaagccggaccggaagatcatctactccggctgccagtggagctccatcggcgagacaggcgcgctgggggccatggtggtggagaagatcaccatcgtagcggccaggcggattgaaacggcggtgtgatatgctggagagacgggaacggctgaagctggaggacgggagggagctgcggcttctctccgccctggaggtgctggaggcccgccgggaggcggaggggctggcccggggggaggcggaggccgccctgtgcgccaacgcctgcctgctggcccgggcgctggagcggggcggacagccggtgttcgcggacggcggggcggctctggcggggctgagcgcccgggagatcggggcgctggcgggccggtgggccgcctttgaccgggcggaaaacccctcccccgaggacggggaggagcggctggaagggttaaaaaaagcctggagcacgcgccctatgagcgccttcgctggcgtgtgctccaacgctttggcgcgcttccgacggaggagcgggccaaacagatgaaggcgcgggactatctctggtgcgccctccacctggcgctggaccgggaggaggagctggcacggctgtgtcccgcctgccgacgggaggcggcggaggagcggtgcccggcctgcggcgcgctccggacagagacggcggcggggcagaacgcggcctttgacgaggcgcggtttgaacgcctgaaacggggggagagcggttgacggactatatcgcggtattgctggcacagcaggaggagcaggaacagggcgaggccccggagctggagaccggccccctgacggtatggctggaggagaatacgcggcccgcagaggccgcagcagcgcggcgcagagtggagcaggacgaggccggcgcgtgtgccggaccgggtgcggtgatagggaaccgatatgtgccggaggccccggtcggggactccagcggacagccatcggaccggggagcgaagcagtgggcagacggcctccagaccgccggtacgttggagacggcgggaaaaatgggggagcggacggctcaaccggcccggccggagcacaccgcagaataccggagcgggtcaggggtggcctggctcgacggtctggtgcgcaggagcatggagcgggagtggagcggcggaacggagaggcgggtggtgacggtggagcagtacggcggagcggtgggcgctccggcggaggccgaggcgctggaccggctgtttcgccgggacgcccggcggtatgatggggggttccggctgctgtgagattggcttccatgcggtacaaggactatgtatggccccacaacccgcgggtttacaccattgagtataaacggaccatgggtgcgcggaaggtgcccttcgggcgctaccacctccaggatctgggccccgcccagcgggtcatgcggggcgagggggaattcgtgggcgaaggggcctacggggagtttaagaagctggctaccgtattctacgccgggggaccggggctgctggttcacccggtttggcagacctccaacgcctactttgtggagctctcactccggcaggagcccagggcggactatgtggggtattcctttgctttctgggagggatacgacggacacagcaccggcgtacaggtgaccgggggcggaggagaaccggagacaggcccggccgccggtacggcgggggagcggcggcacacggtgcgccggggggagaccctgtgggggatcgcccgggattacggcctcagcctgaccgagctgatcgtcctcaatccccagattaaaaatccaaacctgattctggcaggggaggaggtgcgcctggcgtgatgcggggagaactgctgtgctgggatgggcggcgcatccgcctgccagacgcggtggagtggcggtttcaatacggctgcggcacgccctgcgacagctttcagctcacctgcctgtgggagccggacagcgggaacgacctggccgaggcggtgagctttacggcggaggagaacggggaacggctcttcaccggcgtggtggacgagtgcgagcggggctgggacaccgcggggggcacccttaccgtggcgggccggggaatggccgcccgcctgctggacaacgaggcgctgggggcagactaccaagtggccactgttgaggatatcctgcgggaccacgtggccccctacggcattgagaccgtgcggggggcggagctgccgccggtgcctggcttctcggtggacgcggggagcagcgagtggcaggtggtctatgaattctgccgctattatgggggaattgccccccggtttgatcggctggggcggctggtactggccccctgggaggaggggcggcggctggtgctgggggcggacgcggcggtgacgagcttccgcctgcgggagcagcgatacggggtgctctccgaggtgctggtgcgggaccgcaccacagaggaggttcagcgggtggcggacgaggacttcctgcgccggggcggccggtgccgccgtgtgcttaccatgccgggaaagagcagctatcaggccatgcgctattccggggcgtatcaactggcccgcgcccgggaagagctgcggcaggcagagctggagctgccggaagcctttgccgcgtggccgggggagctggtggagctcaacctggccaagggtacgggacggggcctctggcgggtacgggagagcgtatgcggcctgacggcggcgggaacctacacccggctgacgctgggggagccatagcggaggagtggttttatgtggatttcggagcaggggcggagaaggacagagccggacggaacagcactggtgggccgggtcaccttgcccggcgacccggccggggtgtatctggccggagagcggcgggagctgcccgtgtttggcccgggcggctatgtgtggcggccggaggagggcgagcaggtgctggtgctcaagaccggccaggcgggagaggccccctgtgtggccggccaggcctgcgggcaggactggaacctggcggcgggcgaggtgctcatctacagcggttcggcctccattcgcatcggcggcgggggtatccggctgaccggagatgtgctggtcaacggcaagccggtgcttacaggggagggctgagcgtggaactaatggtgcggaacggcgactacgtcaacgacggcgcgggtggcttcctgcgggcggaagggacggacgagctgctgcagcgggtgttgtggaagctgtccatcccgcgggggagctttccgctgctgcctgcgctgggcagtgagctccaccggctcggccgggccaagcccgctgagcgggccggactggcccggcagtatgtggcccaggcactttccgatgaggcggagctgtcggtggccggggtggagctgtcggccgggggagaactgacggtcgagctggactggcggggcgaggcgctccgcctgatacttgggacgggaggcgtatgacgggatgacggtggaggagctctacgggcagatggtggacacctttcagcgggagacggggctggcgctggccggggacggagacatggcggtgcggctttacgccgtggcggcccagctctacgccctgtatgtgcaggccgactgggtggggcggcagtgcttcccccagacggcccagggggactacctggataagcatgctcaactgcgggggctggagcgccgggcggccacagcggcggtcggggtgctctccttcgagacagaccatccgccggaggccgatctgagcatcccggaggggacggtatgcatgacagcggcccaggtgcgctttgagaccaccgaggcgggcgttttaaaggcggggcagacctccgcccaggtgcgggccagagcggtggagccgggcgcggcgggaaatgcggcggccgggacggtgcgtgccatggcggtggcgccggtgggggtgagccggtgcaccaatcctgaggccttttccggaggactggatgccgagggggacgagagcctgcgggagcgggtgctggagacctttcggcggatgcccaacggggccaacgccgccttttaccagcaggaggccctctcctttccggaggtggcggcggctaccgtggtggcgcggccccggggcgtggggacggtggacgtgtttcttgccacggcggcgggtctgcccgacagcggactgctggaacaggtggcggcccatctggaggaacgccgcgaaatcgccgtggatgttcaggtgaaggcgccggaggtaaggacggtggatgtgtcagttcaggtggcggcccggccgggggcggactttgacaccgtccggcaggcggtggagtccgccgtacggggctggtttgacgggcggctcttggggcagagtgtcctgcgggcccagctgggggcgctgatcttcggggtggagggcgtggagaactacgccctcaccgccccggcggccgatgtggcggcagcggtggacgagctgccacaactgggcacactgacggtagcagcactggaggggacggcatgagctacggggcatacctcagggagctgctccggcccctgcgtatctatgggctggagggcaccgccaatggcggtgagctggaggcccaggggaaggcgctggatggggtggaggccgccatggaggaggtacagcgggagatgctgatctgcaccgcagagggacgggggctggaggccgtcgaggcactgctggcccgaaagccggtagctgccagcctggagcggcggcgggcggcgctggccgccctgctgcgcatcggcggggacagctttaccttgacggcgatcaacgataatctaaaaggctgcggcctcaacgccgtggccagcgagacggaaacgcccggcgttgtggaggtgcggttccccgatgtaccaggcatcccggacgggtttgaatcaatgagggccatcctggaggatattctgccctgccatctggacatacggtatgtctactggtacatcacctgggccctcatggaggagcgctttgccacctggggagacattgagaagctggggcccacctgggaggagctggagaagatggtgcgggactagcctgcctgtcgcataaaaatgcctggaaccatatggttccaggcattttttgcttaaaagggagctcaccagtgctccagaagatagggaatagccgggacagggcggtcaaaaaaacgggcgagggcctgctccagctcctccggggagagggtgccctggggctccggcctgccgtccgcgccccacgccagcaggccgatgccggcggcccagtagagggagtcgtccgcccagggagagatcccctcaaagtcgttacaggcggccactccgctgggcagaaaggtgtcccgccccaggtggacggcgtagcggcggagcaggacggcggcctcctcgcgggtgatggggcggtcagggacaaaaagtgtgccgccggtgccccgcacgatcccaagatcataggcccaggctacagccgtggcaccgggggagttgggattcacatcggagaaagggccgttggcatcgtaggggacagcacccgagcaggtccatagggcggccacaaactgggcacgggtgaccggggactgggccgctgccgccgcagggagcagcagggtgaggagcaggagtgcaggaatgagctgtctcatggcatatcctcctttgggtatagcataccatatactggaagaatatgccgtcgaaggaaagggctagtcgcagaaggccacaagttcgccgtcggtgtcgtagccccgacaggagagcaggaggatagagctgcgggaggcagccccgggggaataaaaccgtatggacagggaggggccggaccacactccgtccccggcgggggagagccaggcggtgacgccccgctccgccagggcggcggcgggggcgtcccgctcctcatctcccacccagactgccgttacctccacctgcgccacccggggatcgtcggacacggccacgggtgtaaactcagaccaggtctcgctgtcgagggagccctcttgaaacacgtcgtagtagtccagtccggcggggaaagcccagatcgcctccccccagcgggatggggtgatgtccattatggcctctgaccgccacagtagaccagcggttcgctccaactccatgagggtaaaggagtccccggcccggcgtaccgcccaggcgtctgctttgccgaaccacacgccgttctcgtagcgaagggggccggaggcggaggtggtaccgtgggggaggaaccgggcggtctccgcctggcggcaggccaacccctgggtgggcatgggccgccccatggagagccatagcacccacagcccgcccagtagtaccagggcgctgagggccagacagaggcgtggaaagatgtaaaagcggaatcggctcacagcggcggcacctcctcggccagggcggcggtgaaggagatctcctcacccgccgcggagacagtaatggtgaacacccgggccccgggggtggggtcagcgatgtacagccagccggaggcacccagcagatagtcctccccggagcggagggagcaggggccggagccgccggcgtcgtcggtgtatgaggcatccgcctcatacaccaggggcacgggcagccaggggcggcgggccgtgacagtgagaggaacctgaagctggtactcctctttcacaccgctgctgagctcccagcggacatgaaccagtccggcccggccagcggaggcaaaggtatacgcccccagcacaccgccaccggcagcggcgcccttcagtaccagggagtcccccgtgtcataggacagttccggcggctggggaaccaccccggccagggcgaagaggccgctgtcccgattgagtcccaaaagaatacccagaaacagggccagcagtccgacggccagaaagaggcgagatacccgagggagcgtggggggatgggtttgatccagcgcgtgacctagggcgtagggattgcccatggcggtcacggcctgggcggcagcctcctcgggagacaggccccgcgcctccagagcagcagcgtgatcctccagatgggcggtcagctcggcagagaccggcccccgtgccgccttccagcggagcatctgacacactttctgacagaagtcctcaaattggagatttgccatggaatcacctcattccattggggagaagtcatagttcgcccaaaggcttggcacgggggactcatacaccagatttccggccgtatcataaccccggagacggatggattgaaagggatcgtccaccggcacccaggccgaaccgtcacagggaaagagaaagcagtgttccaccgcctcccgccggagggtacgcagctgctgcggggacgagctggtttctgagaagcccgccacgtagtccagctccatggtcacaatctgcggatcgctggagagcacacagaggaagctgtgagccatcccggcgtcctcgaacagaagggttatggggagcgcgtcgtccggctgaactgcgttgaaccggacgggctcccagaagggccccgcccgccgcagggttcccacggcgtaccagccgtcccgccggaggacggcataggcggtatcacggtcttccgggggagacgaccaggcgacaacgcggccgccctcaaaaaagtttgccttttgaagcgcccagagggcctgactccgggtgaagcaggggaagccccaggccaaaagcaacaccagcgggcacagcagcaggaggcaaacgtcccgcaggatgcgctttttccgcagggcgggggtgggcaggttagccatgggctttctcctctctcagcggaatggtgaggcgcgcttcgacggcgccgaaggggtcgagcaacagggtaatggtctccgccttcggatcgacctggcagatagagagctcatagtagcgcacagggaggggggaggcgcccggaagcggccctccgtgcaggtaacgcccggtgagaaacgggcggttctggaactgcggatattcgttgccccggtcatcctccgcgcggagcagcgccccggcgttggggggcggaagccaggggttgcgccaggagacccggagcagacagtccagccggaggccggtatgggtgtccagcagaatcgcgcgctccacggagaagcggtagtccgcccactggtacaccgcctggggctccagctctcccgccacctggggaaagctcctgtgcgtctgaagccactccgcctccgcttgggaggggaggcggagggaggaggtgctgtgcagcagagaataagctgccgtcaggatggacaaaagcaggagcgtccagaccgccgcccggaaccagatctggaaccaccccaggaaggggctgtggctcttgtccagttcttttccgatttcctccggatcgcccatggcgtccacggcctgctggacggctatgtcggagggaaagccccgcgcctccagggcggcggcgtgatcctccagatgggcggtgagctccgccgtgatggcggcgtgatcgggggagaagcggacgtgcgcgcacaccctggagcagaagcggtcgacatggtcgcggttcacggagtcaccaccttcaaatgggagtcgaggatcgggtattccaaccagcgggcgggatagggagactcgtagagtagctttccgtccgcgtcatagcaccggacgcggaagcaagcagagggagaggcatttagggggaggccatggtagggatcctccagggtgaagaaaaagcactgatcttccggcgcctcccggcgggcggtcttcaagcggagcgggagatcgaagcctgagagatagtccacctccacggcgacgacatccgggccgccggacaccaccgtcagctcctgaccgcggccgccgaacgcgggggaagccagaatggccaggggggcctcgccgtccggacaggccgcggtcagcgcgccggggcgccagaacaggccgtcccgctccacgctgcaccaggcgaaccagtccccgtcgcggacgatgtagtaccgcaacgggggcatgccctcctgctgggggctgaaccgggcaatgacctccccggggccgaaggcgtaccgctcttgggtggcggccagagcgccctgggcggtgagaaagggaaagtccagcaccagcagcagtgccgccagcaggagaggcagaaggacggcgcacacggccgtccggcgcttccgacgggcggggttagtggggcgcctagccatagagaccgcctccttccagagggatggtcagccacagcacatcctctccatagcggtcaaaatggagggtgatctcggtggccgccgggtcaatgttggatactcccatgtcgtagtaagtggcgaagggataggcagcggcgtagttcccggaggatctgcccatatacacgcggaacgcgccctggtcgctcaaagcctgatgttcctccatggaataatagtggttgcccaggtcgtcctccgcccagatcccctcccggagttggggctcctgccgccaggggttggggtgggcgatcctcagcagataggacaccttctggcctccctcccactgctccaccactgcacgggggatggagaaggcgtagccccgccacgtccacgtcccgtccggcgcgaagtcggcggtcacatgctccctgtccggcgggccccagctgcggagccgctggatgtcagcggcctgattgtgtacgcgctccgcctggggcagagccagcaccagcaccaaggccgccagaatacacaccgcccgcacgaaccagatctggagccaccccaagaggggattgtggatggagtccagccagcggcccagctcttccggattccccatggcctccaccgcccggcgctccgcctcccacagcgtcatgtccgggtgtatcttcagaatggcgtctttatggtcctccaagtgagcggtgagctccgccgtgatggcctcgtggtccggccggaagcggacgtacatgcatacgtggtcgcagaactggctgatggtgcggtggggggccgccgccggggcgctcatgccagggccggactggttccggccagaatggcgttgacagtatgggtaaattccacccactcctccttcttttcgtccagcaggcgcaggcccttgcgggtgatgcggtagtatttccgcatccggcccgtgggggcctctttttcgtaggacttcaccgctccgtccttctccagtgtgtggaggatggggtagagggtgccctccttgagcgtaaaggtgtggtcgctccgcgcctccagctcggcgatcatctcatagccatatttgtccctggaggagagcagggagagtaccagaagggtggtggagccggagagcaggttcttgtccgcctttttcatgggaagcctccttatacgcaaaatacctcggcgatctaggtgtattttacctagatcgccgaggtatgtcaaggggggtcagcgcacttgattgcggagcgtgcggccctccacatagcgccgcaggttgtccaggaaaatagccttgatgcgctccagcgtggcctccatgtggttatagcccccggcggtgtggggggtgaggaggaggctgggggcctcccagagggggtgtcccgggggcagaggttccggatcggtaacgtccagtcccgcgcccagcaggcggccggagcacagcacctccgccagggcggtgcagtccacggcgctcccacggcccgcgttgagcagtaccgcgccgggcctcatagccagcagccgggccttgctcatcaggcccgcagtctcaggggtgtgggggagggccagggccaccacatcggcctgggggagcaggccatccagcgcacccagaccgtaaatctcgtcaaagccctctaccgggcagcccgcgctccggcgcagcccaataacccgctgtgcccccagggcgcggaccagccgggcaaagtggcggccgatatcgccggcaccgcccaccagcacggttttgcccgccagggagccaacgggtccaagatccgcccagatatgggccctctgctggtcccggtaggcgggcaggcgcttatagatggccaggagcatggccagcatgtgttcagatacggctgggccgtaggctcccacggcggaggtgaggcgcacgcctctgggcaggacgccgggggccaggtaggggtccacccccgcgttccagctctgcacccatttcagattgggaaaggtcttgagctgatcgggggggacatagccaagcagaatggtggtgcgctcccgccactcctgggggatgctgctggctcccccgcggtcattggtggggagaaagagatgctcagactccggcgcggcggcctgaaaggccgccttctgtgcgccggtgagggggagcaggtggagaatggtttccatggtttgggcctccttgaaaaagcggttgcaggcggtggaaaaggggccggtcgtcagaccggccccctgcgcttactttatggtgatgagcagctcgccggctttgacagagccgccctctttgatgagcacctgctccacggtacccgccatgcgggccactacgctcgtctccatcttcatggcctcaatgacggccagcacctggttctcctccactgcgtctccgggcttgacgcagatcttggacaccatgccggggatggaggcccccgcctggctcttgtcggagggatcggccagcgtaacgtgcttcacctgtgcctcggcgttcttgtcgggcaccgccacctcgcggcgcatgccgttgagctcgaagtggacgttgcgggtgccgtcctcgttgagatcgcccagccccaggtatttgatgaccagggtcttgccgtcctcgatgttgatcttgttggtctcgcccagggccatgccgttgaagaacacatggctgcccatgcgcatgatgtagccgtactcctgccggtggcggaagaactcctccaccaccttggggtagaggcaccaggagatgatgttctgctccgacgcgccggggtagaacttctccacctcccgccgggcggcggcgaaatcgacgggctccagcagctcaccggggcggcaggtgatgggctcctcacccttgagcaccaccttctgcaagtcctcggggaagccccaggcgggctggcccatcatgcccttgaagtagctcaccacgctgtcggggaaggtgagggcctctccgcgctccacgatgttctcgggggtcagctcgttctgcaccatgaagatggccagatcgcccaccatcttggaggagggcgtcaccttcacaatgtcgcccagcatgtggttgaccttgacgtacatctccttgacgtcctcgaactggtggcccaggcccaggctctccacctggcttttgaggttggtgtactggccgccaggcatctcgtagcggtagatatcggtggaggggttcttgatgcccgcctcaaactggctgtagcgcaggcgcacgtcggcccagtagtcggagagggtctggagcttttcggggtcgagtccggtgtcccgctcctggccctggagggcggtgaccaccgcgttcagggagggctggctggtggtggaggacatggagtcgatggcgcagtccacaatgtccacccctgcctcggcggccatcagataggcggccacctggttgcccgaggtgtcgtgggtgtgcaggtggatgggcaggcccacctcgtttttcagggcagtgaccagcttcttggccgcgtagggcttgaggaggccggacatgtccttgatgcacagcagatgggcgccccgcttctccagctccttagccatgtccacgtagtatttgagggtatatttatcccgcttggggtcgagaatgtcgccggtgtagcacagggtggcctcgcacagcttgccctgctggagcacctcgtctatggctatctccatgccgggaatccagttcagggagtcgaagatacggaatacgtcgatgccgctccgggctgactcccggataaaggcccggatgaggttgtcggggtagttggtgtagcctacggcgttggccccccgcaggagcatctggaaggggatgttggggatcttctcccgcagcaggcgcagccgctcccagggggactcatggaggaagcggtaggccacgtcgaaggtggcgccgccccacatctccagggagaagcagtcgttgaggatctctgccgtgccctcggcggccttgagcatgtcgcgggtgcgcacccgggtggagaggagggactggtgggcgtcccgcatggtggtgtcggtgatgagcagcttcttctgtcccagcacccagtcccgcaccgcctctggccccttctcatccaaaagctgcttgaggccggtgcacttgggcggggtgtgctcgtagggcgggaagcggggaatgtcgaactgggcccgctcagcggaggggttatccacctgtatctgggcgatgtacttgagcagcttggtggcacggtcgcggcccacatcgatgtcgaagagctcgggagtctcgtcaatgaacttggtgtggcacgccccggcccggaaggtggggtgggccagaatgttggtgacgaaggggatgttggttttgacgccgcggacatgctcctcgctgatggcccgcatggccttgcggcacaccccctcgaaggtgttgtcccaggaggtgaccttgaccagcagggagtcgtagtagggggagatctccgcgccggtgaaggcgttgccgccgtccagacggacgccgaagccgccgccggagcggtaggcggtgattttgccggtgtcgggggcgaagttgttggcggggtcctcggtggtcacccggcactggagggcgtagccgttcatgtgcaccgcgtcctggctggggatgccgatctccggggtggacagggggtggccctcggcaatgagaatctgggcccgtaccaggtctacgccagtgaccatctcggtgacggtgtgctccacctggatgcgggggttcatctcgataaagtagtggttcccgctcttgtccaccaggaactccaccgtgccggcggagacgtagcccacatgccttgccaccttgacggcgtcctcgtacagcttctgacgggtggcctccggcacggagaaggcgggggcgaactccaccaccttctggtagcggcgctggagggagcagtcccgctcgaacaggtgaaccacgttgccgtgcttgtcgcccagaatctgcacctcaatgtgcttgggctccaccaggtacttctcgatgaagatgtcctcgttaccgaaggccttcttggcctcgctcttcaccaggtcaaaggcggggatgacctcctccggtgtgtcgcagcggcgcatcccccggccgccgccgccgccggccgccttgaggatgatggggaagccgtattcgacggcctttgcaagggcctcctccccgtccttcaggggacggtcggagccggggatggtgggcacgccgcaggcgtgggcaatggccttggcggtcagcttgtcgcccatctgggccagaatggtggaggaggggccgatgaaggtgatgccagcctcctcgcaggcccgtgcgaagtcggcgttctcgctcaaaaagccgtagccggggtggatggcgtccacgttgcggcggcgggccagatcgatgatggaggggatgtccagataggcccccaggggggacttgttctcaccgatgagataggcctcgtccgccttggtgcggaagagggaaaaggtatcctcgttggagtacatggccaccgtgtgcaggcccagatcgtagcaggcccggaacacgcggatggcgatctcgccccggttagccaccaggaccttgttaaatttgcattccgccatgctgtccttccttcctgaatcaaatgagtccgatcgcgtcaaacagacaccgttcggctgcggcggctctccggccgccatgaccccgccgccggggcgtgcggggaaatgcgatgttaagactgattatagcagtaaggcggattttttgcaagcgattttgtgtgtggttgcaaaacttggcgacacgcacaggaaattcaaccggccggttttgcatttggcggtttcgccgtcggggggaaggggccttgccactgtctgggaaatatgctacactaagacctcacagaggagaggagggagcatccatggcgctgcggcttggcgacggggtggagcggctgcccggcatcgggccggcccgggccaggagcctggagaagctggggctggccacggtggaggatctgctgcgctactttccccggagctatgaggatcgccgccggttttccaccgtggcggcggccccggtggacactccggtgtgcctggagttgctggtggcggagccgccccgcctctcccgcatccgcaaggggctggagctggtgaaggcccgcctggtggacgataccggcagcgtcaccgccaccttctttaaccagtcctatatgaaggacgccctgcgcaccggcgagacatacgtcgtctacggccgggtggagggcccgccggggcggcggcagatgaccaacccggtgtgcgagcgggcggacagggcccgcttcaccggccgtattctgcccatctaccccctgacccgggggatctccaacaatctgctggcggggctgaccctccgctgcgtggaggagtgcgccgggcagatggaggagacgcttcccgccggactgcggcgggagcacgccctggccgccgccgagtttgcctgccggaacatccacttcccccgggacgaggaggccctggagctggcccggcggcggctgatcttcgaggagctgttctgcctggcctgcggcatggccctgctgcgcacccggcgcacctgtgcggagggcgtccccttttccacaccgccggtggaggaattcctagcgctgctccccttctccctcacggcagcccagcggcgggccatggaggaggtggcggtcgacaccgcctccggcgcgcccatgaaccggctggtgcagggcgatgtgggctcgggcaagaccatggtggcggcctacggggcgtggctggcggcgaagaacggcggccagtgcgccctgatggcccccacggagctgctggccgagcagcacttccgctccctggccccgctgctggggcgggcaggggtgcgggtgggcctgctcaccggctcggtgaaggggaaggcccggaaggagctctacgccgccctggcggcgggggaggtggatctggtggtcggcacccacgccctgctgagcgagggggtggtgttttccgacctggccctggccatcaccgacgagcagcaccgcttcggggtggcccagcgcgcggccctggccgccaaggccgggcggacgccccacgtgctggtcatgtccgccacccccatcccccgcaccctggccctcatcatctatggggatctggaggtgtcggtgatcgacgagctgccccccggccgcacgccggtggagacctatgtggtgggggaggacaagcggcagcggatgtaccgcttcgtgcggaagctggtgggccaggggcggcaggcctatctcgtctgccccgccgtggaggagggggaggagtccccgggagaacccggcggggagggcctcaaggcggccgtcccctatgccgaacacctcagaagcgaggtgttccccgacttgcgggtggggctggtgcacggaaagatgaaggccagggacaaggacgcggcgatgaccgccttcgcggcgggggagctggacgtgctggtgtccaccaccgtcatcgaggtgggggtggacgtacccaacgcggcgctgatggtggtggagaacgccgaccgcttcggcctgagccagctccaccagctccggggccgggtgggccgggggaagcaccagtcctactgtgtgctgatgaccagcacccatagcgccgagagccgggagcggctgcgggtgctggccaagaccgccgacggcttccgcatcgcggaggaggacttgaagctgcgcggccccggcgactttttcggccagcggcagcacggcctgccccaactgggcatcgccgatctggcggcggacatgcgggtgctcaaggaggcccagcaggccgcccagaagctgctggaggccgatcccggcctgtcccggccggagcacgcaccgctgctgggccgggtgcgccgcctgtttgcccagcacggtgacatgttcaactgagcgccccgccagggggcggagaatcacatgaaaaggagtaagacgtatgatttccattcgagagatgaccgcggcggacgagggggccgtcatggagatggtggaccggttctaccacagcccggcggtggagcatgaggtggacccggccgttctccgccggtcctttcaggcggcggtggacccggccgagccgctgatccagggcctggtgctggaggaagacggccgcccggtgggctaccattatatgtgcatcggctattccgctgaggtaggcgggcgctacctgctgctggatgagctctacctggcccccgagtgccggggcaagggctacggcgagcaggtgatccgctgggccatggagcagcaccccgagtgcgcccgctaccgcctggaggtcactggggagaaccgggccgcccggctgtacgagcggatgggcttccgctatctggactacaagcagatggtcattgaccggtaaaaaggagtgtttggtatgacgaggatggaagagaccgaggccctgcgggcccggacggacgtacactacaactgctgccagtcggtcttggtgcccttcgccgatttgtgcggcctggataaggagacagccttcaggctgggggccaacttcggctccggcatgcgccatggctccacctgcggcgcggtgaccggtgcgctgatggtgttggggctggcgggcaagggggccgatgaggccaccgcgctgatgcgccggttccgggaaaaaaaccaggtcttggactgcgccaatctgctcaggctggccaaggagcggggggaggagcgcaagtgccactgcgaccggatggtatacgaagcggtggagctgctggaggagctgctccctgaggggcagtagataaacaaaagacggttcggcgttcaggagcgccgaaccgtctttctatggggacattcaggccagaggcactgacaccggagtttcaaaccaagtctcgcgggtggcgtgcaggcccatgtcaatggtgtcccagagatagctttcgatggtatacttctcgataaaccagccctccggcagagggatttcgtcggaggtgccctgccacaggacatcgctgtggtaggaggtcactccgtagatggcccctgtcgagccatccggggcacggtagtccatggtgccgagctggcggaagaccaggtggtcttcatcggcctccggcggcatgggggcatagaaggccacctccgcattgtcaccgtcccgccgggcgctgatccgcacatccacgggcagaggggtaagggcccggccggtctccagatccacagtgacgtactccttgcccttctccagccactccgccccggtgatgcacagggtcaggttccggtcaggggagaagtaggggctctcgcaccagtaggcgcccccttgggaaaccgtgccgccgctggagccggctgcgtagcggttcccccgcccatcggcgaggtagaagtccaggccgcggagggactcccgattggtaggctcctcctcgagcagcagccgggcgtgagtcgggtagagctccaacgcctgaatatggagtttgtttccatccaggtttatccaccggtctacttccagggtctcaccctgggccagcagggcggtatcaaggggcaagcggaaggacaccactgcatatggggcagaggggtcgccttccaacggctcagggggttcggtggcgccgccccggtggccggagatctcacaggtcagatagagggtctcggggaaggccgcatccccgaaggggaacacagtaaaggcgttggagagctcgccgggatggacgcttttgctggtggaaccgtaggtctccagaggctgaccgctctcatcggtgaggacggggtgaaccataaagctggaaaactcctccggcccggtgactgtggcatagaactgaagctgcccgcggtcgggaaagaggtattccagatggagcgtgatgccgttgtcagtctggctctggccgatatactggatgaaatcgtgctccacagcggccttgaggctgggagagaaggccacggcggcggccagctccttgagcacgggcactttgccgcaggccagggcgaagggggtggacaggttcaccaggagcacgaaggcggcaaataccgccgccacgctcccggcgggggcgctgacccgccgccacagcctccggcggcgggccctggcccgggcgcgggccacggcgccatccagggcggggggcagctcctccggcgcgtcccggagggccttgtattcttccatgcggtccatggctcaaacctcctcggtcagatgcagcttcagcagggacagggccttccgctggcgggtggatacggtgcccggcgggatgtccagggcctgggcggtctccgccagggtgaggccctggaagtagcgcagcaccaccaccgcccgcagctcacggggcaggcgggcgacggcctcccgcagggggagcgcgtcgaaggcctccgccgcggtctcgggcagctcggccaccgccagctcccgcttccggcggcgcagctcggcgttgcaggcgttgatgaggatgcgggtcatccaggtggcgaaatactccggctggcggaggcgtttgtagtggagaaagccctggtagaccgcctcgtccaccgcgtccacagcgcaggcctcgctgcccagatagagccaggcggtgcggtagagccggcctttcaggccctccgcctgttgaatgaattcctgttcggtcaagggtggcgccccctttctgcctattagagaaaccggcgggccgttttcattgcgtttcttgaaaaaagtttggcttcattatataatagccgggtcagagaaaaaagaggtcccggaggaatcctgttttgaatcaactcgaccaacttcccatccccctgctccagtggtaccgcgaaaacgcccgggtgctcccctggcggagcgatcccaccccctaccacgtgtgggtcagcgagatcatgctccagcagacccgggtggcggcggtgctggactactaccgccgcttcatggaggccctgcccaccgtggccgatctggcggccgtggaggaggaccggctcatgaagctgtggcagggcctgggctactacaaccgcgcccgcaacctccagaaggccgcccgccaggtggcggaggacttcggcggggcgttccccgacacctatgagggccttctcaacctgtccggcgtgggggagtacacggcgggggccatcgcctccatcgccttcggcgttcccgttccagcggtggacggcaacgtgctgcgggtggtggcccgcatcagcggagacggcggcgacatcgcccggccggacaccaaggcccggatgcgcgccgccctccaggccgtgcttccggtggacgcccccggcgacttcaaccaggccctcatggagctgggggccacggtgtgcctgcccaacggcgcgcccctgtgcgaccggtgcccggcggcggacttctgcaccgcccggcgggaggagcgcaccggggagctgcccgtcaaggcggcaaaaaaggcccggcgcatcgaggcccggaccgtgttcctgattttctgggaaaagaaggtggccctgcggcggcggccggggcgaggcctgctggcgggcctgtgggagtatcccaacgagctctcccccgccccctgtccggtggaggcggccgggttatccgacggcccggcggggaagcatatcttcagccatatcgagtggcacatgaccgcccaaatcgtggaggccgcctcgccggagctgccggaggggtgggtgtgggccgaccgggccgccctggagcgggattacgccgtgcccaacgcctttcaggccttcgccggggcggtggaggcccggctgtgaaggagagcgccatggaggatgtactggccgcccagcggcggtattttgacagcggggccacccggcccctccgcttccgccgggagatgctcacccggctggagctggccctcacccggtgggagggggagctgctggaggcgctgaaggcagatctcaacaaatccccctacgaggggtatatgagcgagctgggtcccaccctggcggagctgcgctttgcccgcgggcatctgaaaaagtggggccggcccgtccggcaccccgcccccctgtcccagttcccctccgtgggcacggtgtaccgggagccctacggcgtgtcgctgatcctcgccccgtggaactaccccctgtttctcaccctggcccccctggtgtccgccatcgcggcggggtgcaccgcggtggtgaagccgggggaggacgcccctgcctccgcccgcgccctggcggaggtgctggggcgggtgtttccgccggagtatatcaccgtggccgaggggggacgggaggaggcggaggccctggtggacaagcccttcgacgtgatcttcttcaccggcagtccggcggtggggaaaaaggtcatggccgcggcggcggagcacctcacccccgtcaccctggagctggggggcaggtcgccggtgattctggcccccgacgccgatgtggagctggccgcggcccgcattgcctggggcaagttcctcaacgcggggcagacctgcgtggccccggaccatgtctgggttccggaggggatggcggagccctttgtggccgccctggcccggcagatcacccgtttttacggtgagaaccccctggccggggaggggctgccccgcatcgtcaaccggcggcacttcgaccgtctggccgggctgttgtccggcgggcggatcgccgtgggcgggcaggccgacccggagggcctgcgcatcgcccccacggtgctggtggacgtgccggaggacagcccggtgctggcggaggagatcttcggccccatcctgcccgtgctgctctaccggagcctgccggagctggtggaggcccagaggcagaagccccgcccgctggccctctacctgttcacccggagccgctccgtccagcgggcggtgctggaggtcctgcccttcgggggcgggtgcgtcaacgacacggtggtgcacctggccgacccccgcctccccttcggcggggtggggaacagcggcatgggcgcctgccacggcaaggcgggcttcgacgccttcacccacgaaaagagcgtactcaaaagagggcggctggacattcccgtccgctatccgccctatgggaaaaagcacctgggcattttgaaaaaactgatgtgacgcgggaggaacaccgacatggcaaaactctatttccgttacggggtcatgggctccagcaagacggccaacgcgctgatggtgcgctacaactacgaggagcggggccaggacgccctgctggtcaagcccgcggtggatcagcgggacggggcccggttcgtggcctcccgggcggggctgagccacccgtgcatctacttctccgacctgatggagatgacgccccgccagctcaagccctacgcctgcatcatcgtggacgaggcccagttcctcacccgggacgaggtgcgctacctcaccgatctggtggacgactggaacatccccgtcatctgctacggcctgcgcaccgacttcaagggggagctgttccccggctcggcggagctgctggccacggcggacgtgattgaggaggtcaagaccatctgctggtgcggcaagaaggccctgtgcaacgcccgctttgacgagagcggccacgtcatcaaggagggcgagcaggtggtgctgggggccaacgacaagtacatcggcctgtgccgcaagcactggaaagagggcaacttagggccgcagtaactccgggcccatgcactccacggccagcaggaagcccagccgcagcccttcggagaaggcgtactgtccgtggcccagcacggggcggtcccgcagctcatccggccagtgccgggggttcggatggccgacgaaatattgatagagttcttccatcgcaggggacatgaaaatcacctcctaacgtcctttaagtcgtcatcataataacactactaaaaggtcgtgtcaagagaaaagaggaaaagatgcaattttgtgagaagctctatgccctgcgccaagagcgggggttgacacagaagcaggtaggcgaggcgctttccatggccgcccgtcaataccagcgctttgaaaagggcgaacagaagccggggtttgacaatctgcggaacatggcggacttttacggggtgtcggtggactggctgatgggccgcacagagcgccgggaggtctggcggtaaccgggccctgtaggggcggcctttatggccgcccggggggcgaccacaaggggcgcccctacgccgtgataccttgggacgggcctgttccgcagaggccgacgccccagggcggcctctcttgcccctctggggcaattcaccttctgcccacatcggcccgccttgtgccaggctggtgcaccttccatgttaccctttttgacacctgtttccttgtcatgcctccggcgggcccctttctgtgcggacagaaaggggcgaaagagccggccgggaaggggggatttcgatttccccccttcccggcacccatcccccttaaaacgaccaaagagggggcctccgggcccccatctttggaatctcccccaagttgtcctaccgatagtgctccggtggcgggggcttacgctgtaacgcccccgccgcaccggcctgggtgggggggacggggagacggcgctgaaacgcagggggcggggcttgtccccgcccgcagccggcaaacctgggaaggaggagaaatccaatgatctgcaatctctgcccccgccggtgcggggccctgcgcacggagaccgagggccggggcgtatgccggatgccggaggcgccggtggtggcccgtgcggccctccaccagtgggaggagccgcccatctcgggcacgcggggctccggcaccgtgtttttctcgggctgctccctggggtgtgtcttctgccagaacgacgccatcagccaccaggactttggacggcccatctccctggagcggctgcgtgccatctgcttcgagctcatcgaccagggggcccacaacatcaacctggtcaatcccacccactatgcccacgcggtggcccggctgctggcccggccgctgccggtgccggtggtgtggaactccggcggctacgaccgggtggacaccctgcggggcctggaggggaaaattcagatctatctgcccgatttgaagtatgtcacgccggagtacgcggagcagtattccggcgcggcggactacccggaggcggcccaggcggccattctagagatgttccgccagaccggcccctgcgtgtatcaggacggcctgttaaaacagggtgttatcatccggcacctgctccttcccgggaaattggccgaggccaagcgggtgatggactgggtggcggagcacttcgcccccggcgcggtggccttctccctcatgagccagtacctcccctgggggcgggcggcggagttccccgcgctgaaccgccgcctgcggccctcggaggtccgctcggccgaggactatatggacgcattggggctggagggcttcacccagggggcggaggccgcacggtcggagtacattccggcctttgatctcacgggggtataataaacgggcggctttcccgcgtgcgggaaagccgcccgttcataccagccgggccatgtcctccggcagaggctgctcccaggccatgggttccccggtgacggggtggcggagggagagccgggcggagtggagggcggggcgggagatgaggctgtgatcctccgtgccgtagaggaagtcgccgatgagggggtggccggtgtgggccatgtgcacccggatctggtgggtgcggccggtgtccagctccagctccaccagggcgcggccctgcccggtgcggagcacccggtagcgggtggaggcgggctggcccgcagggtccacctggcgggccatgagggagccggggacacggccgatgggggcgtcgatgcgcccctccggcggccggggggttccctcgcacaccgccaggtagatccgccggaaggcgggggtgtggagctggcccttgagctgctcctgggcgtgggggtgcttggccaccaccagcaggccggaggtgcccttgtccagccgctggacggggtggacgtcggcggaaattcccgcttttttgtaataccaggcgatataattacagagcgtatcgctgtagtggccgggaccggggtggatcagcacgccgggggccttgttaagcaccagcagatccccgtcctcgtacacgatgtccagggggccgggggtgggcaccatatccccccggcagccgggatcggccacccggacggagagcacctgccccgccgccgggcggcaggcggtggtgacccgcatcccgtccagcaggatgccgtcgtccagccacttgacacggcggatcaccgtccccgacaggcggagctcccgccgcagcagggtgtcgattttttcccccgcctggtccgccgtcacggtcagctccaggcggcggggggactgctggaccatgtttgtgccctccttgcgttttttcccagtatagcacgggcgcggcggcttttcaaacggcggattttgtagtataataatcaattagaatccaagcaacggaaacgaggtgcctccaatggcggaaaaactgggcctttatgtccatatccccttctgccgcagcaagtgcgactactgcgacttctactccctggcggggaaggagggccggatggacgactaccaaaaggcgctgctcgcccatatgaaggagaccgcgcccctcacccggggctggcaggtggacaccgtctacttcggcggcggcacccccagcttttacggggagaagcggctgcgggaggtgctcaaaaccgtggccaagcgcttcgatctggccaaggacgcggagattaccgtggagtgcaacccggacagtgtggataagaaggtgtttcaggccctccggcgggcgggggtaaaccgcatctccctaggcgtccagtccgcccacgactgtgagctgaactgcctgcaccgcccccataccttccagcaggcccagagggcggtggccgcagcccgagaggccaagatcaaaaacatcagcctggatctgatctacggtctgcccaaccaggatatggcggggtggcgggacaccgtggagcaggtgctggagctggagccggagcacctgagctgctacggcctcaaggtggagccgggcactcccctggacgaccgggtggtgcggggggagaagctgcccgacgacgaccagcaggcggatatgtatctttggacggtagagcggctggcggcggcgggctaccgccagtatgagatctctaactttgcccgggcgggcttccagtcccggcacaacctgaaatactggatgggccggccctacatcggcttcgggccgggggcccactccgacttcggcgggcggcgctactcttttatccgggatctggagggctatattgccgccgtgctggaggggggcaccgtcatcgacgagtccgacctgatcccccagcgggagcggggcggcgaatatttgatgctccgcctgcgcaccacccggggcatcgaggagtgggagtaccgccgggagttcttcatgaacttcgatcccatcgagcagaagctggaggagtacgagcgccagggctgggcggagcggcacgaccgccgctggaatctgacggccaagggcttcctggtgtccaaccagctcattggggagctgctgtccattcaggaggaggcgacactggaaaagactctgccccggctgaagcagggcaggccggaggaggggtaagggcgggattttaagaccgcccgccgcccgtggaagaaaattgtaagaattggattgacaaatcctggcccccgcttgtttacaagcgggggcttttgtgttaacataatttttgtatgacccgtttcacagacgatattaggaggacaagtatgaaacaatggatccggcggggggcggccctgggtctggcgctggccctgactgtcaccgcggcctcggcgtcccaggccatgggctgggacgtacataccgggcgggcgcccctctcccagggggccagcttgggaaagaacgtgttctggagcgatacctattccgacctgcgcaccgagtactatgtggagtattcccccaacgccagcgtagtgcccacggtggcctacggctccaaggttaccgaccgggtgaccctgtccggcatggcccagaccctggagagccagggcaaacgggtggtgtccggcctgaacggcgactggtatgtgctctccaccggcgcgcccaccggactggtggtgaccgacgggattgtgcgggccacaggctactacaacgacacctgggccatcggcttcaacgccgacggcaccgctttcatcgcccgcaacgggctgtctgtctccgtgtccttcggagggcaggccgtaaagctgggcggcggcatcaataaggtacgaaagctgacggacagtgccgctgtgggcggcctgaccctgctgaccgacgacttcgccgctaccacccagaacaccgagccgggggtagatgtgattctgtccccggtggatgacggcaccggcacctacgccgttaagcctaccatcggccggcagacccagtatgtggtggagcaggtgctggagtccaccggaagtatccccattcccgagggcaaagccgtgctcaccctgaacgccaaggagagcgaggaggccctggcccgcctgcgggcccttcagccgggggataccgtcacccttaccgtgtccagcagcgatcagcgctggagccaggcggtccaggccctgggcggcgtgtccaagctggtcaccaacgggcaggtggactccggactggacgcctcccgcaccgcctggcccgccatcggcatcaaggctgacggcactgtgatcttctacgccatggatggaaagcagcccggctacagcgtgggcgccacccagggccaggtggcccagcgcctcattgagctgggatgcgtggaggccatctgcatggacggcggcggctccaccaccatcggcgtcacctaccccgaccaggagggcatgcaggtggtcaataagccctccgacggcagccagcggaagaacagcaccgccatcttcctcaccaccgggctccagcccaccggcgagctggcctcctactacgtgaccccttccgacagcatcctgctctccggggccacggtgcagctctccgctaccgggctggacaccagctacttccccaccagcggcggcggcgtgagctggtcggtgtccagcggcggcggcactgtggacgagaacggcctctttaccgccggggcggagagcggctttgcccaggtcaccgccaccgacggctccgcctccggcaccggctacatcaccaccgtccgcaccccggacgagatcaccctgaccaatgaagccaccggcgcggcggtcgccagcctgaacctggaccccggcggccaggtggatctgaaggcctccgcctcttaccgcaagctggccctcaccgcccaggatacctgcttcacctggtcagcggacccagaggtgggcacggtggacgcaaacggcgtctttaccgccgggacaaagagcgccagcggtaacctcaccgtctccgccgggggcaagacactcaccgtgccggtgagtatcgcgggccacgtcaagacgctggaggactgtgagggcgacctggcctccttcggtgccaccagcacggcctcctacggggccgagaccggcctggactacgtccacaacggccgccagagcctgaggatgacctatgacgcctccacaggcggaacggcgagcctgaacagcgcgctgcccatccctgccggagagagctggctgggcgtgtgggtgtacggcgacggctcgggcaataccctgatggccacggcggcggacgccagcctccagagccggcagttcctgctgaccgccctggacttcaccggatggaagtacgtcagcgccgagctgcccgagggcgcggccaccctcaccagcctggacgtgatctatggcggcggcgcgggcggcccggccgggaccatctggctggaccagttcaccacctccaatgagaatgtcagcgacaccattgcccccaccgtccgcctgtccgtcagcggcactcagctcaccgccgccgtgtcggacaacgtggaccgcacgattccccaggccaatgtgagcctgacctatgacggggcgactctgaactttacctggaacgaggcctccggaaccctgaccgccacgctgcccgccgccgacagcggctaccatcgggtgagcgtcaccgcctgcgacgccagcggcaacctggcccgcgcctccgcggatatcaagcccgccgggacacgtacctccccctttggggatatggcgggtcactgggccgagccctacgccacctacctctatgacaccggcgtgtccaagggcaccggcgtggagatccctgtctatcagccggaaaagaacatcacccgcgcggagttcttcgccatggtggcccggtggatggacctggatctcacccagtacgccaatgtggagctgcccttcgtggatgccgcctccattccggactgggcgctgaatgaggtcaaggccatgtacagcctgggcatcctgaagggcggggccaacgagagcggcctcaccgtcaacgccctggccaccatcagccgggccgaggccatgaccattctgggccgcacccaggccaggggctacgccgagccggagctcaccttctccgacgcggggcaggtgcccgactgggcggccggctacctcaggagtctggtgggccagggtgtgatcaccggcaacgacaaccgcatccgccccaacgatctgctcacccgcggcgaggtggcaaagctgctctacgccatgctgtgaaggacggataaacaacacgggcccccggtctctttgagaccgggggcccgtgtttgttccgcgctcagccccggcagcccagctcccccaggagccgggccagcactcgcatgcgctccccgagcagctcgccgtcccgggccagggcgtcctggaacagacggagatcctcgtcgatgtggtcgctggaggtgcatacctccaccgtcatggcgtccccctgcaggccgatgcggtccacctggggatgctccgggtcgtagcccctggggaagcggtaggcctcctcctggaaatagagctgggcccggcaggccagaatcgccagatccagcacccggtggaggggcagctcctccgactggcgggaccacttctccccggtgtgccgccacaccttggcggagatgtccaccttgccccggtcgttccactgggccaggcccagggagaggccttgggcgtcggagccataggcggtgcggccgtcgatgcgtccgtagtcctcggccaccaggacgggcttgtgcttgagggtggtggggatgtgcatatggtcggcctccaatcagtaaattagtaatttagtaaatgactaaaataagatagcacgtataaacttcgctgtcaagggaaaccttacaaaggacaaaaggaggctgcggacgcatggatatgaccaatcaagagtatggccgctacgtcagccagaaggccaagccctcgcccctgtggaaaaacctgctgtgggcctttgtgacgggcgggctgatctgcaccggcgggcaggccctgctgaatctgttccgcgggtgcgggctgaacgagaacgccgcaggcaccgccgtgtcggtgaccatcatcttcctggcggccctttttaccggtctcggtctgttcgacaagctggccaagcacgcaggggcgggcacgctggtacccatcaccggatttgccaacgcggtggtctccccggcgctggaattcaagtgcgaggggctggtcatgggcgtgggcgccaagatgtttgtgatcgccgggccggtgctggcctacggcatcagcgcctccgtgctctacggcgtgattctccagctctttttccggggataaagagcgggaagaggggggccgcccaggcggcccccctcttcccgtccggcttgcaaaaaattgaggcaattcaaacaaaaacacttgacaaaagggatggacggtagtatgatctagacagaaaaagaaagaggtgagccccatgggctgagaaagctcattcttttccggccacagcgtatgggaagaccaaatacctgaagttccaagcttgcactcgttcccaacggactcaatgaagtgagatgcacaaagggaagacctccgaggtgaagttcgccgaagacggaaaccaagtgccgatttgttgcaggagacagtgaaacaaaggaatttcccgttctgttgctccaccgcgtggtaaaatctgtagaaagtgcgaggtaatgtgtagtggtagaaccccagatcgaacggtagccccccggtcacgatggatggccggggggttgtgctgtctctggagtttttgctgcacaggaggagcgtcggccccggctgtgcgtttacagcaggctcaggccgttgatatccagcttgaaggtcagctccaggaattccgccgcacggcggcagaggagcatccgctccagaaagatctcgaagtagtccatcacggcgcagaattcggtgttgatgcccagggagagggtgagggtgcgccgctccgggtccagtgtcagctcggaacgctcggcggcatagttgacccggtcatggatgtcgaagctctgatgctccttgttgcgtacccggctgcggcgcacatcggtcttgtctgccaggatcaacgccgcggcaaccggattgacggggaaggcggtgggatcgtcgtggtggccgatggcggtgatgacggcggccacgtcagcgggctccatgcccatcttgtccagaatacggaaggccatgacggcgccggtctgggcgtggtcgtggcggttgaccacgttgccgatgtcgtgcataaagccggcgatgcgggccagctcctggtcgtgctctccatatccgagctgggccaggatgcgggcggcaaactcggcgcagcgggtgacgtgggcaaagctgtgctcggtgaagccccgggccagcagggactggtcggcttgggtgatataggtgcggatctcctctgaattccgcacggtttcatagcagatcttcatggtggggactcctttcctccgggtcgtttcctacctattatatcccgccggaggaaaaaggacaagcaaaagcggcgccgcccgttccgggcggcgccgttttgcactacagcaggccgagggtgtgcaggtagtctgcggccaccaggtccacgtcctctcccagcacgtccacccggtaggtcagctcactcatgacctcgttggtgaattggccggtgagcagctccagggtctgctccagctccggcgcccggtcggcgaagtcctcgaagagaccatcccggacggtgagcaccccattgtactcggggaagaaggatttgtcgtcctccagaatggtcaggttggcgtccttgttcagaccgtctgtggcgtataccaccatgacatcgtagctgcccgacttgatggcggtgtacttcagcatgatgtccacctgaatggcctcctggaactggaggccgtagaacgccacgaaagggccgtatttcatgctgccggcatcggtgtaaaagtcctgctccgcgccgaagcgcagctccccggggatgggggccagatcgctgatggccgcggggtggtaggtatccatcaccgcctgggtgacgccgatggagtaggtgttgtccacgccgatcttgcccagcatacgggcgccgtactgctccccgatgcggccgttgacgaagtcgtaaaggctctgccccgcagggatgtcactggtgtccagccccaggaaggtggtcaggatggtgccgtcccaggtatacatcaggtcacagctcggctcccgcgcggtgagctccttgaagttgttgatcgaggtcatggggtcgagtatgctgacctccagccccgtgcggtcctccacaagctgctgcaccatgcggttgaccaactgaacctcggagaactccccgtcgtagaggacaagggtgctggaggtgtccttgggcagcagggagggcaggcacagggcggccaccaggacggccgccgcgcctgctgtgagccgccggcggagaacggcgtgccggccggggcggcggctgctgtcccgccggcccatgcggcgctcgcagaaggccatcaggttgtccagcagcagggccatggccatcagcgctgcggtgccggagagaatcatggccacgtcgttgcggcggatgccggtattgatgaggttgcccaggccgccgccgcccaccgaggaggcgaataccgccgtgccgatggcgttgaccacggcgatgcgcaggccggtgaacagcatgggcatggccaggggtagttccacgtggaagaggctgtagacgcgggtcatccccatccccttggccgcctccttgacagcgggggacacctggctcagccccagggtgacgttgcgcacgatgggcaggagggagtagagggccagccccagaatcactgttggcttgcccgcccccaggggggtgaccatgatgatgcccagcagggccagggcgggggtggtctgaatgaggtccaccacccgcaggaccacgccccgggccgcgcggctgagatagcacagcaggcccaggggcaccccgatgagaatggcgatgacaatggcgaacaccaccatggacaggtgttccaccaccatggagagggtcatgcgtcaccgccccccttccgcagtcccttgggcaccacatgcttctggagcagatcgatgagcccgcccaggaggaaggccagcagggccgccgggacggcgcccagcaggatcagggcgttgttgctggactgcacgccctggtagatgaaggtgcccaggccgcccaggccgatcatggcggccagcacggcccagctcacggtgtagaccatggacatgcgcagcccgccgatgatggtgggcatggccaggggcagctccacccggaggagctgctgggcgggactcatgccgcagccctgtgccgcctccttatactgcgcgtccacccccagcagcccggtgaaggtgtttttcagcaccgggaacatggcatagatggacagggcgatgaggacggtggcgggctggatgtggagcaccaggaacagcaggccgataaagaccacgccggggatggtgttgaacagggagagcaggggcaggatgaaccgggcctgcctgggaaagcgggagaggaggatacccagccccaggcccaggacaaagccgatggccaccgagaccagggtgtagaacagatgcacgccgatgcttcggatcagggcctcggcgttgcgcgccagaaactcacccataccgtcacccccagagctgttccgccatggcagaggccatgctggtcttggtgatgatgccctccacctgttccgcctcgcccagcaccaccagatagctggcgccgctggagatgagctgctcaaagcagcccttggcgtcgtcgccggagtggacggtgggagtggcggtgcgtaccaggggagcgatgtcggtaaccacgtggccgttgaggcggatgtccgcgatggaaaccgtgcccgcgtagcggcctgcgtcgtccaccacgatcagggtgtccacgttgtagcgctgcatcttgcgcacacactcattggtgccgcggtggagggagacggtgtagacgccggtgcgcatgaagtcggcggcggtcagcgccttatgggagggcgtgttgataaacttgcccaggaaatcctggatgagaccgctggccgggcgggccagcatctcctctggcggggccatctggacgatcctgccgtgatccatgaaaatgatcacatcggccaggtccagcgcctcctccatatcgtgggtgacaaacacaaaggtcttgttcagcttctgctggagggagcgcacctcctgctggagggtgcgccgggtcatggggtccagggcggagaagggctcgtccatcagcacgatggggggcgaggcggccagggcacggagaatgccgatgcgctgctgctgcccgccggacatctcggaggggtacttgtgggcgtactgctcatagggcaggttgaccagctccagcagctcatggacgatcttgtcgcacgcctccttgctgtatttcagcagattgggcaccacgcagatgttctgggccacggtcatgttgggaaacaggccgatctgctggatgacatagccgatgtggcggcgcagctccaccctgtcctgggcggcgatatccttgccgtttatatagatcttgccgctggtgggttcgatcaggcggttgatcatcttcagcgtggtggtcttgccgcagccggacgagccgatcaggaccgccatctgcccctcttggatttcaaaggagatgtcgtcgataattttctgactcccgtaggagagagaaacgtgttcaaaacgaagcaaagcggaagccccctttttccagtgtagtccatatcagtatagcaaaatgaggattattagtcaaatccgggcaaaaatccgaatgaaatcttaacaaagcacgccggggagaagcggaagctccttcccggcgtgccgttcagcgcacctttgacaagtcgtatggagtcgtttggtacaggtagtaattcagccagttggtatagagcaattggcccgcgctgcgccagcggaccacagggacgcgggcgggatcatcctcgggaaagtagtgggcgggcacggcgatgtccagccccttgtcaatatcccggcggtactctctggctagggtgtccgggtcatactcggggtgtcccatgatgaagaactggctgctgtcctccgtcttgacagcgtagactcctgcctcagaggaggtggccagcagctccagccccggtgcggcgcgaatatccttctcccacacctcggtatagcgggagtggggggcacagaacacatcgtcaaagccgcgaaacaggggggaactgggcttgagcacccggtgctcgtacacaccgaagagcttcctgggcagggagcgcttctcgatgccatgatgaaagtacagccccgcctgggcgccccagcagatgtggagggtggagtggacgtgggtgcggctccacgccataatttcgcacagctccggccagtagtccacctggttgaactccagattttccactggagcgccggtgatgatcattccgtcgaagttacggtcccttacctggtcaaaggtggtataaaaggaggccaggtggtcctcgtcggtgtgctgggactggtagctggccgtgcgcagcagttccacctggatctgtaccggcgtattggacagcttgcgcaggatctgagtttccgtcacgatcttagtgggcattagattgagaatcaaaaccttcaaaggacggatatcctggtgcagagcccggtattccgtcataacaaagatgttttcgctctccagaatcgcagtggcgggcagagcgtctgggatcttgatgggcatgcctgaattcctccggttctgttatttataatagtagaataagggtaacatatttagaggagtacttcaacccgggattgctggacagaaaaaaagcgcgaaaaaagggaaaaaggtgttgacaaagaggaggaaagctggtattctaactgagcgcctcacggagggcatgaaaaaacaggaaagcagacggaagagaccgggcggaagccggacggactttcggaagcgggctgaaaaaagtgcttgacaaatgagtgagggcgtggtaaactaaatgagttcgcgccgagaggcgggaatctgcttgaaaagaacaaaaagaacggctgtgaggctgaaaaacctcagaaaagtttgaaaaaagttcttgacaagcgaaagtgtgagtgctaaaataaatagcacgtcagcagaaaagctgacaggggcgtgtaccttgtaaattaaacaacgtgagagaaacacgaagcaccagaaaggacgagaagtccttctgagcaagcgcaagcttgatgaagaaggctcttgaatagatttctttgaagctatgaattgagcttcgataagatgatttgaggaacggaaacgttctttagataccattttattgagagtttgatcctggctcaggatgaacgctggcggcgtgcttaacacatgcaagtcgaacggggtgctcatgacggaggattcgtccaacggattgagttacctagtggcggacgggtgagtaacgcgtgaggaacctgccttggagaggggaataacactccgaaaggagtgctaataccgcatgatgcagttgggtcgcatggctctgactgccaaagatttatcgctctgagatggcctcgcgtctgattagctagtaggcggggtaacggcccacctaggcgacgatcagtagccggactgagaggttgaccggccacattgggactgagacacggcccagactcctacgggaggcagcagtggggaatattgggcaatgggcgcaagcctgacccagcaacgccgcgtgaaggaagaaggctttcgggttgtaaacttcttttgtcggggacgaaacaaatgacggtacccgacgaataagccacggctaactacgtgccagcagccgcggtaatacgtaggtggcaagcgttatccggatttactgggtgtaaagggcgtgtaggcgggattgcaagtcagatgtgaaaactgggggctcaacctccagcctgcatttgaaactgtagttcttgagtgctggagaggcaatcggaattccgtgtgtagcggtgaaatgcgtagatatacggaggaacaccagtggcgaaggcggattgctggacagtaactgacgctgaggcgcgaaagcgtggggagcaaacaggattagataccctggtagtccacgccgtaaacgatggatactaggtgtggggggtctgaccccctccgtgccgcagttaacacaataagtatcccacctggggagtacgatcgcaaggttgaaactcaaaggaattgacgggggcccgcacaagcggtggagtatgtggtttaattcgaagcaacgcgaagaaccttaccagggcttgacatcccactaacgaagcagagatgcattaggtgcccttcggggaaagtggagacaggtggtgcatggttgtcgtcagctcgtgtcgtgagatgttgggttaagtcccgcaacgagcgcaacccttattgttagttgctacgcaagagcactctagcgagactgccgttgacaaaacggaggaaggtggggacgacgtcaaatcatcatgccccttatgtcctgggccacacacgtactacaatggtggttaacagagggaggcaataccgcgaggtggagcaaatccctaaaagccatcccagttcggattgcaggctgaaacccgcctgtatgaagttggaatcgctagtaatcgcggatcagcatgccgcggtgaatacgttcccgggccttgtacacaccgcccgtcacaccatgagagtcgggaacacccgaagtccgtagcctaaccgcaaggagggcgcggccgaaggtgggttcgataattggggtgaagtcgtaacaaggtagccgtatcggaaggtgcggctggatcacctcctttctaaggagacttcaacggaagtagttttctgttgtaacgtcctaaggtcagctttctggagcgaatggctttcacgttgtttaatttagagggtacactctcgggtacccgaacagagcccagcgaagcgggtctgttcgggagaggagacgcaagagagcgcagtgagggatggccgtgaggacgtcacgaacggagcggactttgcgtcgacgacgacgggcccatagctcagctggctagagcgcacgactgataatcgtgaggtcggtggttcgagtccacttgggcccaccaccaaaaccctgggggtttagttcagctggtagaacacctgctttgcaagcagggggtcaccggttcgagtccggtaacctccaccaatttaagaatggattttaacactcaagggattgagtgttaaaatctggccttaaaggctggaaggcggcaccttgaaaactgaacaatgtagatcgaaagtacaagagcaagcaacagagggcaaaacagcaatgttgtggaactaagatagaatggcgaaagccgttctagtaagggtaaaaacaatggagctaattgcaaaacttctgtgatgcctgcataattcatgattttgagaacagctcagagatgagactgttctacaaggtcaagctagaaagagcgcaaggggaatgccttggcatcaggagccgacgaaggacgtgacaagctgcgataagctgcggtgagctgcacataagctttgacccgcagatttccgaatggggaaacccggcagagcaatactctgtcagcgtgcgttgaatcaaataggcgtacgcggggaaccgcctgaactgaaacatctaagtagggcgaggaagagaaatcaaccgagattccgctagtagtggcgagcgaacgcggaagagggcaaaccggaggatttatcctccggggttgtggacagttttttagcaactggaactaggagaacggtatgggaaggccggccatagcgggtgatagccccgtatccgaaagggaaggttgtgcgactggatccagagtaccgccggacacgtgaaacccggtgggaagctggggggaccaccctccaaccctaaatactacctgatgaccgatagaggagcagtaccgtgagggaaaggtgaaaaggaccccgggaggggagtgaaagagaacctgaaaccttgtgcttacaagcactcaaagcccgttaaagggtgatgaggtaccttttgtagaatggtccggcgagttattgttactggcaagcttaaggcattcagtgccggaggcgcagggagaccgagtctgaatagggcgtatgaagtcagtggcaatagacccgaaaccgggtgacctatccatgggcaggttgaagtgggggtaaaaccccatggaggaccgaacgcacgcccgttgcaatggtcggcgatgacctgtggatagcggtgaaattccaatcgaactcggagatagctggttctccccgaaatagctttagggctagcgttggcttagattaccggaggtaaagcactgaatgggctaggggccgataaggttactgaaccctatcaaactctgaatgccggataattgatggccagcagtcagtctacgtgagataagtctcgtggacaaaagggaaacagcccagacccacagctaaggtcccaaagatacgctaagtggaaaacgatgtggagttgcgaaaacaaccaggatgttggcttagaagcagccactcattaaaagagtgcgtaatagctcactggtcgagtgactctgcgcggaaaatataacggggctaagcgtaacaccgaagcttgggctgcacagcaatgtgcggggtaggggagcgtcgaatatggggtgaagtcgcagcggaagcagcggtggactgtattcgagtgagaatgccggaatgagtagcgagaattatgtgggaatcataatggccgaaaatctaaggtttcctggggaaggttcgtccgcccagggtaagccgggagctaaggcgaggccgaaaggcgtagtcgatgcacatacggttgaaattccgtagccaccgaaccttaagtacactgacacatggagatagcgggacccgggcgttggttgacccgggcgtaagggaccgaactttagtagggaagtccgcgatgctctgtggcgagaaaaggtgtatggtatgctaaggtgcccgtaccgcaaaccgacacaggtagatgaggagagaatcctaaggccaacgggagaagggttgttaaggaactcggcaaaatgaccccgtaacttcgggataaggggagcctcctacgggaggccgcagcgaataggcccaagcgactgtttaccaaaaacacaggtctctgctaaatcgaaagatgacgtataggggctgacgcctgcccggtgctggaaggttaagaggagatgttagccgcaaggcgaagcattgaatcgaagccccagtaaacggcggccgtaactataacggtcctaaggtagcgaaattccttgtcaggtaagttctgacccgcacgaatggcgtaacgacttgggcgctgtctcaacagcccacccggcgaaattgttgtactggtgaagaagccagttacccgcaactagacggaaagaccccatggagctttactgtagcttaatactggaaatcggtaaatcatgtacaggataggtgggagacttggaagccagggcgtcagctttggtggagtcacccttgggataccacccttgatttgctggttttctaacctgcggccgtgaatccggtcgggggacactgttaggtgggcagtttgactggggcggtcgcctcctaaaaggtaacggaggcgctcaaaggttcgttcagcacggacggaaaccgtgcagtgagtgtaaacgcataaacgagcctaactgcgagaccgacgggtcgagcagtaacgaaagttggagttagtgatccggcggtatgcaagtggaagtgccgtcgctcaacggataaaagctaccctggggataacaggctgatctcccccaagcgtccacagcgacggggaggtttggcacctcgatgtcggctcgtcacatcctggggctgtattcggtcccaagggttcggctgttcgccgattaaagtggcacgcgagctgggttcagaacgtcgtgagacagttcggtccctatctgttgcgggcgtaagagatttgaagggagctgtccttagtacgagaggaccgggatggacgtacctctggtgcaccagttgtcctgccaagggcatagctgggtagctatgtacggacgagataaacgctgaaggcatctaagcgtgaaactccccctaagattagatctctcattcgaaagaagtaaggcacgacgtagactatgtcgttgataggccggaggtggaagcacggtaacgtgtgcagctgaccggtactaataagccgagggcttgaccttaacatggatgattgcaggcgcttgcgaagtgcggaagatttacattgttcggttttgagggtgcagcaccctggatggtggcgacaagcgcctttagctcagctggtagagcaactgactcttaatcagtgggtccccggttcgaatccgtgaaggcgcaccaatggcccgttggtcaagcggctaagacggcggcctctcacgccgcaaacgtgggttcgattcccgcacgggtcaccatcatttttctcttgacaaagaggaagaaaatgaatataatgacttatcgttgagaagaacggtaaggagaagaaagttgttagagtttcttttgcttacttttcttttcgaaggaaagtaagttggtgttgattgcggtgagggtccacccgttcccatcccgaacacggaagttaagctcacctgcgccgaaaatacttgtctggagacggaccgggaagataggtaacgccgacacagaaaacggacttcatatgaagtccgttttttgttcccttgaagaggagtgggagagcgtgcattattcaggggtgcggcgcggggtgtttgtagagcgcccgaaccgctttgttgcccatgtggagctggatggccagccggtggtctgccatgtcaaaaataccgggcgctgccaggagcgataaggctaaagagacacacatggacaagttgactccctttttcaagaaaaagaaaagaattttgaaaaaagggttgacaaagaggaggaaagctggtattctaactgagcgcctcacggagggcatgaaaaaacaggaaagcagacggaagagaccgggcggaagccggacggactttcggaagcgggctgaaaaaagtgcttgacaaatgagtgagggcgtggtaaactaaatgagttcgcgccgagaggcgggaatctgcttgaaaagaacaaaaagaacggctgtgaggctgaaaaacctcagaaaagtttgaaaaaagttcttgacaagcgaaagtgtgagtgctaaaataaatagcacgtcagcagaaaagctgacaggggcgtgtaccttgtaaattaaacaacgtgagagaaacacgaagcaccagaaaggacgagaagtccttctgagcaagcgcaagcttgatgaagaaggctcttgaatagatttctttgaagctatgaattgagcttcgataagatgatttgaggaacggaaacgttctttagataccattttattgagagtttgatcctggctcaggatgaacgctggcggcgtgcttaacacatgcaagtcgaacggggtgctcatgacggaggattcgtccaacggattgagttacctagtggcggacgggtgagtaacgcgtgaggaacctgccttggagaggggaataacactccgaaaggagtgctaataccgcatgatgcagttgggtcgcatggctctgactgccaaagatttatcgctctgagatggcctcgcgtctgattagctagtaggcggggtaacggcccacctaggcgacgatcagtagccggactgagaggttgaccggccacattgggactgagacacggcccagactcctacgggaggcagcagtggggaatattgggcaatgggcgcaagcctgacccagcaacgccgcgtgaaggaagaaggctttcgggttgtaaacttcttttgtcggggacgaaacaaatgacggtacccgacgaataagccacggctaactacgtgccagcagccgcggtaatacgtaggtggcaagcgttatccggatttactgggtgtaaagggcgtgtaggcgggattgcaagtcagatgtgaaaactgggggctcaacctccagcctgcatttgaaactgtagttcttgagtgctggagaggcaatcggaattccgtgtgtagcggtgaaatgcgtagatatacggaggaacaccagtggcgaaggcggattgctggacagtaactgacgctgaggcgcgaaagcgtggggagcaaacaggattagataccctggtagtccacgccgtaaacgatggatactaggtgtggggggtctgaccccctccgtgccgcagttaacacaataagtatcccacctggggagtacgatcgcaaggttgaaactcaaaggaattgacgggggcccgcacaagcggtggagtatgtggtttaattcgaagcaacgcgaagaaccttaccagggcttgacatcccactaacgaagcagagatgcattaggtgcccttcggggaaagtggagacaggtggtgcatggttgtcgtcagctcgtgtcgtgagatgttgggttaagtcccgcaacgagcgcaacccttattgttagttgctacgcaagagcactctagcgagactgccgttgacaaaacggaggaaggtggggacgacgtcaaatcatcatgccccttatgtcctgggccacacacgtactacaatggtggttaacagagggaggcaataccgcgaggtggagcaaatccctaaaagccatcccagttcggattgcaggctgaaacccgcctgtatgaagttggaatcgctagtaatcgcggatcagcatgccgcggtgaatacgttcccgggccttgtacacaccgcccgtcacaccatgagagtcgggaacacccgaagtccgtagcctaaccgcaaggagggcgcggccgaaggtgggttcgataattggggtgaagtcgtaacaaggtagccgtatcggaaggtgcggctggatcacctcctttctaaggagacttcaacggaagtagttttctgttgtaacgtcctaaggtcagctttctggagcgaatggctttcacgttgtttaatttagagggtacactctcgggtacccgaacagagcccagcgaagcgggtctgttcgggagaggagacgcaagagagcgcagtgagggatggccgtgaggacgtcacgaacggagcggactttgcgtcgacgacgacgggcccatagctcagctggctagagcgcacgactgataatcgtgaggtcggtggttcgagtccacttgggcccaccaccaaaaccctgggggtttagttcagctggtagaacacctgctttgcaagcagggggtcaccggttcgagtccggtaacctccaccaatttaagaatggattttaacactcaagggattgagtgttaaaatctggccttaaaggctggaaggcggcaccttgaaaactgaacaatgtagatcgaaagtacaagagcaagcaacagagggcaaaacagcaatgttgtggaactaagatagaatggcgaaagccgttctagtaagggtaaaaacaatggagctaattgcaaaacttctgtgatgcctgcataattcatgattttgagaacagctcagagatgagactgttctacaaggtcaagctagaaagagcgcaaggggaatgccttggcatcaggagccgacgaaggacgtgacaagctgcgataagctgcggtgagctgcacataagctttgacccgcagatttccgaatggggaaacccggcagagcaatactctgtcagcgtgcgttgaatcaaataggcgtacgcggggaaccgcctgaactgaaacatctaagtagggcgaggaagagaaatcaaccgagattccgctagtagtggcgagcgaacgcggaagagggcaaaccggaggatttatcctccggggttgtggacagttttttagcaactggaactaggagaacggtatgggaaggccggccatagcgggtgatagccccgtatccgaaagggaaggttgtgcgactggatccagagtaccgccggacacgtgaaacccggtgggaagctggggggaccaccctccaaccctaaatactacctgatgaccgatagaggagcagtaccgtgagggaaaggtgaaaaggaccccgggaggggagtgaaagagaacctgaaaccttgtgcttacaagcactcaaagcccgttaaagggtgatgaggtaccttttgtagaatggtccggcgagttattgttactggcaagcttaaggcattcagtgccggaggcgcagggagaccgagtctgaatagggcgtatgaagtcagtggcaatagacccgaaaccgggtgacctatccatgggcaggttgaagtgggggtaaaaccccatggaggaccgaacgcacgcccgttgcaatggtcggcgatgacctgtggatagcggtgaaattccaatcgaactcggagatagctggttctccccgaaatagctttagggctagcgttggcttagattaccggaggtaaagcactgaatgggctaggggccgataaggttactgaaccctatcaaactctgaatgccggataattgatggccagcagtcagtctacgtgagataagtctcgtggacaaaagggaaacagcccagacccacagctaaggtcccaaagatacgctaagtggaaaacgatgtggagttgcgaaaacaaccaggatgttggcttagaagcagccactcattaaaagagtgcgtaatagctcactggtcgagtgactctgcgcggaaaatataacggggctaagcgtaacaccgaagcttgggctgcacagcaatgtgcggggtaggggagcgtcgaatatggggtgaagtcgcagcggaagcagcggtggactgtattcgagtgagaatgccggaatgagtagcgagaattatgtgggaatcataatggccgaaaatctaaggtttcctggggaaggttcgtccgcccagggtaagccgggagctaaggcgaggccgaaaggcgtagtcgatgcacatacggttgaaattccgtagccaccgaaccttaagtacactgacacatggagatagcgggacccgggcgttggttgacccgggcgtaagggaccgaactttagtagggaagtccgcgatgctctgtggcgagaaaaggtgtatggtatgctaaggtgcccgtaccgcaaaccgacacaggtagatgaggagagaatcctaaggccaacgggagaagggttgttaaggaactcggcaaaatgaccccgtaacttcgggataaggggagcctcctacgggaggccgcagcgaataggcccaagcgactgtttaccaaaaacacaggtctctgctaaatcgaaagatgacgtataggggctgacgcctgcccggtgctggaaggttaagaggagatgttagccgcaaggcgaagcattgaatcgaagccccagtaaacggcggccgtaactataacggtcctaaggtagcgaaattccttgtcaggtaagttctgacccgcacgaatggcgtaacgacttgggcgctgtctcaacagcccacccggcgaaattgttgtactggtgaagaagccagttacccgcaactagacggaaagaccccatggagctttactgtagcttaatactggaaatcggtaaatcatgtacaggataggtgggagacttggaagccagggcgtcagctttggtggagtcacccttgggataccacccttgatttgctggttttctaacctgcggccgtgaatccggtcgggggacactgttaggtgggcagtttgactggggcggtcgcctcctaaaaggtaacggaggcgctcaaaggttcgttcagcacggacggaaaccgtgcagtgagtgtaaacgcataaacgagcctaactgcgagaccgacgggtcgagcagtaacgaaagttggagttagtgatccggcggtatgcaagtggaagtgccgtcgctcaacggataaaagctaccctggggataacaggctgatctcccccaagcgtccacagcgacggggaggtttggcacctcgatgtcggctcgtcacatcctggggctgtattcggtcccaagggttcggctgttcgccgattaaagtggcacgcgagctgggttcagaacgtcgtgagacagttcggtccctatctgttgcgggcgtaagagatttgaagggagctgtccttagtacgagaggaccgggatggacgtacctctggtgcaccagttgtcctgccaagggcatagctgggtagctatgtacggacgagataaacgctgaaggcatctaagcgtgaaactccccctaagattagatctctcattcgaaagaagtaaggcacgacgtagactatgtcgttgataggccggaggtggaagcacggtaacgtgtgcagctgaccggtactaataagccgagggcttgaccttaacatggatgattgcaggcgcttgcgaagtgcggaagatttacattgttcggttttgagggtgcagcaccctggatggtggcgacaagcgcctttagctcagctggtagagcaactgactcttaatcagtgggtccccggttcgaatccgtgaaggcgcaccaatggcccgttggtcaagcggctaagacggcggcctctcacgccgcaaacgtgggttcgattcccgcacgggtcaccatcatttttctcttgacaaagaggaagaaaatgaatataatgacttatcgttgagaagaacggtaaggagaagaaagttgttagagtttcttttgcttacttttcttttcgaaggaaagtaagttggtgttgattgcggtgagggtccacccgttcccatcccgaacacggaagttaagctcacctgcgccgaaaatacttgtctggagacggaccgggaagataggtaacgccgacacagaaaacggacttcgtatgaagtccgttttttcttttcttgaagaggagtgagagagcgtgcattattcaggggtgcggcgcggggtgtttgtggatcgcccgaaccgctttatcgcccatgcggagctggatggccagcgggtggtctgccatgtcaaaaataccgggcgctgccgggagctcctcactccaggggcagtcatctacttgcaggagagcgacaacccaaaccggaaaacccgctatgatctgattgcggttgagaagggcgggctgctgatcaacatggatgcccaggcgcccaatcaggtattccgggagtgggccgaaggcggcgggttcctgccggggttgtctctcctgcggccggagacgacctggggaaactctcgctttgatttttactgggagttatccaccgggcggcgcggttttgtggaagtaaagggcgtcacgctggaggaaaacggctatgcccgcttccctgacgcgcctacggaacggggggtcaaacatctggaggagttgatcgcttgtcgggccgagggctatgagacggcggtgtgctttgtgctccagatgtccggcatgcgggaattcgcacctaatgatgacacccatccggcctttggtgcggcgctgcggcgggctgccgcagccgacgtgcagatcctggctcgggagtgcatggtaacgcccgactccatgacgatcgccggagcggtgccggtccgactgtagggctggggcctgtcaatgaatgggaaggagagcaggcttagagctagcctttaaacggagcaaacggggagccgggaacggctcctcttttttgcttgacttatatcgaatatcggtatagtatgattatagcgatattcgacatataagaaggtgagcgcgtggcccgaaaaaggctggaaaccctgaccgagcagatgttttatgttctgctgtccctgcgtggggaacggcacggctacggtatcatgcaggccatcaccgagctcaccggtggccgggtcagcgtgggggcggggaccttgtacgctctgctggagcgctttgagaaagacggactcatccgccgcacccgtacggaggacaaccggaaatactacattctgatgccggagggggagcggacccttcaaaatgaatatgagcgtatcaagaagcaggcggcggacatggagcgggtgcttcaaaaggaggaagagtcatgaagcggcgtttttccctgtttacctatccaatgatggatatgaaggcggcggaggctgaactgaaccgccgggcggcggcgggctggacggcggagtggtgcaggagacaactgggggccgctgggcaaccgcctctggaggggtatgagggtgtgtggcacatccggagcggggagcgaacggagacggctgaccggggagaatcgggatgggtgcttcagcgggggaatacattgtttcggatgaagggcggcgcgcttccagacgagatgtggctggacgaagtgctgtctaggctggagggagagacatgaggaagcaaaagagtatccgctggttccgctacaccgtcgaggatgccaaggcggcccaagcggagctggacgagcaggcggagcggggctgggagctggaggaggtggggctgtttaccgccaccttccggcgtgcggagcgcccccgccggtgctgggtggagcccgcccggtggaagagcgagcggaaaaaggactgggatgcccggtcagactatctgaccctctgcggggaggccggatgggagctgctggaggaggacgggggactgttttacttccgggccaaagaggggaccgaccccgctccgctccagaccgacgaggatgtagagtgggcggacgtgtggaagaaggccctggccgaccaggtgtggagcctgtcctatctggccgtctattggtccatctggaccgtaggggggtacatcagggagcacccccgcatgtgggagctgttcctgtccaatatctccatggccatggcgacccttgtgctgttgtggctgggaatggatctgtttttcgtggtgcgggtgctccgctaccgggcaaaatgccgccaggtggtggcagagggggagccctttcccgtaccacggcggtggggagccagactccgggggatacgcccgctgatagagggagtgctgattgccgtcctcgtcctgtgcctcctgttgagcgttggagaagggcagaccaattatatagacggctattccgcctatacaagggaacagaactccatcgcggccgcatccttcgggtattgccgctatgatcaggaggaaggcgatttgtgggtggagcggatggactgccgcgccggctggctggcggagtggatctgtgaggatttccgggctgcggaaggggacgaaaaacgacttcagcgggaattccaccggcacaggccgacggctctccgggcggtggagctggggttcgaccgggcctggagctattccagcggggaatatgagggcctgattttacgaaatggaaaccaagtgctccgtatcgagggcaatcagattgacctgaccggtgccaaaaccctggcggacatccgcgcctggctggcggaaggggcgtaggggccgatacccacaggcccccgggcgggtgagggcacctgcccctacaggggagcaaatccggcggcagcgctccggcgtgccgccggaaaagcgcgggcggccacaagggacgcccctacggggcgcatatcagactgcggcgtagggccgatgccccacacaagaaagggggaagaatgatgaagaggacgatgaggaaatggttctactttgatgggagcgatgccaagacggcggaggcgtggctcaatcggctgggggcggagggctggcggctgggcagactcagcacatggacggcatgcttctggcagacgggggagagggtacgctgcgccgtgacgacaaggcggcggggggatgaggaattccgcgccctctgccggaacgcgggctggggacttggctcagatggccgggaggctagtggaggcttgcatcccgccatgccctgtgataggataggagcagactggaaatccttctctcaggagtgtgaattacgatggaaaaccttctctttatcaacgcctgcgtgcgtggagagcgctcccgcacgctgaagctggcccggcgctttctggatgcctaccgggcggcccacccggatacggtgatcaccgagcgggatctctgcgccgcccggctccagccacagtacccggaggtgctggccgagcgggacgcgctttggagtgcgggcaagctggagcagcccatgtttgagcccgcctggcagttcgcggcggcggataagctcgtcattgccgcccctttctgggatatgagcttccccgccatcctgaagatctacctggagcgcatctccgtcaccgacctcacctttggctacagcgaggagggggccatggtggggctgtgccgggcctccaagctgctctatatcaccacccggggcggcaactacgccggcacccccatggagacggccacccccgtgctgaaggccctgtgcactatgtacggcatcccggagttccagtgtctggacgccgaggggctggacgatatccgcaacgacaaggaggcgcttctggccgacgccgcccgccgtgcggaggccctggcggaggtgttctgagtgcggccccacatcctgctgctgaccaccgggggcaccatcgcctctctgcccacggcggagggactggcccccggcctggacggggaggccctggccgggctgctcccccagggaattatggactgctacgacatcacgatccgggatatcctccacctggactcctccaacatccagccggaggagtggcagaccatcgcccgccacgtctttgaaaaccggatggagtacagcggcatcgtgattacccacggcaccgacaccatggcctacaccgcctcggtgctctcctttatgctgcggggcatctccatcccggtggtgctcaccggggcccagctccccatggcccaccccctcagcgacggcatggagaatctgcgcaccgccctggccatggcggcctccggcgtgccgggggtgttcctggccttcgaccggaaggtgattctgggctgccgggcggtcaagacccgcaccaccgacttcgatgcctttgagagcgtcaactggcccctggccgccaatgtggacggcaaggggctgcagatccaccgggaggccatccccgcccccgccggagcgtgcgccctgcgggacaagctgtgcgacaaggtattcctcatcaagctcacccccggactcgacccggagatcttcgacatgctgctccagatgcactaccggggcatcgtcatcgaggccttcggcgctggggggctgcacttcgtccggcgggatctgatcgccaagctccaggcggccgcccgggcgggcatgaccgtggtggtgtgctcccagtgcctctacgagcccagcgacttctccgtctacgaggtggggcagagggctctggcccagggggtgatccagggccgggatatgaccaccgaggcggcggtgaccaagctcatgtgggtgctgggccagaccggcgatccggagatcatccgggactacatggagcgctccctggccggggagatggcgtaatcagacagcgcgcggaaagggccctccgccgccggaacttccggcggcggagggccctttttcaagattgtgaagaggaagcggagctgctctgggccagataccactccccccagcggcacatctcgtccagaatgggggcgaggctccggccgaagtcggtgaggctgtactccgtcttgggcggcaccaccggatagacggcgcgccggagcaggccgtcccgctccagctcacggagctgctgggccagcatcttgtcggtggcccgcgggatgcgccggtgcagctcgtggtagcggagggtgcccgcgtccatcaggtgccagaggatcaccgctttatattttccgcccacaaggcgcagggtggcctcaacggggcaggtaaagccgcagcaggggatttccataggggagctcctttccatttgggtagtatctacccgaaaagtacattcttgcgcggaagatggattcggatataatgatagtacaggccggcctgaaatacaacctcgtaaaggagtatccgagatggactttttgaaattggttcgggcgcgctattcggtgcgccaatatcagaaccgtccggtggagccggaaaaggtggagcagcttctggaggcggcccaggcggcccccaccgccgccaattgccagccggtgcgcctgctggtggtggagacgccggacgggcgcagacggctggccggggcggcggagctctacggcgcgcccctggcggtggtggtgtgcgccgaccggagccgggcgtggaagcggccctttgacggcaagcagaccacagacatcgacgcgtccatcctcaccgaccacatgatgctggcggcgtcggccctggggctgggctcggtgtggatctgctacttccagccggaggcggtgaaggcggccctcggcctgccggagcacctggagccggtgaacattctggccgtcggatacgcggacggcgcgcctgccagcccggagcggtggcggacggagcgcattccgctggacgaactggtgctggcgcgggcataggcagacaccccagggatggtcattccatccctggggtgttcaggcggtcaacaggccctcctgcgaaacggttcggagggacggagcgtgtgaaagggaaccgctggggttcccccgcgttggatctgacagcttcttgagcctgcttgaaggttcaaaagcctgccgaaccgattttttcgacaggctgaaacgcccgcccggacaaaatccgggcgggcgcttgtttaggtctgggggagggaggcgcacaggccctccaggtgggcgatccaccgctccagagcgggcagctccggccgggccagggcggcggaatagagggcgtaggcctccggccgggcttcggccagccagcgtaggctcttcttgggcccctggtagggctgccccgccagcaggcagaagatctccaggctgtccactagcacccagtgccagcggaacaggccctctgtgtctccacggccggccctccggagcatcttgcggcaccaggtcgcctgggagcgcagctcctccggggtggggaggggctgcgtcgcccgccaggcccgcacccggtcgatgagggtctgaccccgtccttcggtgtccagcaggagggcggcgtcggccagctggggaaaggcggagggggcaaagggctcgtcgaagcgggagacggggtagacgaacgcgtccagctgcaccgatcccacgacggacatgtcgtggcgctccggcccgccggcggtgagcaccagggcgtcaaagtcgctgtcggggccccaggagccgtcggcataggagccgtaggcgagaatagccaggggagcgtaagccccggtcagataggcgaggacgcccggaggcgtcaggggggaagccatgggagttcactccaatcgattgagaaagtccgcgcactgggcggggctgcggaagatatgcgcctcgcccttccaggcggacagaagctccagcacccggggccgctgggtgcggtggaaatcccagatccagcggatgaacgccgggtccagccgctccgggcagccctcggccatgtcggggcgggtgcgcccgcgccagcgcaggatccgccggagggcccggaacaggcagagccgcctggggtagtccagaaagagcaccgcgtcgcaccgctccagccgccggggcagggtgcgcaggtagttgccgtccatcacccaggcgtcccccgccagggccgcgtccagccgggcgtcgaactccgcgcgggtgcggttgatccacccggacttccaccacagccggtccagatagacggccggcaggcccagcgtttccgccagggcgcgggtgagggtggacttgcccgcgccggggcagccgatgaccagcacccggcgcatcctacatctccctccggccctccagggcgcgcatgagggtggcgtcgtcggcgtactccagatggctgcccaccgggatgccgtaggccaggcgggtgacccgcacctggaagggcttgagcaggcgggagaggtacatggcggtggcctccccctcggtgtccgggttggtggccatgatgacctcccggacatcccccttggccacccggtccaccagctccttcacccggatgtcgtcggggcccacgtggttcatgggggagatcaccccgtggagcacgtgatagaggccggggtactcccgggagcgctccatggccaccacgtccttgggatcggccaccacgcagatgaccgacgtgtcccgcttgggatcctggcagacggcgcacaggccgtccccctcggagaagttctggcacacggggcagcagtggatggccgcctttgcccccacgatggcgtcggcgaaggcggcggcgtcctcctccggcagggagaggacgaagaaggccagccgctgggcggtcttgcggccgatgccggggagccgggcgaactgctccaccagcttttccagggcgggagggaagtactgcatgggtcagtcccccctcagggcggcgatggccgccgccggctcggccgcgccgtacaccgccgagccggccaccagggtgtccgcaccggcggccacgaccgccgcggccgtcttggcgttgatcccgccgtccacctccaggcggcaggaggggttataccgctcaatgagggcgcgcacctggcggatggtgtccagttggtgctccagaaaggcctggccgccgaagccgggctccaccgtcatcaccagcaccatgtccagcccctccaggtaggggagcacggcggagggggcggtgatgggccgcagggccaccgcccttttcaccttgcaggcctccatccgccgcagggcctcggcgatgccggtggggtggtgggcctccaggtggacggagaggagatccgcccccgcctgggcaaaggcctccacatagcgcaccggcttgtcgatcatcaggtgcacgtccagaaacatgccggtgcatttgcggatggactgcaccaccggcacgccaatggtgagattggggacgaagcagccgtccatcacatccacgtgcagccagtcggcggaggacacccggcggatgtcccgctccaggttggcaaaatccgcggagaggatggagggggcaattttaatcatttttttaccactccttgaagggaagttcagaattccgtggtaggataggccccagggctcaaccgggggcggggcaaacggaggagcgggcacataagatacaccaagcggatgacgcccggggccccgccggctctcccccgcgcccacgcggcgccggcccggcggcccatgccccggaggaagcgcgccgcatcatataggcgtatccgggggaagggttcccccggatacgccggtggttccagcacaggccgcgcctgcggggctcagtggtagaagtcgttggtgtggcactcccgggccgcatagcccgcgccgcacagggcgtccagaatggcccgcttgtgggtgtggccgaaggcctccagggtgacacgaagctccacgccggactggcggttgatgttgacgaactggttgtgctccagcttgataatgttgccgttggcctccgccacgagctgggccacccgcagcagctcgccggggcggtcggggagctggacggagaaggtgaacacccgcccccggttgatgaggccgtgctgcaccagggaggccacggtgatgacatccatgttgccgccggagaggacaggcaccacgttcttaccgcggcacttgagatgggagagggcggcgatgggcagcaggcccgcgttctccacgatcatcttgtgcttttccatcatatccaggaaggcgtccaccagctcgtcgtcagggatggtaatgatgtcgtcgatatttttctgaatataggggaaaatttggtcgccgggggttttgacggccacgccgtcggcgatggtctccacccggtccagggtgaccacatggccggcgtccaggctggccttcatggaggccgcgccggagggctccacgccgatgaccgtcacgttggggttgaggagcttggccagggtggacacgccggtggccagtccgccgccgccgatgggcaccagaatcacatccacgtcgggcagatcctgaaagatctcataggaaatggtgccctgcccggtggcgatggccgggtcgttgaaggggtggacgtaggtgagcccctcctcctccgacagcttggcggccagctccgccgcgtcgtcgaaggtctcgccgtggagcaccaccttggccccgtagtccttcgtgttgttgaccttcaccagcggggttgtagtgggcatgacgatggtggcagacaccccggcggcctgggcggcgtaggccacgccctgggcgtggttgcccgcagaggcggtgaccagcccccgggccttctcctcgtcgctgagggtgctgatcttatagtaggcgccccggatcttgtaggccccggtgacctgcatattctccggcttgatatagatctggttgccggtggccttggaaaaggcgggactgtagactagactggtgttgcggatcaccccggacagcacgccgcgggcctccttaaattcctttaatgtcagcatggggcagacttcctctccgtatcataccatatttccttctatcataatgacttttccgcccaaagtcaacgtgttattgacacctggggcggggaaaggtacaatgaagctaacctcgtttttggaggaaatgtcaatggcgaaaattgtgaaaaaatctccggcccccctctatctggcggcggcggtgtggggggcgtgggccgtgctggcccccctgtatgcctggtggcattttgcgctggcggcggcggtctcggcggccgcatggctgggggggcggaagctctttcccgacaaggtgctgatcctgcctgacccggagcccgcgccggagcgggaaccggagcgtgccgcgccggaggacccgctggccgtcgagcgggcgcgggcgctggccgagctgcggcggctggacgagaacatcgaggacgccaagctctccgcccagattgtccacatggaggaggtcaccggcaagatcttcgacatcgtggccgggcagccggccaagctgccccagctccgccggtttctgaactactatctgcccaccaccctcaagctgctcaacgcctatgaccgcatgggggccgccggggtggagggggccaacatcgacggcaccatgggccgcatcgacgccatgatggacaaagtggtggaggcctttgacaagcagctcgacgccctgttcgccgacgaggcgctggatatatccacagacatcaccgttctggagcagatgctggcccaagaggggctcggcggaatgcagatgggacaatcataacaatggaggaactgcgatatggctgacaagacggattttaccccggaactgaccctcactcccaacctggacgccgcagcggcggcggaggcaccccaggcccccgaggcgcccgccctcaccctggaccccaccggggcggtggatgcggccgcggcccagaaggccaaggacgagcaggccatccagctcgacgagagcaagctcaccgaggcggagcggaagatggtggacgactttgccaagcagatcgacctgaccgactccaacgtggtgctccagtacggcgcggcggcccagaagaacatcgccggcttttccgagagcaccctcaactccgtgcgcaccaaggatctgggggagatcggccaggccctgtcctccctggtggtggagctgaagggcttcggcaaggaggaggacgagaagggcatcttcggctttttcaaaaagaagaaaaacgagctggaggccatgaaggtggcctacaccaaggcggaggccaacgtggacaagatcgccgaggtgctggagggccatcaggtgaccctgatgaaggacatcgccatgctggaccagatgtacgagctcaacaccaagtattacaaggagctgaccatgtatattctggcgggcaagaagcgcctgaaccaggtccgcgccaacgagctggagcagctccgccagaaggcggcccagtccggcacccaggaggacgcccaggcctacaacgacctgaccaatatgtgcagccgctttgagaagaagctccacgatctggagctcacccgcatgatctccatccagatgggcccccagacccggctgatccagaacaacgacaccctgatgctggagaagatccagtcctccctggtgaacaccatccccctgtggaagagccagatggtgctctccctgggcctggagcactcacgccaggccaccgcggcccagagcgcggtgaccaacatgaccaacgagctgctgaagaagaacgccgacatgctcaagatgggcaccatcgagaccgcccgggaggccgagcggagcgtggtggatatccagaccctccagcacaccaatgagcagctcatctccaccctggatgaggtcatgaacatccagcgggagggggcccagaagcgccgggaggccgaggccgaactggggagaattgagggccagctcaagcagaagctcctggagctgcggggctaagctccgcccgacacatttgagtgagggaatcccatgaaatttctgaaaacccacaccggcgctatggtggtgctggcggtggtcattgtcctgtccgtcctgctgggctcccaccgctccctggtgcaggccagggagaaggtggaggcgcagtttgcgcccatcgccggtgatctccaggactgcctggacatcaccgccaacctgctcaccgtggcggggcggtacttggacgagggtgagctgggtgagctgacggacagccgggcggccctggcggagagcggcggcatcaccgaggcccacgcggcgtatgagcgcctgctgggagacgcggagaccgtctttctcaagctggaggactgcgccctgagcggacgggacgcggactacgtgaaggggttccgcaccgacctggctgccgagcaggacaccatcgcccgggacggctacaacgccgccgccgaccgctacaacgagcgggtgctggggggcttccccgccagagtgctggggacgctcacctttgtgcgcccggcggagaccttccgatgagaggagcgagaggcatgagacgacagcttgcggcggccctgctgggcgcggctctcctgacggggggagcccaggccgtggcggagcccaccgccgcccgctatgtggcggacgaggcggacgtgctcagcagcgagaccgagcagtacatcattgacaaaaaccagtctctctttgaggacaccggcggcgagatcgtggtggtgtcggtggattttatggacggcatggacgccgccgactacgccatggccgtggcggagagctggggcggcatcggtgacgagagtctgaacaacggctttctgctggtgtacgccgtgggagagaacaaggtgtgggccatggcgggctccggcatcgaagacgccctcccggcctcaaaaatcgagggctggctggaggcggacttctacggcggctacgacgccggagaatacgacagcgccacccgcgcctttttcgacgacgtgtatggctggtatgagagctattatggcacatctgcggggagtgtggtcccgtctgagcccgggcgcgactttgtctattaccctgagccggagaatgactatgtgttcgctgtggtcggacagatggggctgtttctgctgatcctcctggtggtggtcgtggtgtgcgccgccgacggctggcgctaccgccgctaccggcggcgctacctgctgcccggcatgccgcccccgccctatgtctaccggccctttatcttcggccggccccaccggccccgcccgccccggccccccagggggccccgtccgcccatgggcggcggcttccgcccgggtgggggctttcgcggcggcggcgcgggccgctccggaggcggcttctcccgcggaggtgggttccgcagcggcggtagcttccgtggcggcgggttccgcggcggcggagccggacgccgctgatgcagcacacaaccgaaggccccggagcaaagctccggggccttcggcatccgttcggcacatctgtgtgctatactgtcatggaaagggggggggacggccgtggaggcgcaaattctggtggcggaggacgaggagcgtctgcgcaccatcatccgggactactttaccgcccacgggctgacctgtgcgctggcaaaggacggagaggaggccctggagcggctgcgggagcgggactatgacgcggtgctgctggacgtgctcatgcccaacctggacggatttgcagtttgccgggcggtgcgggagggcagcggcgtgcccattctgtttctcactgccctggggggagagaaggatgtgctccgggggtatgccctgggggcggacgactatgtgaccaagcccttctccctggcggtgctgctggccaaaaccgaggcgcttatccgccgcagccggggagggggcgcggagacactcgcctgcggggcgatcaccctggagccgggccgccgggcctgcacggtgggcggccgtccggtggccctcccgcccagagagtacgagctgctgctctgcctgatgcgcaacaagggccaggtgctccgccgggagcagcttctggacaaggtgtggggcatcgacttcgaggggggagaccgggcggtggacggccggatcaaggtcctccgcgccgccctcggcccggcgggaaaacagatcaggacggtcttcaaggtaggctacaagctggagggggagcagcatggggcggattagacggttgttcaaagggacgattccactgttttcagccctctggcttgggatgatgctggtgctgctgtggctcaatgccgaggggcagagcgcacgcatgggggcatctatgcagtcgtaccggtggtcagtggagtaccagtattccgagatctggaatggatctgcggcggagacaaaaaagccggtgattttgacttggcggctgatggaagagccgctgtattccatcggcggtatcacgcagacacgggtgtatgatcgtacgggcagggagctggcccggcggcccatggctatggggacagccagtcccattgggacgggggtttatacctggagcctcctgttggacccggtgctgagcgaggaagaacagctctccctggctgagcggctgcgggccgaaccgggccttggaaattttttcggcacagccggtggattctatgaggagctggagaccgggggactctactgcgaggtggtgggggtggtggacgaggagcgggaggtcatctatcctcagaggctcacctactgctatgctgaccgggagatcaccctggtggacactgacagcggatttttcgacggtagggagttagttacgctccggttcgacggggttcagttgaattctgcgttggtaggcgtgtcggcctccccacgggagctgttacaaaccttccgggcggcagagacaaacctggatgcgctgctgggcggcgacacccccacaacgagccgtgtttccatatcgtctgacggcagtgagtgcgcccccatgagtgatggggagatcatcgtcgccaccgcatatacctgcaatcctctgcgtgtagccctgagggggcaggggcccacagcagtactcacgctgctggcagcggtgggcatggccgtctttacggaccgccgccagcgggaaacgttggagcgggaacgggccttcacccgggcggcggcccatgagctgaagaccccccttgcggtgctccgcacccacgcggaggcgctgagggaggacattgccccggcccggcggggggaatacctggacgtggtgctggacgagagcgaccgcatggccgctctggtgggcagcttgctggagctctcccgcatggaggagggcggggcgctgcaccgggaggtgctggcgatggacgccctggtgcgggcggtctttgaccggctggccctcccactggagcgaaaggggctccacctgaagctgaatctggagcctagacaggtattcggcgaccgggcacggctggagagcgcggtggaaaacctggcctccaatgccctgcggtatacgccggaggggggcgcggtgtcggtgcggctggaacgggcaggcggctggctccgcttggcggtggacaacgacggccccagtctcaccacccaggagctgacccacctgtttgagccattctaccggggggatgcggcccgcagccgcgctactgggggtacggggctggggctggccattgtcaggacggcggcggcagcccacggggggacctgctgggcggagaaccgggcgggaggcgtgcggatctggatggagctgccggccttgcaatcagtctagcggtatgatatgatatcttcacaaataaaatgagaatgtgagggatcgcgatgggcttcaaccgacccgaggcaaaacggctggccaaggcagccatgcggaataccaaccccaaccccatgctggtgaccctggtctttgtcctgttgaccaccggagtgagctatctggtgggacttgtgctgacaaacccgatctatgatgcgctctatacggcatatctgtacctgctggacggggcctacgacccgatgttcatcttcaagagtctgctgtcgcccggtatggtggcagtgtatatgctggtttcgctgctgctcaatgtatacttctgggtgatgaacttcggctatgcatcctacgccctgcggatggcgcggggggagcagccgggctaccggcggctgtttgacggctttgcggccctgggccgggctattctggtcagtctgctgacctccattttcctcagcctgtggggcctgctgttcatggtgccctatatggtggtgatgatccttgccgccctgctggggagcatggggctgatgatgctggccatccttctgctcatcggcggtatggtgatgatggtcattttcggttaccgctaccgcctggccacctattttctgctggatcaccccgagatgggcgcattggaatccatcactcagagcaagcaggcgatgaaggggtggaagggggagctgttcattttagactggtcctttttcggctggctcctcctggtggcgttggtggagctggtggggatcggcctgggcacgctgttcagccccgctctgggcacattgctgggtacggtggctgcgggggcgttcagcctgtggctcaacccctacatgaacggcacggaggccaacttctacgactgggtgacccatggctccctctcctacggggagaacaacggcccaggcggctaccagagcccctacggcaacaacactccggaactataatcaaaagctccctcggggtttgaccccgagggagcttttggttattccagaacggcgccccgggcggcggaggtgaccaatttcgcataccgggccagatagccggtcttgatcttgggttcggggcagatccacttggcccgccgggcggccagggtggcctcgtccacctggagctcgattttgcaggcggggatatcgatggaaatgatgtccccctcctccaccaggccgatggggccgccctgggcggcctcggggcagacgtggccgatggaggccccgcgggtggcgccggagaagcggccgtcggtgatgagggccaccgactcgcccagccccatgccgcagatggcggaggtggggttgagcatctcccgcatacccgggccgcccttggggccctcgtagcggatcaccaccacgtcgccggggacgatcttcccggcgtagatggcctcgatggcctcctcctcggagttgaagacccgggcggggccggtgtggagcatcatctcaggggccacggcggagcgcttcaccacgcagccctcgggggccaggttgcccttgagcacggcgatgccgccgtcggcggagtaggggttctcgatggggcggatcagctcagggttgcggttgaccacgccctccaggttctcggccagggtctttccggtgcaggtgagcacgctggtgtccagcaggcccttcttcgtcagctccttcatgacggcgtacacgccgcccgcgccctccagatcctccatataggtatccccggcgggggcaagatggcacaggttgggggttttggaggagatctcgttggacagatccagatccagctcgatgccgcactcgtgggcgatggcgggcaggtggagcatggtgtttgtggagcagcccagggccatgtccaccgtctcggcgttgtggaaggcggcgggggtcatgatgtcccgggggcggatgtttttcgccaccagatccatgatctgcataccggcatgcttggccaggcgcagccgggccgaccacacggcagggatggtgccgttgccccgcaggcccataccgatggcctcggtgagacagttcatggagttggcggtatacatgccggagcaagagccgcaggtggggcatgcgttgttttcatagtcctccacgccagcctcgtccagcttgcccgccttataggccccgaccgcctcaaacatgtggctcaggcaggagcggcgtccgtcctccagccgcccggccagcatggggccgccggagcagaagatggtggggacgttcacccgtgcggcggccatgagcaggccgggcacgttcttgtcgcagttagggatcatcaccagcccgtcgaactggtgggcgatggccatggcctcggtggagtcggcaatgagatcccgggtgacaagggagtacttcatgccgatgtggcccatggcgatgccgtcgcacacggcgatggcggggaactccaccggcgtgccgccggcggcgcggacgcccgccttgacggcctcggcgatcttgtccaggttcatgtggccggggacgatctcgttgtaggagcacaccacgccgatgagggggcgctccagctcctccttggtgtagcccagggcgtagaacagggagcggttgggggcgcgctccacgcccttcgtcacgttgtcgctgcgcataagtaaaatctccttcgcaattttacgcggtaaagtatagtggtattatagcacaagggccgggcggtgacaacgcggaatttgtgcggcccccctgccgcaaaaaagcaaccccgtccgcagggcggacagggctgctttttggatgtatggaaggacttagtgagggatgcgctggcacttcttgggggtcacgcaggtaccctcggcgatggcgaccacaatgggctcagccaggaaatcggcggcggagtcgctgatgtcggggcggggcacggccaccttgcgggcctcgaacttcatcttgcgggaggtgttgccgatgtgggtgatctcaccgtaggcctcgatgaagtcgccggcgtacacaggggccttgaactcaatgttgttgtaggcacagaacaggccctcatcgccgtcacactggatcagcagctcggtggccacatcgccgaacaggtgcaccatatgcgcgccgtccaccaggttgccgccatagtgtgcgtccttcgcggacatgcgcaggcggatcagcgaagtatacttcttctcttccatgtcaattccactcctaaacgtattttgtgaaagaagacgaaaaatggaaccggaattccctacctattgtacgtccgatcgaggggcttgtcaacagcgggtttcccgaatggaggctcactccaggcggagatgggcccgccgcagggccgcccggatggccagacacaggggcggcgcggcggcgatggccgccgccgcgttgaagagggaggcggggattttcagggggagcagcagggccgctgcggcaaagggcaggccgcccaccagcatgttgtcatagaacagggacttggagaagtagagcaggtaataggtcaggcagccaaccagtgaggaggccagacagcggcggtaggaggccgtctctcgctgttccggagtgcggaacaccagcccagccgccaagcccatcgcgcccttggtgagaaaggtgagccagcactctggggcaaagatagggttggtcaggtcgtagagggcggagcccaggccggaagccaggccgcccaagggccccaggagcataccagacagtacgcaggcaatgttggccagggtgaaggaggtctccccggtgggcagggggatgatgatgcggggaaaattgacggcgaagaccacggcggtcatcatggccagcacagccagccggtgggggttcatggcgttctttttcatggcgaacacttccaatcctcttggtgtgtccccattatagcgggaaactgacattgtttcaaacatcagatttgaaaaaaagaataagaccagaggggggcgaaaaagggccgccgcggatgcggcggccctcgtgatcaatagcggccgaagtcgccggaacggccctcggtgacatcggagccgaactcgtagtccttgccaggcaggatagcgttgagggcgatacccgcgatggcggcgatggccagattagtcagggtcacatgggcgccgcccaccgggaaggtaattccgccggagaagcccaggccgcacaccaggatgacagcggcgatgatcaggttgcgggagttggtgaagtccacccggttttccaccacgttgcgcacgccgatggcggagatcatgccgtacaggatgaaggacacgccgccgatgatggcggtggggatggagttgaccagggcggcgaaggcaggggagaaggagagcaccaccgcgtacactgctgccaggcgcaccaccttgggatcgtatacacgggagaggaccagcacgccggtgttctcaccgtaagtggtgttggccgggccgccgaacaggccggccagggaggtggcgatgccgtccccgatgagggtgcggtggagaccggggcgctccaggaagttctcgcccacggttgcggagatggcggacatgtcgccgatgtgctccatcatggcagccacggcaatgggggccatgaccagaatggaggtcacatcaaacctggcgatcgagccggtgaagtcggtgaagaagggttgcaggccgataggagcggcagccgtcacggcggaaaagtccatcagggggatcaccgagccggaggcgtccactgctgtggcccccagggcattggcggccacagccaccagataggggatcaccacgcccagaaggatggggatgatcttaaccatacccttcccccagatgttggctgcgacgatgaccgcgatggacaggagggccagccaccagcaggaggaggcgttgcttaccgcgttaggggccaggttgaggccgatgaggatgatgatgggcccggtgaccacaggaggcaggaagcgcatgaccttctttacgccgaccagtttgatgacggcggccagaatcacatagagcaggccggccactacaatgccgccgcaggcgtactggagcttgacggagggctccattgtggcataggcgccggaatccagggcggccacggcggagaagccgcccagataggcgaaagaggagcccaaaaaggcgggtaccttcaggcgggtgcaaatatggaagaagagggtgccgatgccggcgaaaaacagagtggtctggatggacaggggcaggccgtagccctggaccagaatggggaccaggacggtggcgccgaacatggcgaacaggtgctggaggcccagcaccagcatcttgggcaggccaagcgtccgggcgtcatagatgggctcgcttccgggggtggatttgtgactcatacgtgtctcctctctcgtttgggcattgggcagaaaaaaagcaattgctttttcaacgaaaaagcaattgctttagagaaatggaatggagatacccaggtgaagccaaagaaacatccggtactccatgttccattcctcctgccgccgccaaatttcactctatgatatcagaaatccggtcgtttggcaagaaaaagtttttcctccgcccggccgggtggaggaaaaaccgggcgagtacgtccccggtacggcgggggcgtttcttacagcatccgcttgaggtaccggccggtataggaggcttcgcaggcggccacctcctctggagtacccgtcacgacgatgttgccgccgccgtcgccaatccccacgcggcaggccgcgcgggggccccggattgattttatctgctcgggcggagtgaatccgcccggcatcaaggttttgccagaggcaaaacgcttggtgggcagcgccggcggccgctttttacagcatccgcttgaggtactgcccggtgtaggaggcggcacactgcgccacctcctcgggggtgccggtgacgacgatattgccgccgccgtcgccgccctcggggccgaggtcgatgatgtggtcggcagtcttgatcacgtccaggttgtgctcgatgaccaccaccgtgttgcccacgtccaccagcttctggagcacctcaatgagcttgtgcacgtcggcggtgtgcaggccggtggtgggctcgtccaggatatagatggtcttgccggtggagcgcttggccagctcggtggccagcttgacccgctgggcctcgccgccggacagggtggtggagggctggcccagcttgacgtagctcaggcccacctcgtagagggtctggagcttgttgtatagccgggggaggttctcaaagaaggggagggcctcctccaccgtcatctccagcacctcatagatgttcttgcctttgtagcgcacctccagggtctcccggttgtaccgcttgcccttgcacacctcgcagggcacgtagatgtcggggaggaagtgcatctcgattttcagcaggccgtcgccctggcaggcctcgcagcgcccgccccggacgttgaaggagaagcggcccgggccgtagcccctggccttggcgtcggaggtggaggcgaacagatcacggatgtcgttgaacaggccggtataggtggccgggttggagcggggggtgcggccgatgggggactggtcaatgtcgatgactttatccaggaactcctccccctcgatgcccgcgtgctttccaggccgggtcttggcccggttcaggtcggcggccagccgcttgaacaggatctcgttgaccagggaggacttgccggaaccggacacgccggtgacgcaggtgaaggtgcccagggggatggacacgtccacgccccgcaggttgttctccgccgcgccccggatggtgaggaagttcccgctgcccttgcggcgctcggtggggacggggatccttttgcggccggacaggtagtcgccggtgatggagccgggggtgttcatgacctcttcggcggtgccggcggccaccacctcgccgccgtggacgccggcgccggggccgatgtccacgatatagtcggccgcccgcatggtgtcctcgtcgtgctctaccaccagcagggtgttgcccaggtcccgaaggtgcttcatggtgtccagcagcatgtcgttgtcccgctggtgcaggccgatggacggctcgtccagaatatagagcacccccatgagggaggaaccgatctgggtggccaggcggatgcgctggctctcgccgccggacagggtggcggcagcccggctcagggtcaggtactggagccccacactctggaggaagccaaggcggttcttgatctccttgaggatgcggtcggcgatgaggtgcttctggggggtgagctccaggccgtccacgaaggccagggcgtcgttcaccgacttgcggcagaaggcgtcgatgctgataccccccaccgtgacggccagggcctccttccgcaggcgcttgccgccgcagtcggggcagggccgctcagccatgcactcctccagatcccggcgcatggcgtcgctctgggtctcccggtagcggcgctccaggttgttgaccacgccctcgaaggcctgcatcagggtgcccttgccgttctcccggtcgtaggtcagcttgagcttctcccccttggtgccgtagaggatcacgtccatgacctcctccggcagttcctccaccggggtggtgagcttgaagccgtatttcttggagagggcctcaaagtacatgcgggagatggagtcacccttgatgttgttccagccggaggcggtgatggcgccctccaggatggagagcttcctgttggggatgatgaggtcgggatccaccttgagctgggcgcccaggccggtgcaggtgggacaggcgccgtaggggttgttgaaggagaacatgcggggggagagctcctcgatggagatgccgcagtcttcgcaggcgtagttctgggaaaagaggatgtcccggtcttcgtccacaatgttgatgaccaccaggccgccggccagggcggcggcggtctccacgctgtcggtgaggcggcggtgaatgtcctccttgatgaccagccggtccaccacaatctcgatgttgtgcttcttgttcttgtccagggggatctcctcggtgagatcgtagagcgagccgtcggcccggcagcggacatagcccgacttgcgggtgtcctccagcagcttctggtgggtgcccttcttgccccgcaccaccggggccatgatctggatgcgggtggcctcgggcagggccatcacctggtcgatgatctggtcgatggtctgctgctggatctccttgccgcacttggggcagtggggggtgcccacccgcgcccacagcaggcggaggtagtcgtagatctccgtcaccgtgcccacggtggagcgggggttcttggaggtggtcttctggtcgatggagatggcgggggacaggccgtcgatgtagtccacgtccggcttctccatctggcccaggaacatgcgggcgtaggaggagagggactccacatagcggcgctggccctcggcgtagatggtgtcaaaggccagggaggacttgcccgagccggacaggccggtgagcaccaccagcttgtcccggggaatgtccacgtcgatgtttttcaggttgttctcccgcgcgcctttgacgaaaatatggtcgagcatacgtgtggttctcctttgttcaggggtttacaggggctgttcgccgggccggggcggccgggcatggcggacgagatcctcccgcacggccccccatttccggtagttttcccggccctgccgcagggtcattccccggttttcgtcgctgggggcgtcctcgtccgggtcgaacacgtcgttctcccagaagcacaccgggcagatgtaggcaatggcctcctctttggggacaggaaaggtgaggcacccgcagcaggggcaggggtagctccctgccggcccctccggctccggctcaagcggctccggagtgcaggacgggccgtcggacggggagggcacagagcaggcgttggtggcctggggcagatagaagaatttttctgttttgtccatagaacggcatcctctgggtcagggggcgaacacgggacgaaatacatacgcccacagggcccacagcagaagggcggagcccagccccccggcggatacgcgcacccacctgggcggtctgagccagacggccagggcgataagggcgaaggccgcaagccccagcagaaaaggggcgtacatgaccagcaatgtgtcccagcccatatcccaccggcccatgttcagtacccgaacaccttggccacgccctccagcatgtcgcggatgggcaggccgtaggggcagcgcttctcgcaggcgccgcacatgacgcaggagccggcgtggtagggcatagccttgtaacgctgctcggcccagccggccaggccgtacttgcgggcgtagttggccatcagaaagttggaggggatgtcaatgccgttggggcagggggcgcagtagccgcaccggcggcagaactgggtgcccagctccttccgcacggcgtcgcaccgggccagctcttccgcggtcaggggggcggcaaggtccacagaggcgttgcggtccacttcctcaggggagcccatgccgggaatcatgatgtcgatgaccccggaggcggcgatgtaccgcagggccagctcccagtcgtccaggttgccgccggccagaggcttcatggcgatggtgccgatgcccttctcccgggccagggccagcacgtcccgcccctgatcctccacaatattataggggaacataacggtttcaatgcggtcggcgtagtcctccaccaaaattttaagcgcatcagcgctgtgggcggtgacgccgatgtggccgatcttcccggcctccctggccgccgtcagggcctcgtaggcgccgccggggccgaataccttctcaatgtccttctccggcaggttgtggagctgatacaggtcgatgtagccggtgcgcaggttgcgcaggctggtctccacgtcggcggccatggaggcggcgtcccggctcatgctcttggttgccaggataaacttgtcccggcggccctccagcgcggcgcccagatactcctcggagacggtatagccccgggcggtgtcgatgtagttgatgccgtactcctccagcttatctaccacagccttggtgttggccccgtcggcccgctggatggggataccgccaaaggagactacagcggccttcaggccggtcttgcccagtgtcacatagttcataatccatacctcttattccatgcccggctcacgccggacgtatttgggaagtctttccgccgccggacgggggaacaggccgccggccggccggtcaagtcatacataatagcagtcctcgcgccatttccggggattggcatcaatgtagctccagatgcgccggtagtccgcctcgccgcggatgacgtggtcgtgaaaggatttctgccagaggggaatgcccgcccgcttggcggcggcccgtttcatagagccggtcacggtggagagcggctttgtaggggcggatattatccgcccgtccggctccgcaagcgccagaatcaggtgaatatgattgggcatgacgacgaatttatccagcgcaacattggggtagtgcgccgggatggcgcggatggcctcatctaccacacggccaatggaggaaagctgaataccctgcggcgggcggatgatatccgcccctacggacggctgccagaaaagcggctgtttgtcttttgtgcagagggtgatgaaataatagcccgcctggctgtaatcatagtttggcagccggttcggcttccgtctgggcagcgccatgcccctcacccatgtccccgcagctcgatgatgcggtcgcgcaggacggcggcgtactcgaattccagccgcttggacgcctcccgcatctccttctccagctcggcgatggcagcctccctctcctttttggagagggccttctgagagtggggcagctcgtccttgtcgccggacaggtcgatcacgtcgcggacggacttgatgaccgtcttgggcacgatgccgtgctcccggttgaaggcgtcctgcttggcccggcggcgctcggtctcgtcgatggcccggcgcatggagggggtgatggagtcggcgtacatgaccaccaggccgtcggcgttgcgggcggcccggccgatggtctggatgagggaggtctccgaccggaggaagccctccttgtcggcgtccaggatggccaccagggacacctccggcagatccaggccctcacggagcaggttgatgcccaccagcacgtcgaaggtgcccaggcgcaggtcgcggatgatctccatgcgctcaatggtgtcgatgtcgtggtgcatgtagcgcaccttgatgccggcgttggtcagataggcggtgagatcctccgccatcttcttggtgagggtggtgaccagcacccgttccgagcgggcggtgcgggcgttgatctcgccgatgaggtcgtcgatctgcccctccacgggccgcacctcgattttggggtccaggaggccggtggggcggatcacctgctccacgatctggccggagcgctcccgctcatagtcgccgggggtggcggagacgtacaccacctggttgagccgcttctgaaattcgtcaaacttcagcggccggttgtcgaaggcgcagggcaggcggaagccgtagtccaccagagaggtcttgcgggccttgtcgccgttgtacatggcccgcacctggggaagggtgacgtggctctcgtcgatgaaaaggacgaaatccttggggaagtagtccagcagggtgtgggggggcgagccgggggcgcggccctcaatgacccggctgtagttctcaatgccggtgcagtaacccagctcctgcatcatctctacgtcgtacatggtacgctgcttgatgcgctgggcctcgataagctggttgttggcctggaagaaggccacccgctcctccaactcccggtagatctcctggacggcggcgtccatcttctccttgggggtgacatagtgggtggcgggccagatggggatggtctccagccgccggatgaccgcaccggtgaccacgttgatctcgctgatacggtcgatctcgtcgccgaagaactccacccggatggcggagtccttccagtaggcggggaagatctccaccgtgtccccccgcacccggaacatgttgcgctcaaaagcgatgtcgttgcgctcatagcggatggacaccagctttttcagtagctcctcccgttccatctgggttcccacccgcagggagaccatcatcttggcgaagtcctccggctcgcccaggccgtagatgcaggataccgaggacaccacgatcacgtcccgccgctccatcagggaggcggtggccgccagccgcagccggtcgatctcctcgttcaccgccgagtccttctcaatgaaggtgtcggtgtgggggatataggcctcgggctggtagtagtcgtagtaggacacaaaatactctaccgcgttgttagggaaaaattccttaaactcggcgcagagctgggccgccagggtcttgttgtgggccagcaccagggtgggccgctgcaccgcctcgatgaccttggccatggtgaaggtcttgcccgaaccggtgacgccaagaagggtctgctcatccagaccgttctcaatgcccgccgccagggcggcgatggcctccggctggtcaccggcgggctgatattcgctgacaacttgaaatttagacatagcgctgtctcacctcacaggtcgggaaatcggaacggcggccagccgcgcgcagaagcgcgccgccgccctacggcgtccaagcgttttgcgaagcaaaaccttgtccagacggaattcagttccgtctggaggaatagaaaaacagggctcccggcggattcatccgccgggatacgccggcgggctgatattcgctgactacttggaatttgggcataccgtcacctcacagggtaattatagcaaaacaaatgttcgatttcaactgagaattttagaacctgcctttttacggctggtaaaagccgctgtcccggagagacaccatgtcgtcgtccacaaagatcaggtggtctaccagctcaacgccgagtttggccagaaaaggggccaggctgcgggtggtggcgatgtcatcctccgagggaaaggcgatgccggagacgtggttgtgggccagcaccacagcagcggcgttgagggcgagggcggcctcggtgatgagacgggtggtaatagccacggcgttgacgttcccctcacccagccgtcggatgcccagcaccttgtgcttgccgtccatgcacagcaggcagagcagctcgttccgggccccgaagaaatagggccgcaggagctggtagtagtcccggctgttccgggcgatgtcgtctacccgggtgcgggcggtgaggtagcggccggacagctctttcactgtcttgagcagcaccgccccatgcttccccatgcccttgaccttgcacagctcctccggcggggcgtccaacaccccggccagggagccgaaacggtcgatcagttcgtgggccaggggattggtgtcgctgcggggattggcgtagaagaacagcagctccagcagcttgtggtccgggaaggagtccggccgggccagaaattcggttttcagacgctggcggtgtccgtcgtgggggcccatggctgaagatctcctttcctgtggattcaagcaggcggatgagggcatccgcctccctcctgtcctcggagccgtagctcttaccgggcgccgtactgctccagataggcctccatcctgcccttcatctcgtcgtcaatatacaccctgccgtcgagctcacggttgtggaggaaggcgatgatctcccggacggtgacgatggggtagacggcgatgccgtagtcctcccgcagctcgtccagggtggagcaggcccgggtgccccgctccatccggtccacggagacgataagggcgcgcatctttacgtcggccacatgctggaacagctcgatggactcccgtacggcggtgccggcggtgaccacgtcctctacgatcaccacccggtcgccgtcctggggcttgcagcccaccatgacgccgccctcgccgtggtccttggcctccttgcggttgaagcagtaggggagatcccgcccataattgcggtacagggaggcggcggcggagacggccagggggatgcccttgtaggcggggccgaagaggcagtccaccccgtcggggaggttctgctggatgcaggcggcgtagtagtcgcccagcttggcggcctgggcgccggtcttgtagttgccggtattgatgaagtagggagtcctgcggccggacttggtggtaaagtctccgaaggtgagtacgccggcgcgcaccataaaggtgatgaattcttcctgataggtcatgttcccaaacctcgcttctccaaaaatagtcgaattattataccactattcaggggcgcggacaaggccgtgtctgcggaaagaaatttggaatttcactcttttttaatgttattttacccgggcgtatggtacaataccaaagacttcacagatgaacagatgaggtgttgcagttggaactctttgaatggatgacctccaccacctggggcgagagcctgcttaccctgctggtgtccatggtgccggtgatcgagctgcggggcggagtccccttcggcaccgccttggggctggcccccctccacgcactggtggtatgcatcatcggcaatatgctccccatcccctttattatcgtatatatccgccggatctttcactggatgcgccgcagatcccccaggctcaacgctctggtggacaagctggagaagaaggcccacctgaaggggcaaaaggtaacgaagtacaaatacatcggcctgtggctctttgtggccatccccctgcccggcacgggggcgtggacgggggcgctgatcgcggccctgctggatatgcccctgcgcaagtccattccctccatcttcctgggggtggtcaccgcggggctgattatgacctttgtcacggggggcgtggtggcgattttcgcctcctgagcgcctttttctcagctccggcatagaatggcccggaggtgagcgaaaatgaacgcgatttggcaagtgctcctggccctgctggcggcggtgggcctgctggccctgggctggctgaccttcggccgcctgctgaccccggtggggggcggcgggggcggtccggtgtacgcggtggtgcccgcgtctggggacggggcccacctggaacaggacgtgaagggtctgctctggctgcggggcggcgagctggcccgcttcaccatcgtcatcgccgacggcgggctggacggtacggggcgggcggtggccgcggccctgctggcccgcggccaggggatcgtcctctgcccggcggagcggctgggggagtacatcaaggcatgaaaagggtccgccggccggcggacttttttctgcgcgcaggggccgggcggcgcatttccggcgcggcaaagcggacgaaactgcgtttgccggtcgacaaatcggggcacagatgatatgatatcccgtgagaaaagggagggagcagcatccatgcaggaggcggaactgacttacatcgagggcaccgtggatgccgtcatctatcagaaccgggagaacggctacacggtgctccgcctggacgcgggggaggggcgggggctcaccgttgtggggtgcctgcccggcgtggcgccgggtgagagcatctcagtccaggggacatggatgcaccacgcctcctacggggagcagttcaaggccgagacggtggagcggcggatgcccgcaggcaccaaggccatctttgactacctggcctccggcgcggtgcggggcatcggcgccgccaccgcccggcggatggtggaggagttcggggaggaggccctgacggtgctggaggagcaccctgagcggctcactcagatcaagggcatcacccgcaagcgggccctggccatgggggagcacttccggcagcagatgggcatgcgccgcctgctggagtttctgggggagcatgaggtgcccctccagttggccatgcccctctaccgcaagtacggcgaccgggccctggagatcatccggggcaacccctatctgctggtggaccgggagctgggggtggacttttccaacgccgacgcgctggccctgtccatgggcatggagggggacgacccccagcggctggaggcggggctgctcttcgagctgacccacaacctggacaacggccacacctttctcccccggcgcaagctgctgcccgccacggcccagctcatcggtgtgggggaggaggccctggaggaggcgctggaggccctgctggagcggggcgaggtggtggaggagccggtggccggggagcaggccgtctacctccacgacctttgtgaagcggagcagtacgtggccttccggctgtgggagctggcggcgggggagatcgtggccccccatgggctggaggaactcatcgaccgcatccaggccgagcagggcatcacctatgccccacagcagcgccaggcagtggagctggccgccaccagccaggtgatgctcctcaccggcggaccgggcaccggcaagaccacctccctgcgtggagtgctggccctgttcgatgccctggggctggagaccgccctggccgcccccacggggcgggccgccaagcggctgggggagctgtgcggcgcggaggggaccacgatccaccgccttctggagacccagtacgacccccactccggccggctggtgtttgcccacgatgaaagcgacccgctgaaggccgacgcggtgatcgtggacgagacctccatggtggatatcaccctcatgcacggcctgctgtccgccctgcggccggagtgccggctgatcctggtgggcgaccccgaccaactgcccagcgtggggccgggcaacctgttctccgaccttatccgcagcggggtgatccccatggtgcgcctgaccgagatcttccggcaggccgccgagagcgccatcgtccgcagcgcccacggggtcaaccggggggagctgcccgacctgcgggacaacaagcacgacttcttcttcctccgccgcaaggagccggcccgggcggcggagaccatcgtggagctggtgaagacccggctgcccaacaacatgggcatcccgccggagcagatccaggtgctctcccccacccgcaagcggacggcgggcaccgcgtcgctgaaccgggccatccaggaggcggtgaacccgcccggccccgaccggccggagcgccgcttcggcgagtacatattccgccggggcgaccgggtgatgcaggtgcgcaacaactacgatgtggtctggaaggacggcctcacctccggcatgggggtgttcaacggggatatcggccaggtggtggaggtggacaaccgggccgagctcctcacggtggactttgacggccgccgggttgaatatacccctgatatgctgggggagctggagcccgcctacgccattacggtgcacaaggcccagggcagcgagtaccgggcggtgatcctggcggtgtgcgagggggcgcccatgctcctgacccggggggtgctctacaccgccatcacccgggccagggagctcctgatcctggtgggggacgaggacgtggtggcccacatgaccgccaacgaccgccagcagcggcgctactccggcctgcgctggcgtctggcccagctggccaacgggtgaggctccacccaccccgtttgggctgcgaaaaagaagaacttaatatgcacgcataagtgcaaagtgcgtgcacaaaccgataccatcaccctgaaaggtggtgtcaatatgaagcgagacaagcacctcggcatccgcatggacagccagctccacaagaagctggtctacattgcggagtatgagggacgctccctcaactggcaggtcatccacctcatccaagagtgcgtccgcgccttcgagcgggagcacggtccgattccggacgaggagctgtcatgagcgggccggtgggggtcctgctggatctgctcttcccgcccaaatgcgtgttctgcgggcggctgctcacctcgggggagcgggacttctgtgcccgctgccagcgggagctgccctggctggaggggccggaggcggagcagacgggggagtttttcaccctgtgcgcgtcgcccctggcctaccgggaccaggtacgggattccatccggcgctacaaattcaaagggcggcagggctaccacaaggcctacggccgcttagtggcccagtgcgtccacgaccatctggacgggcggtgggacctcatcacctgggtgcccctctccgaccagaggaggagggagcggggctacgaccaggcgttcctgctggccagcgccgcggcgctggagctgggggaggtggcggtggagacgctgcgcaaggggcgcaacaccgaggcccagtccggcctggacggcgacgcggcccgccgggccaatgtgctgggggcctacaccgccgtggacgcagagctggtggagggcaaacgggtgctcctcatcgacgacgtgatcaccaccggcgcgactatttcagaatgtgcaaggattctgcgcaccgtgggggccagagaggtggtatgcgccaccttggcccgggcgagagaccagaaatagagaaagtttgtggaaattagcgttgaaataggtcggatacttcggtataatataggggattattcatgaaattctgggataaactaaaacaaaagctttcaagacttcgaggtgcgggtatgttcagtaaggatatcggaatcgacctgggtacggcgtctatcctggtctacgtcaaaggcaagggcgtggtgctgcgggagccctccgtggtggccatcgacaagaacacgggcaagctgctcaaggtgggcaccgaggcgcagcagatgctgggccgtacccccggcaacatcgtcgccatccgccctctgcgggagggcgtcatctccgactacgacatgaccgagcggatgctcaaggagttcatccgcaaggtgacttccttccggctgttcaaaccccgcatcgtcatctgcgtcccctccggcatcaccgaggtggaggagcgcgccgtcatcgacgcgggcatccaggcgggcgcccggcgggtctatctgattgaggagcccgtggccgccgccatcggcgcgggcatcgacatcgccaagcccgacggccacatgatcgtggacatcggcggcggcaccaccgacatcgcggtcatctccctgtccggcatcgtggagtccacctccatcaagatcgccggcgaccagttcgacgaggccatcgtgaagtacatacggcgcaagcacaatgtactcatcggtgagcggacggcggaggagctgaagatgcagatcggctgcgtcttcccccgcccggaggagcagacggtggagatcaagggccgctgcctcatgaccggcctgccccgggtgttctctgtgtcctccagcgagatgatcgaggccttcgaggaggtctccacccgcatcctggaggccatccacggcgtgctggagcgcacgcctcccgagctggtggccgatatctccaccaacggcatctgcatgaccggtggcggctccctggtctggggcttcgacaagctcatcgagtcccacaccggcatcgagacccatgtggccgacgacgccatctcctgcgtggcctacggcactggcaagagtctggacgacgtggactccatgcaggacggcaccatcaacctctcccgcagaaagcagatgaactgaagaataaaacagcacgcccggccaagcggccgggcgtgctgttttacgctgtgttgcggctcagccctcccgcagcagggcctcgcccacggtgaaaatgtcgccggcgcctacggtgaggatcagatcgccgggccgggccagcgcccgcagccgctccgtcacctcgggcagcgtggcatagtactcactgccggggatgcgcgccgccagatccttggaggagatgccgatgtcgttgacctcgcgggcggcgtagatctccgccagaagggtgatgtcgggcgcgcggagcgcctccacaaagtcgttgaacagggcgtgggtgcgggtataggtgtggggctggaaggcgcagatgacccgctcatagcccagggtgcgggcggcggagagcagggcgtggagctcaccggggtggtgggcgtagtcgtcgtacacctccgccccgtggtaggtgcccttgtgctcgaagcggcggcccgccccccggaaggcggccaggccctcggagacggcctccggctccaccgccagggcgatggcggcggcggcggcggccagggcgttctttacgttgtgctcgccgggcacccgcagggccacgtgggtgaacacatccccccggtacaccacgtcgaaggagggcaggccccggttccaggcgaggttggcggcgcggacgtcgccatgctccaggccgaaggtgaggacgggccgctcctccccctccagggtgtgcatggtgttggcgtcgtcggcattggccacaatgacgccgctctccggtacccggtcggcgaaggcgcggaaggagtgctccacgtcgtccagatccttgaagaagtccaggtgatcggcctcgatgttgaggatcaccgccacggtggggaagaaggagaggaaggagttgcagtactcgcagctctccaggatgatggtgtccccgtggcccacccggtagccggagcccagcaggggcagggtgccaccgatcatcaccgtggggtccatccgggcggccatgatgatgtgggtgcacatggaggtagtggtggtcttgccgtgggtgcccgcgatgcacagggcgttcttgtagcccttcatgatggcgccccaggcctgggcccgctcaaagacggggatgcccgtggcacgggcggcggcgatttcgggattttcgtcgtggacggcggcggtgcggatcaccagctccgccccctggacgttctcccaccggtggccgatggccacggggatgcccagggcgcgcaggtgctccaccgtggcgctgttgcgcatgtccgagccggtgatcaccatgcccgccttgtggagcacctcggccaggggggacatggacaccccgccgatgcccaccaggtgggccctgcggccgggggcgatgtagtcgtgaatattggcgcttgccatggggtttacacaccctttgctctagtttataataagttccaaacacaatattataaaccattataggcaaatagcaagaaaaagataccagaaggaggcggaaaaatgaagggatggcccattccggcgggagtgggggggtgcctggacacgttgcggcggacaggacacgcggcctacccggtggggggctgcgtgcgggatctgctgctgggccggacgccgggggatttcgatgtgtgcaccgacgcccggccggagcgggtgatggagctctttccccacacggtccccaccggcctgcgccacggcacggtcacggtgcggacggaggacgggccggtggaggtgaccaccttccgccgggagggaggctatgccgacggccgccacccggacgcggtggacttcgacgccactctggcggaggatctggcccggcgggatttcaccgtcaacgccatggccctggatgaaaacggcatggtgatcgaccggtacggcgggcagacggatctgttccgaagcgtgatccgctgcgtgggcgacccggaccggcggtttgccgaggacgccctgcggatgctgcgggcggtgcgcttcgccgcccaactggggttctccatcgagaagggcaccctggacgccatccggcgcagcgcccgccgggcggaaaacctgtcgggggagcggatcaaggcggagctggagaagatcctgctctccccccggccggagctggcgggggagctgctccggctgggcctgctggcccacctgggggggagtccagactgtcccggcctgctggcgctccgggaggagccgccggagccggtgccccggtggcgggccttctgccgcctgaccggctttcccattgcggccctgccggtggagcgggccctccgccggggggtgctccacccggaggccgaggcggtgcgcgccctggccctctccggcggggagctggccgccctggggctggagggcccggccatcggcgcagcccagcgccgcctggccgcccacatcctgtcccacccggaggacaataccccggcgcggctgctggccctggcccgggcggagctgagcgggccgtaggggcggccattttcgcttggacaggcaagaacgccgtcctcccggcataagcattagggacgaggagggacggccatggaacggagcggaaagcgggagggcctgctggaaaagacggcggaggtatttgatctgccgggggacgtggtggcgggcctgccccgcattgagctgacaggcagccgggagctgcggatggaaaatcacaagggaattctctcctacggcggcgaggagatccacatctccgggggcaagctggtggtgaaggtgcggggctccggcctggagctgcggagcatgaacgccagccagctcctgatcaccggtgtcatcacggccgtggagctggaataggggggcggaggcatgctgaagcggatggtcaacgccctgcgggggagcgtccggctggaggtgtccggggcctttccggagcggtttctcaacctctgcgcccagcggggcattgtgttctggaacgtggagtggctggaggccacccgtttgcgcctcaccgtcacccggcagggaagcggcccggcccgggcgctgggggacaaggtgctgtgtaccgtggtgccggcggagcagtctggcgtgcccttttttctgggccggttccggcggcgctatgccctgttggtggggctggccctgtccctgacggcggtatgcgtcctctctcagtttgtgctcaccatcgaagtggagggcaacgaggcggtctccacagcggagatcctcaccgagctgcggcggcaggggctgcggccgggggtatacggccccggactggacgaggggaccatcagcagcgcggccctgctgggcctgcccgagctggcctggatgtcggtcaacctccacggcacccgggcggaggtgctggtgcgggaggcggtgcctgcgcccgaagtggatgatgaggagcaggtgggcagcattgtggcccggtcctccggcattgtgacccatatcgagcccctcagcggggaagcgctggtggcccagggggacacggtgctggccggggaggtgctcatctccggcgcggtgaccctggatgccccccagtacagcgagctggagaacctgggccaaatactggtgcgggcccagggacaggtctttgcccggacgtggcacaccatgacggcctccatccccctggaggcccaggtgaaatcgtataccggcgagaaggccagccgctggaccttgagcatcctgggacatcgcatcgattttttcggaaagagtggaatttccttccctgagtatgataaaataacagatacctgggcgctcaccctgcccggcggccgggagatgcccctggccctgagccgggagacctgccgggcctataccctcgccgccgcgccggtggacgcggacgcagcggagcggctgctggaggagcggctgctggaggcccttcgggcgcggctgggagacggcgaggtggtgcataccagcttctcctccgcacagcgggatggacggctggaggtcaccctccaggccgagtgcacggaggagatcgggcgctttgtgccgctggagtctattacagaagaaaatgaggccgaaccatgatcgaacagaccatcagcatcgagcgcattgaagatgtcatcgacatcttcggctcgtttgacgaaaacatcaagctcattgagcacgagctggacgtctcggtggtgagccgggacgaccagctcaagatctccggggaggcggagaacgtcctttacgccgtcaaggcggtccagggcctgctgggcctggccgggcggaaggagaccatcaccgagcagaacgtccgctacatcatcaatctggtgaaggcgggcaacgaggagcacatcaacgacatcgcccgggatgtgctctgcgtcaccgccaagggcaagcccatcaagcccaagaccctgggccagaagcggtatgtggacgctatcaagaagaacaccattaccctgggcatcggcccggcgggcaccggcaagacctacctggcggtggccgccgccgtggccgccttccgggacaagcaggtcaaccgcatcatcctcacccgcccggcggtggaggcaggggagcggctgggcttcctgcccggcgatctgcagagcaaggtggacccctatctgcggcccctgtacgacgccctcttcgacatgctgggggcggagacctataataaatacctggagcggggcagcatcgaggtggcccccctggcctacatgcggggccgcaccctggacgactccttcatcattctggacgaggctcagaacacctcccgggagcagatgaagatgttcctcacccgcctgggcttcggctccaagatcgtcatcaccggcgacatcacccagatcgacctgccccgggacacggtgtccgggctgaaggaggccatgcgggtgctggacggcgtggaggacatcgccatttgcaggctcaacgaggccgacgtggtgcgccacgtgatcgtccagcgcatcatcaaggcctatgaggaggacgaaaagaggaagggaaagcgatgaaccacgaaattctgatcgagaccgaggtggatggcgcggagccctacgccgcgctgctgcgccgggtgatccccgccgtcctggacgcggagcgcgtgcccttcgcctgcgaggtggacgtgctcttcaccgacgacgcgggtatccacgccatcaacctggagcagcggggcgtggaccggcccaccgacgtgctctccttccccatgttccagcttacccccggtgcgccgcccaccctggacgacgtagaggccgaccctggcaccggactggtccctctgggggacatggtgctctccctggagcgggcggaagcccagggagcggagtacggccacggcgcggagcgggaggcggcctacctggccgtccactcggtgctccacctgctgggctacgaccacctggatgagggcccgatgaaggcccagatgcgggaacgcgaggaggccatcctggccgccctgggcatcacccgggagggcgcggatggataagaggcttttgcggtacgccggcggcggcggggcgatctccctgctcgcctgtgggctgctgtgcatggcgctgggcgcgctggcgggtggagacgtggccgggctggtggcctgcggcgtgattttcaccctgcccggcgtcgtattcggctgtgcctacggcctgtatgaggcgctgaaggggagagacgatccggacgcgtagggcgcggcatccttgacgcgctgaccttccgtaacgatttacacaccatttgcaggggactcggctgccgggccgctgaacgactccgcgccttaccacagcctgcgcctgcgcagacgcgaatgtgctcggccgcccctgtcggaaaaaattatcataaaaccgctcaagaaagttgaggatcacctatggaaattagaaaatccggaatgatcagcatcgtgggccgccccaacgtaggcaagtccaccctgaccaacgccctggtgggcgagaagatcgccatcgtcaccaacaagccccagaccacccgcaaccgcatctgcgcggtggtgaaccgggagggctgccagttcgtcttcctggacacccccggcctgcacaaggcccgcacccgcctgggggactacatggtgaaggtggtcaaggagagcgtggccgacgtggacgcggtgcttctgctggtggagccgatcccccacatcggcgggccggaggcggagctgatccggcgcatcaaggagctgaacgtccccgccgtgctggtcatcaacaagatcgacacggtggagaaggaggagctgctctccgtcatgcaggtctacggcgcggcccacgacttcgccgccatcgtgcccatctctgccaagcggaacgagggggtggacgagctgctgggcttgctggcccagttcctgcccgaggggccccagctcttcccggaggacatggtcaccgaccagccggaacgccaggtgtgcgccgagatcatccgggagaagctgctgctctgcctggacaaggaaattccccacggcaccgccgtggagatcaccaccttttccgagcgggacgacggtatcatcgacctggacgctaccatttattgtgaaaaggccagccacaaggggatcatcatcggcaagggcggggccatgctcaagaagatctccaccctggcccgcaccgacattgaggcctttatgggcacgaaggtgtttctccagacctgggtgaaggtaaaagaaaactggagagataatatgaatttgatcaagaatttcggataccgggacgagtaagagccgcagaaattaccgctcataaacggaacgcggccagccaacctaaagacagaaagggggctgtgccatgagctgggcggagctgctctggcggctgtttttgcagaccggcctgccggaggtctacagcctttaccggagggtgaagggctgagcacgcgggcgcggcgcgcccgcatacatagtggagggaagcccatgcacatcagcacccagggcctggtgctccgggaggtcaactacaaggagtcggacaagctgctcaccgtgctcaccgctgaggggggcaagcgcacggtcaaggcccggggctgccgccggaagggcagtcccctggccgccgcggcccagctcctggtctattcggacatgaccctgtttgaataccgggactacttcaccctcaacgaggcggagtccctccagcagttctggcgcgtcagatccgatctggagaggctgagcctggcctcctacttcgcggaggtgatggaggcggtggcggtggaggggcggcccgatccgccggccctctccctcatccttaactccctctatgccctggacaggctgaaccggcccctggagctggtaaaggcggccttcgagctcaagctcatgtgcctggaggggtacgagcccctgctggacgcctgtgcggtgtgcggcgcgccggagccggagccgcctctgttccacctgaacgagggggtgctctgctgcgccgcctgccggacggaggcgggggagggagccgccgtccccttggaggggggagccctggcggccatgcgtcacatcgtctacggcgatcccaagcgcctgttctccttccggctggagggggcgggcctgtcctgcctgtcccatgtctgcgagcgctttttactcatgcagcttgaccggggctttcgcaccctggatttttatcaacaatgggggaattgaatatggaactgtttgtagcggacgcctttaccacccggcgcttctccggcaatcaggccggcgtggccctgctgggggaggcggatttcccggaggaggggttcatgcgggccctagccggggagctgaagcactcggagaccgcctttgtccgccggacgggggagggctccttccacatccgctatttcacccccgcggaggaggtggatctctgcggccacgccaccatcgcctccttcaccgtcctgcgggagacgggggccatcgggccggggacgtatgccctgcacacccgctccggagacctgtccatccaggtgggcgcggacgcggtgtggatggacatggcgccccccgccgacggccggagcttttcggaggaggagcaggcggagctgtacgccgcctacggcctgtccctggccgaccggccggagggcctggaggcccaggcggtgagcaccggcctgctggacatcctgctgcccgtccgggatctggccgccctggagcgggcggagcagaacgagggggaggtcacccgcctgtcggagcgctacggcgtggtgggggtgcacatgttctgccccagcacccccgacgccgcggcccactgccgcaacttcgcccccctgtacgccatcccggaggaggcggccaccggcacctccaacggggcgctgacctactatctgtaccgccgggggctgacggccgccggggcggagaaccgctttgtccagggggagaagatgggcaagccctcggagatcctcagccgtctcacggacgggggcgacggcgtcaaggttcaggtgggcggccgggcggtgctcgccctgcggtgtgagctgctgtgatcatgccagacgccattccgccggagctgctggccccctgcggaatgaactgccaggtgtgctaccggcacctgactccccggcgggcctgcctcgggtgcaggggcggcgcgtcgaacaagccgccccactgccgggactgcgccctgaaagcttgcgcggcggagcggggcgtggcattttgcgccgcctgttcccggtttccatgcaagtctatggcggcgctggaaaagacctatcaaaagcgttgggggatcagcctggcggagactggacgccgggccgccgcgggagaggcggaggcccttctggccgggcagcggaggcggtggctctgcacctgcggcggggtgatctccctccacgatggagtctgctcagagtgcgggcggcccgtggactaggagatatgaaactgccggatgatccccacactcatgtactcgcccatctcgcaggcgagctggtccagcagcaggtaggacgcgctgatggcgtggtaattgcccagcagatcctggtcggcggcatcgcagagcagggtggtattgtggataaacatgctgctccataaactggcgtcccagtgggggttgagcgcggacagccgggcggcggtgagccggttgaggtccagccactggcagcggatgcgctcagcctggctgcgctgccgcgcgtccagcgcgtccagataagcggcgtagtagcggtagagcggagagcctgccgctgcggtgccggtgatgagctggatgccatagtagcgctccatgatctgatcgtactgggcgggctgggcctgcagctcccgatagatgctgtccacgttttccgcgtggaacagccggctctgcatatacatgagggcccagaaggtgctcccccgccacgcattgatacaggtattgagtaatatgagctgacgctcggagaacgtatataagtcaagccgtttctgttccataagatccctcctgcccatagggtatgcgcccggggggcttcgggtgcgcgaatcttggggcacaggcgcggcgctccgcggaacaacgcggcaatcaaacagcaaggaaacgaattatgaccgatttatttgaaaaatccattcagattctggaactgcccaaggtgcttgagcgcctggccggccaggctgtgacccaggagggcaaggagcgctgcctggcgctgcggcccatgaccgacccggacgatgtccagcgggcgctggacgagaccagcgccgctgtggacatgagcgccctgcggggcagcccctccttctccggcgtcaagccggtggcggcctccctccagcgggcccacatggggggcgcgctcaacacccgggagctgctggacatcgcggcggtgctgcgggcggcccgctccgccagggagtacggtgagggggacgagcggaaaaagacctgcatcgaccacctgttccgctccctgaccgccaaccgctttctggaggacaagatcaccggctccatcgtgggagaggaggagatcgccgacgccgccagccccgagctggcttccatccggcggcatatccgggccaccgcctccaaggtgcgggacatcctcaacaagctcctctcctctaaccaggcaaaatatctccaggaggccatcatcacccagcgcaacgaccgcttcgtggtgcccgtcaagtcggagcacaagaacgacgtgcccggcctggtgcacgacgtgtcctcctccggggccaccttcttcatagagcccatgggggtggtgaaggccaacaacgaactcaaggagctccaggccagggaggagaaggagattgagcgcatccttgcggagctgtccgccgagtgcgcacagttcaaggacgatatcactcaggactacgatctgctcatccttctggatgtgatcttcgcccgggccaagctggcctaccggatgcgggcctgcgcccccagaatcgtggagcgcggcctgtacctgcggaaggcccgccaccccctgctggatccggacagggcggtggccaacgacctgatgctgggggaggacttcgacaccctggtaatcaccggccccaataccggcggaaagacggtgaccatcaagaccatcggcctgctcaccctcatggcccagtgcggcctgcatatccccgtctccgacgacagccgggtaaaggtgttccgccgggtgctggccgacgtgggcgacgagcagtccatcgcccagagtttgtccacattttcctcccacatggtgaacattgtgggcattctcggggaggcggacggcgagacgctgatcctctttgacgagctgggggcgggcaccgaccccatcgagggcgcggccctggccgccgccatcatcgagagcgcccgggagatgggagccctggtggccgccaccacccactacgccgagctgaaggtgtacgccatgaccacgccgggggtggagaacgcctcctgcgagttcaacgtggactccctggcccccacctaccgcctgctcatcggcatccccggcaagtccaatgcctttgccatctcggagcgtctgggcctgcccaagtctatcatccagaaggccgccgcccgcatcgacgcggagaacgtccgcttcgaggacgtgctcacccagctggacgagcagcgccaggagatggagcgggagaaggaggccgccgcccggctccggcgggagatggaggagacggccaaggcctcccgggagtacaaggccaagatggaggccgagcgggccaaggcggtggagaaggcccaggcggaggcccgggccattctggacgaggccagggacaccgccgaccaggtattcaaggagctcaacgacatgcgccgccgccagcggaaagaggaagactggcagcgggtcaacgacgagcgggccgccctgcgccgcagcctcaacgaggcggaggggaagctgggggcccggccggaggagccggccccgcctcccacccggccagcccgggcgggcgacacggtggagctggtgaagatgggcacccaggccaccgtcctgtcggtcaacaaggacggctccctccagctccaggcggggattctgaagatcaccgccaggcaggaggaggtgcgcgtggtagagggggagacccagcagtccgtcaagaaggtggtggcccgggcggagcacaagctgcgcaccctgggggcctcgccagaggtggatctccggggtatgatgaccgatgaggccatcggcgcattggatctcttcctggacaacgcggtgctgggcaagctcaacgaggtgcgtatcatccacggcaagggcaccggcgcggtgcgcaaggcagtgcgggagcacctcaagcgcagccgctacgtcaagtccttccgccccggccgctacggcgaaggcgaggatggtgtgaccatcgccgagcttcggtagagcagcccccgtcccccgcgggagcgcgtggggggcctccggggggaatcgattccccccagaaggcgcggctttggagcgaagcgacaggctttccgcagaaagcctccgcgccgtgaggacggcgtaacgagcgccaggctgcggcaggcggaatgtctgccatctgcggacattcgtgccccagaggggaaggagtaaactggttcgtcaatcaaaccagtttcttcaacttaatttgtgtattttgtcattgacggtttgggataaatttgatattctatagtacgaagtatgcgaatgcatcttggggggaaaacgctatgtatatgaaagaggcagtcgtgaacaaccaggtcggcctgcatgcgagaccggccacgtttttcatccagaaagccaacgagttcaagagctccatttgggtggagaaggatgagcgcagagtgaacgccaagagcctgctgggtgtgctctctctgggcattgtcaaggggacttccatcaacctcattgcagacggccccgacgagaaagaagcggtggaggctctgattgagctgatctcctccaacttctccgagtaagcgaacgagcgagagaaaaaagcgccgcgtctgcggcgctttttttgatagacgggaggtgtggcttgtgaaggcggagatgactccggagcccatccggcggagcgccctgcgcctgcggctgggcgggctggccctgtgctggcgccgccgtctgctgtggcataccggcggcctgcggttcgcccggccccggccggaggtggagtgcccctatctgcgggcggagcacgccacgcccctgctgcgcaggctgcggggggaggacatggccctccagcgcagcaaggtgaccaacctgcgcctggcggctgcccggctggacggcctgaccctgcggccgggggagaccctctccttctggcgggccgtaggcaagcccacccggcggaggggctatgtggaggggatgattctgcgcaacggcagggtagcctccggcgtggggggcggcctgtgccagatgaccaacctgctctactggatgaccctccacacccccctcaccgtcaccgagcggtggcggcacggctacgacgtgtttcccgactccaaccgcacccagccctttggcagcggggccacctgcttctacaactacatggatctcatggtgcgcaacgacacccccgacacctggcggctggtgctccaggtgacggacacccatctggagggggagtggcgggccgacggcccccagacctgccggtacgaggtctatgagaaggagcacgagatccggggggagtactggggcggcttcacccggcacaacaccctgttccgccgggtgctgggtatggacggcgcggagctgggggaagaattcatcacggagaaccacgccatcatgatgtataatcccatgctggaggagactgccccgtaggggcggcctttatgaccgcccgccctgcgggagagatatgcccgccggtacggcataagaagggcggaaaacgcaaagcctgtccggtaggggcgcacggtgtgcgcctgccggtgccagcccggtggaagggggcggcgggccgatgtgggcatcggcccctacggtgcccctccttcgatagacgcaaagaaaagcccatgcccattctcccaaacgcacgaggggcgtttggggctcctaggggacgccgctgcgcccagcggcagggtatgagaaatctggcggaaaggaggacgcgggccgatgtgggcatcggcccctacgagtcatgacctttgacgaattaaaagaaaaagcccatgcccattccccaaacgaacgggttcgtttggggcccccggaggatgatttgacatcctcggcgggagtgaatcccgcctgcggcgaggtttggcctgcggccaaacgctcggacggcgcgaagcgccgggacgctgccgcgtccagcggcagggcatgagagacccaggcagagaggagggtatactgccccgattatgactttcgatgaactcaaggaaaaagcccatgccctgccgctgaagccgggcgtgtatatcatgcaggacgccaaaaacgaggtcatctacgtgggcaaggccaaggcgctgaagaaccgggtgagccagtacttcgccaacctagcctcccacacggagaagacccgggccatggtgagccagattgaccacttcgacgtgattgtggccgactcggagtttgaggcgctgattctggagaactccctcatcaagcgccaccagccccactacaacatcctgctcaaggacgacaagggctacccctacatccgcctgacggtgaaggagccctacccccgcttctccctggccaaccgggcggcggaggacggggcgcggtacttcggcccctacggcagccgggggagcacccagaatatcatcgacgccctgcgcgtcgccctgaagctgccctcgtgcagccggaagttcccccgagacatcggaaaggagcggccctgcctgaattaccacatgggccagtgtgacggctactgccggaaggagatggatcagacccgctaccgggaggccatcgaccaggcggtgcgcctgctggaggggcagttcaaggaggtgggggaggagctgttggccgagatggagcaggcggcggaggagctgcgcttcgagaaggccgccgagctgcgggaccgcttcaaggccatcgagctgctgggcaagcggcagaaggtggtggcgggctccctggcggacaccgacgtggtgggcttccacaagggggaggccacccggagctgctttgtggtgctccactatgtggagggcgagctggcggccaaggactgggagctcatcgagacacccatggaggaggacagggcggacatcctctccgccctggtggggcagtactacggcggccggggccgcctgccccggcagatcctcctgccctgcgagctggaggacgcggtgcccctgatgcgccttttgtccgagcaggcggggcacagggtggagctggtcaccccccagcggggggccaagatggatctcatccgcctggccaacaaaaacgcggtggaggaggtggagcgctggaccacccgggaggagcggcagagcaagctgatggagctgctgggccggatgctggatctggacgcgcccccccggcgcatcgagtcctacgacatctccaaccagggcgccgacgacatcgtggcctccatggtggtgtacgtcaacgcaaagcccctcaagcgggactatcgccgcttcaagctgaaggacatggacggccccgacgactatgcctccatggagcaggtgctgacgcggcgcttccagcgctatctcgacggggacgagaagttttccgacaagccagacctgctcctcatcgacggcggcgtcaaccacgccaatgtggcggtgcgggtgctggagagcctgggcctgcgtattcccatcttcggcatggtgaaggacgaccgccaccgcacccgcgccctggtcacccccgagggaaaggagatcggcatccagggaaaccaggccatcttctccctcatcggccagatccaggaggagacccaccgctttgccatcgagttccaccgccagcagcagaaccagcgggtgcgcggctcggtgctcgaccagatccccggcgtgggggagaagcggcgggctgagctgctcaaggcgtttaagagcatcaaaaatatcaaatcggccaccctggcggagctggaggatgcagtgcccaaaaacaccgcccgggcggtctatgactttttccatcagaaaggggaggaaccatcatgcgagtgattaccggaacggcccgggggatgcggctcaaagagctgcccgggctggagacccggcccaccaccgacaaggtgaaggagtcggtcttcaacatcgtgcagtttgacgtagagggccggcgagtgctggatctcttcggcggtactggccagatgggcatcgaggccctgtcccggggcgcggcgtcctgcacctttgtggacgtgcggaaggaggccgccgcggtcatccgggccaacctggcccacaccaagctagaggagcaggggaaggtggtgcagggggactacctggccttcctcaccggctgccgggagaaattcgacctggtgttcctggacccgccctacggcgccgggatgctggaaaaggccctggaggccatcgccaagattgacattatgacggaaaatggtataatagtctgcgaaagtgcggcggagagcgcccttccggagctggccgccccctatgccaaggggcgggattaccgctacggcaagatcaagatcacgctgtaccaccgtgcggtctgacgggctgtgcgacagttaaggatgtgaagcccacatgaagaccgccatctatcccggcagcttcgaccccatcactctgggacacctgaacatcatcaagcgggccgccgtgtgctttgacaagctgatcgtgtgcgtcatggtcaactcggagaaagtcaaccggggactgtttaccccggaggagcgggtggagctcatccgccgggtggtggccaagctgcccaacgtggaggcggattgttcctccaccctcatcgccgagtacgcccgccagaagcgggcctgcactctggtgaagggcctgcgggcggtgtccgactacgagaacgagctgcagatggcgctcatcaaccgcaagctgaatccccggctggagaccatgttcctgccctccagcgcaaaatacacctatgtgagctccagcatggtcaaagagatggcccgctatggggcggagctctctgactttgtaccccgggagatcatcggggacgtacaacgaaaaatggacagcaggagggatggctgatggccaccggcgtggaagaattactggatatgctctttgagatgatcgacgaggccaagagcatgcccctgagcagtgacaagtgcattctggaacgggacaaggccctggatctgctggacgagatccgggctcagttccccatggagctggccgaggccaagaaactcatcgctgcccggacggagtatatcgcctccgccaagcgggagggggagctcatccgcaagcaggcggaggagaaggcacgccaaatggtgtcggaggacgagctgctggcccagaccaaacagaaggcaaacgagctgatgcgtactgcggaggagcgcagccgcgacctgcggaaggcggccaacgactactgcgaggatgccctgcgccgcaccgaggaggcggtggccgaggcctacgacgagatcaagaagtcgcgggcccggttccgtgccttggcaggaggcggtgccccggctggccgccagccctacgacgtggaggcggaataaaaccaaacaccaaacagagagcccgccggcggaacttccgccggcgggctctgagatgatcgataaaccttcctgccgaaggcttcggagggaggaatagtgtgaaagggaaccgtcagggttccctttcgcgttcgatcaaacgcctttttgaacctttttcgagggttcaaaaaggctctctgcctgtcgagaacttttcgacaggcagagagcccgccggcggaacttccgccggcgggctctgctttgctgtgggagagggctcagggggctttgtagtcgggggcgcgtccgatctcctggatgagctccttcatggccgctgccatggcgtcgatgtcggcgtggttgttgaagtactggcaggagatgcggaagccgcccacgtagtcggtgaagcgctgggcaataaaaatcttgcgggcgtggagctgcttgagtacccagcggtccacatccagatcgtcatagaggcgggcaatgacgatgccgccccgccggcccgggtcgcggtgggtgatgatggtggcgccgatggcctccaattgatccatgcagtaggcgctgagcgcccagatgtgttcctggatgttctcaatgccgatctcgttgaccaggcccaggctctcccccagggcaatggcgccggtgtagttggaggtgccgccgatttcgtacttgcgggcggtctccgggaaggtccagtcgtggacggagggagcggcgggattctcccagtaggcgccccagccgccttcgggaacggtggtgttcaggtagccggcatagctctgcttgatcttggacagggagttcttgttgacatagagcacgccggtgccgtaggggctgttcagccacttgtggccgccggccaccagcagatcaaagtggcactccttggtgtcaatcttggtgacgcccaactgctgcaccgcgtccaccaccaggaagatccccttttcctgacagaaatcgccgatggccttcatgtcgctggcccagccgttgcaccactccagggtggacatgacgatgatgcgggtcctctcatcggccagggcggcgaagtcgtccaccgtgaagcggttgtccttggtcttgcatacccggatctcgatcttcttctcccggcgcatcacacaccagggcagggccacctgaatgaactccagattggtggtgatgatgttgtcgccgtcggccagctcaatgccgcgggcagcgatgttcagcccgtgggaggtgctctccaccagggcgatctcctccgggtcggcgttgagcagcttggcggcttcgtcgtatgccttgccgcgcagggagtccatggcgatgtggtgggcgctggagttctcctcctcctgggtggcggtcatgtcggcaaaggccttcaccgcccgcaccgtgcgctggggggcgaagctgacgcaggccgcgtcgagaaagaccatctgctccagaacgggccactcctgcttgcggatcgcttcaaaatcgacggacataagtactacctcctatatttttgtgggtgatggctgggttgtattcctctggttttccttcactggtgaagcaacatccctccaatcgactgactttttgagatcaaacgctataatggtaaaaaattaccaatcatggagttgggaaaacagattatgacagagaccggtattctgacggatgcctcaccctggatcagcgtcgagccggcggcatggcgcccgctgaccgaggggagaacgccgcgcctgttccgaaaaaagacctttctctacactcaggggcagccggcggagcatttttacatcattcagcgggggcgggcctgcatctctacctcacgggcggacggccacgagaaacagctctacatcgcggagcggggcgccctgtgcggggagagcgcctgtctgcagcggcagccccacgcgtcggcggccctggcgattgtggacacctgggcctatgccgtcccccggctggccatgctggaggcgctgcgggaggactgggcgctgaatcagcggttcctggagctctgctttcggaaaaacacggtgctgctcggtcaggtgcgggagctctcctttgaccaggcggagcggcgcattgcccggaccctcctcaatctggcggcccagtatgggcggccctgcccggagggggtgcgcatctccatccgctttacccaccaggatgtggccggtatcatcaatacaagccgcatcaccaccaacaaggtgatgaagcgcatggaggaggaggggatactcctcaaacgggagggccgctacatcttgcgggcccttcccgccttggagcggctggcgcggggagagggtcagtagcgcacagccctttcgctctcccggaaggcgcggctgtctggcaggagggtgcgcccgtagccggagacgatggcgaaaatagtcataaccagcaaaagaatgggatagaactggtgggtgacgatctccagtgtggagacgggaaccgcgccgggcaggtcgacggctgtcatcatggcggcgcacaccaccggcaccatatagggcatcaggtagttgagggtgccgccggagcagatgaggaggttggctgtgcggtagccgtggagctgatactcctcccccagccgcttggccagggggccggtgcccacgatggccgcggtgttcaggccggtggccacgttgagcaggatacagatggcgacgatggcgccctcggcggagcgggggccgacaatgaagcggtccatggactggatcatcatatcaatgcagccgcccttttccagcaggtggatctgggcgaacagcagcataaccagcaggatggtggggaccgcgccctcgatgccctccatgatgaggccgcctgcgctcaggggttccgggacggaaatgatgtcgctgaaggtgatggtgccggtgaccagtcccaggagtacgccggtgacgatgccatagctcagcgcctccagcaggtggcgctggagcaggcagaagaccaccaccaccacgggcaccagcaggaacagcagggccgtaggccggaccgcggcgctctggacggcggagagatccgcggcctcaccgcgggagccaagcgccagatagaggatcagcgtcaacgccgcggccggcaggacatatttcaggcggctgcggaaaacgccgcccaggtccaccttctgagaggaggaggccgcaatcagagtgtccgacaccggggagacgttgtcgccgaaggccgctcccgatacgatcgcgccgatcatcagcgccggcgtggccccaaccagatagccgatggggtaaagaatggggccgaccacgaagatggtgcccaccgaggtcccggtggagaaggcgatcaggcaggtgagcagaaaagaggcggccacaaacttgttgcccaggaagttgagctcaatgagatagtgtgccagggtgtccaccaggccgctggtctcaatgagctgcccgcagattccggccagcagaaccgccatgatcaggatgccccccaccttgttggtggcgccctcgatgatggcctcgcagtaggccgtcttgtccttggccaggaacaggcagacgatcatggggaggagaaagaccacccagtattccggtacgtccgcctgcttgaccgcgatgtaaattagccccacgatggccagcaggatgggcgcgaaggccacccactttccgccgtagtaggtgatgtgcgcttccggtgcggcttgtgtttgatccataggtacccccttttcagcacggatgtgttcaattttgtggaacagatatctgttgtggttaaaagtatacctgcattttccataaatactattaaatgctttacaaaagaggtggtgtttttgggagaatatacccgaatcccgaaccgcgtgcgcggcgggactgcaccgttttttgtttacgtaataccgcaaaatataggacttttttgccgccaaaccgcaagggatggcggttttttgataccatttgtaacgaaatgcaatcgaacatatgtttttagtgccgaaaagcaggggtttcagtggaaaaatcggcatttttcccgttaaaaaagaagaaaaaactgttgcaattctgtaacagaacatttatactagagaagaaagtggggcgaagtggagcaaatcaccgctcttaagcagtaaagtggggggaagtgagcagcatgaccggcacctatgagcacagcattgatgccaagggccgtctgttcattcccgcaaagctccgggaggagctgggtgtcaccttctatctggcgatgggtgtagacgcctgcctggccatctatccccagtctacctgggaccggtttacagaaaaattttcctccctgcctatgagtcaatccaaggccatgcgccccctattcgccaacgcggccaagtgtgaactggacagccagggccgcatcgtcattccccagaagctgcgcaggtatgccggtctggacaaggacgtggtgatcctgggtgtcaacgaccgggcggagatctggagcgcggacgcatggcaggcccaggaggaggaagagatgacgccggagaagatgtcggcctgtatggaggcgcttggattctgatatgagtgagcaggtattttcccacaagccggtgctgctggacgagtgcattgaggccctggccatccggccggagggcgtgtatctggatggcactctgggccgggcgggccacagccgggagattgtccggcggctgaccaccgggcggctcatctgcgtggaccgggatcaggcggctctggacgcggcggaggagcggctggcgccgtggcgggagcgggtcaccctggtacacagcaatttctgtgcgctggacgccatcctggacgggctgggcctggacggggtggacggcatgctctttgatctgggggtgtcctccccccagttggacgacgcatcccggggcttttcctacaggacggacgcccccctggatatgcgcatggatcagaccgacaccctgacggcccgggcggtggtcaacgagtggccccaggaggagctgcggcgcatcctctggcaatatggggaggagcggtacgcccccgccgtcgcgggagccatcgtccgggccagggacaagcgccccattgagaccacgctggagctggtggaggtcgtcaagggggccatgccccctgcggccctgcgggagaaacagcacccggccaagcggaccttccaggccatccgcatcgccgtcaacgacgagctgggctcggtggaccggatggtgcgggaggcggtgccccggctgaaccccggtgggcggctggcggtgatctccttccactcgctggaggaccgtatcgtgaaaaatgccctggcggctttcgccaaggggtgcacctgtccgccggattttcccgtctgtgtgtgcgggaagaagccccaggtgaagctggtcaacaaaaagcccattgtctccggagcggcagagctggaggagaacccccgggcccgcagcgccaagctccgggtagcggaaaaacggtagaagcacggaatttaccaaagagattggagtggacggactcatggcaactgccgtcaagcgcagaagcagatacacgaattacagccgcgtaccctatgacgcgtatgatggctccgcggcgcggcagctccagcgggaggaggttcttcggcccaggcccatggttcggccgcgggagcgggcggtggtccggccccgggtgcgggtacgggaggcgggactggtttcccccttcgctgtggtgggatttctggcggtgggcgtgtttgccgtgctgctgctgttcagctatgtgcagttgaccaccatctcccagcaggtggtggagctgcgcagtgagatgactgctctccagtcggaggaggccaagctgcgcaccgcgtatgagctgtcttatgatctgagcagcattgaggagaccatgacagccagcggcgccatggtccggccgcagaacgggcaggtggtgtatgtggacctgtccgagccggacaccgtgacctttttcaaccaggacgaggcggccgctggactggacggcatgtttgagagtgtaaagtccattgcctccgagattgtggcatatttccagtgagtacggccatatagtgatctgcagaccccagagaaacagacgggctgccccgggcggcccttgaagagaacgagcagagagggcgtaagaaaagcaattttcttacgccctcctgcgatatatcacccaatcccgcgggagagcggcagacgagatttcttgagtgaggtgagccagccatggcagacagaaagagaaagcgtatggtccagcagcagccggaccggcgggcgaaccgcaccattttggtgcgcaccctgttcctgctgacactgttcggcgtggcggcgttcgtgccgctgctggtccggctctggcagatccagatccgcgactacgacaaataccagggaatggcggtggagcagcagaccgccgacagcacggtggaggccaaccggggcaccatctacgaccgaagcggggagactctggccatgagcgccacggtctacaacatccagctctcccccaaagagatcctggcctgccaggaggcgtatcgagagaaggcggcgaacgcagcagagaatgggaagacactggactacccggagcccaccaacgagttcattgcctccaacctggcccaaatcctggatctggacgaggcggacatcctcaagcgcctggccaagaccagctccatgtatgagatgatcaaatggcgggtggaggacgacgagcgggacgcggtgatctccttcatcaacgaaaaccatatcaccggcatttacaccccgcccaccaccaagcgctactatcccaaaaacagcctggcggcccaggtgatcggctgggtgaattacagcgaaggacggggcgcctatggagttgaggctcagtacgacgaggctctctcgggcgagacggggcggatcgtcaccgccaaaaacggcgacggcacacagatgctctaccgctatgaggactactacgacgccactgacggcgacaatctgaccctgaccctggacagcgctatccagtcctactgtgagagcatcctgaaaaagggcatcgagcagttcgaggtgcaggacggcggcttctgcatcgccatggaccccaatacgggcgaaattctggcctgggccaactcccccacctacgatctgaacaaccccagggtggtgagcgatccggtgctcaaccagtatctggcggacatcgagagcggggcgtacaccaaggaggaggcctaccagaaggcactggcagagggggcttccagcgaggaggcccgcgacaaggccatttctgcggcagagaccgaagtgctttacacccagtggaccaacaaggcaatcaccagtacctatgagcccggctccacgttcaagtccatcgtcctggccgccgccctggaggagggcgtggtcaccgagaacagccacttctactgccccggctacatcatggtagagggctggtccaggcccatcagttgctccaagaaggcgccgggccacggggaccaggatctggccctggcggtggcgaactcctgcaacccggccttcgtcaagatcggccaggctctgggagcggagaagttctatgactatctggaggacttcggattcctggagaaaaccggcatcgacatgcagggcgagatggacaccagttccctgatctggccccgggaggacttcaacaccgtccagttggccaccgcatccttcggccagcggttccaggtgacccctattcagctcatcacagcggcctccgccgtcatcaacggcggccacctgatgcagccctatgtggtcagccaggtgaccgacggcgagggcaatgtgctccagcacaatgagcccaacgaggtgcgacaggtggtcagcgcgcagaccagtgagcgctgccgtgcgatcctggagaaggtggtggacggcggcaccggcaagaatgcccgggtggagggctaccgcatcggcggcaagaccggctcctccgagacgctggagaccgaccataccatcgtttccttcctgggcttcgccccagcggatgacccgcaggtgattatcctgctggcctacgacaaccccaagcccgccttccccggctccaataccaccgccggcggctggtatatcagcggcggcaatatggcggcactgatggccggagaactgctggaggatattctgggccacctgggcgtggagaagacctataccgccaacgccgacgtgctggtgcccaacctgtccggactgaatctggcggacgccacatccgccctccagaggaacagcctgaccctgcgcaccgtgggcgacggcggtaccgtcaccggacagatcccggcggcgggggcatccatccccggcggaagccaggtggtgctctacatgggcgaggcggtgcccaccgaccaggtgcaggtgcccagcgtcatcggccttaccgccgagcaggccaggcagaagctggctgatgcgggtctctacatgcgggccaccggagccaccgagtacggctctcacgtggtggcctatgaacagtccaccgccgcgggcactccggtgaaccggggcaccaccatcgaggtacgctttaccgacagcacggccagcggcgcgggcctgtaaaaacgggctgacaacaaggaaaacggggtgagggcatgaagctgaatgagctgttggacggcgtggcgctggccgcgcggcatgtccaggacgtggaatgttcaggaatctgctgcgacacccgagacatgacccccggctgcctctttgtggcgcttccggggtacaagaccgatggacaccggtacatccggcaggccctggaacggggagcggcggcggtgctctgccagcgccccccggagggggagggcccctggctggtgacggaggacacccgggccgccctggccatcgcctcagccaactggttcggccatccggcccgggaactgaccctgctggcggtcaccgggaccaacggaaagaccaccaccacctatctgctcaaggctatgctggaggggtgcctccacacaaaggtggggctgatcggcaccaaccagaacctgatcggggaggagagcctgcccgcccaccgcaccacgccggagtcctacgaggtgcaggagctgctgcgggagatggcggatgcggggtgtacccacgtggtgatggaggcatcctcccacgccctggtgctccaccgcctggacggcatccccttccgggcgggtatcttcaccaatctgacccaggaccacctggacttccacggtaccatggaggcctaccgggacgccaaggggctgctgttccgccagtgcgccgctgcggtgctcaatctggacgacgaggcgggccggtactatgccgaaacggtgccggttccgacctttacttactcggagtgccgggacgaggcggatctcacggccaagaacctccgcctgttcccccagcgggtagagtttgaggcggtgaccagggacgccatttcccgggtaaggctgcctatacccggaggctttaccatctacaacgctctgggtgtgctggcctgcgggctggtgctgggcctgccgctggacggctgtgccgccgcactgggggcggcccggggggtgaagggccgcatcgaggtggtgcccacccccacggactacacggtgctcatcgactacgcccacacccctgacgccctggagaacatcctcactaccgtgcgggacttcacgccggggcgggtgatctgcctgttcggctgcgggggcgaccgggaccgcaccaagcggccccgtatgggggctgtcgccggggctctggccgacgtggcggtagtcacctcagacaatccccgtactgaggtgcccatggacattatcaacgacattctgcccggcctggagggggctccggcggaggtcgtggtggagcccgaccgtcgcgccgccatccggcgggccctctcgctggcccgggcgggggacacggtggtgctggccggtaagggccacgagacctatcaggaggtggacggcgtggagtaccacctggacgagcgggaggaaatcgccgcctatttcgcctgagaggcgaggaagtttgttgctttttcgagtggaaaccatgccgggattgtgataaaatatcgaaccggctcacatgggccgcaatttggaatgttgagaggctttggaggttgcaaaagagatgttaaggattgtaatcagctttgtggtggcctttgcggcggccgccctgggcgggaaggggctcatccccctgctgcggcgcatgaaggccgggcagtccatcaaggagatcggccccacctggcacatgtcgaagcaggggacgcccaccatgggagggctgatgttcatcatcggctccgctgcggcggttctgctgctggggtggccggactttgccgcagggcgcttcggcggcggctttgtgctcctgttcgccctggtgttcggcgtgatcggctatattgacgactatgtgaaggtgaaaaagcaccagaacaccggcctgaccgcaccgcagaagtttctgctccagttggcggcggccatcgtgttcacggtgctgatgcgcaaccaccactatctgacccccgacctttacatcccctttgtgaacgtgaccctgtccctcccctggcccgtttatatggtgttcgccgccttcgtcatggtgggcaccgtgaacgccgtcaatatcaccgacggcatcgacggactggccaccggcgtcaccatgcccgtgatgctttttttcaccgccgtggcctgcttctgggggcaactggagctggggatcttctccgccgggctgttcggcgggctgtgcggattcctgatctataacttccaccccgccaaggtctttatgggcgacactggctctctctttctggggggagcggtgtgcggactggccttcgccctggatattcccctggtgctcatcctggtgggcatcatctacatcctggagaccctgtccgacattctccaggtgggctacttcaagctgacccacggaaagcggatctttcgcatggcgcccctgcaccaccacctggagctgggcggctggagcgaggtgaagctgttctgtgtgttctccggcgtgaccctgctggcctgtgtgctggcctttctgggggttatgggccggtaatccaccctgagttgagagaaaggaggggagccccctggcaaaacgcaagcgcgacctgaccattgaggagcaactggcccggggacccatggacctgcccttcctgatgctggtgctcctgctcaccggcatcggcgtgatcatggtgttttccgcctcctacgccacggcgtacctgcaggaggacaaaagccccaccttctacttcttccgccaagccctctttgccgcggctggcctgaccgtgatgtatatcacctcgaagatcaactaccagaccttccgctggctgtcggtcttcgcccttgggctggctgtcctgttgctcatcgcggtgctcatccccggcatccacaccagccgttccgacggcgtgaagcggtggatcgccgtaccgggcatcggaaccttccagccgtcggagatcgccaaggtggccgtcatcatgtacttttccgcccgtctgtccaagcggaacacggagaagccgcgccgcctctccccccgcagcccgctcagcggtgtggtgggcttcctggaccgcatcggctttctggaactggtgccctatggactcatcctgctgctgattgtgggcctgatgatgctggagccccacatgtcgggtacaatcctgattctggccggcgcggcggcggtgctttttgccgccggcatcaagctctactggtttgccggcggcggcgcggccctgatggggctggtggtgctcatgatgagcggctaccagtccacccgcatcctggtgtggcaggatccctgggcttatccccgggacggcggctatcagattatccagtccctctacgccatcggctccggcggactgctgggcctgggcctgggcaagagccggcagaagttcctctacctgcccgagccggagaacgacttcatctttgccatcgtgtgcgaggagctgggcctgatcggggccggaatcgtcctcattctctttgccctgctggtcatgcggggctactggattgccatccacgccagagaccgcttcggcgcccttctggtggtgggtatcaccaccctgaccgcggtacaggtgttcctgaacatctccgtggtcaccaacctgatccctaccaccggcatctccctgccgtttttcagttacgggggtacggcgctgatgatccaactggcggagatgggcatcatcctttccgtttcccggcagatcccggcgccgagacaggagtaaaaaagtccagggaggacgctgttcccctgcgcggccagggacagtggtgtgctccgcaggcgcatgtcctgctgcgcacatcctctgaatttctttcaccctatggcgggtgaagctttttaggccgcaggggcgaccagcggccgccctacattacgaggaggagaaaaaaggaatgagagtcctctttacctgcgggggaacggcgggccatgtcaatcccgccgtggccctggcccagatgttccagacccgcaactccggctgtgaggtgctgttcgtgggcgccgacggcggcatggagacccggctggtgcccaaggaggggtaccccattgagacggtgaccatcaccaacttccggcggtccctctctccggcctccatcggccacaacgtcagaaccctgctgaacatgaacaagtccaggaagcaggccaacgccatcctggaccgctttcagcctgacctggtggtgggcaccggcggctacgcctccttcccggtggtgaaggccgccgcgaagcgggggattcccaccgccgttcacgagtccaacgccgtccccggcctgaccaccaagaccctgtccaaggtggtggacgtggtgatggtgggctttgaggagagccgaagccactacgacgaccccggaaaggtggtggtcaccggcacgccggtgcgtaccgacttcttccgctatacccggaaggaggcgcgggcagagctgggcctcaccgatgacaggcccctggtgctctctgtgtggggcagcctgggggcggaggtgatgaaccgccagatggcggagtgcatcgccctggagtgccgggacggcgcccccttccaccacatccacggcgcgggccgggactaccgggcggtgctggacgccctccagggcagcggcctggcgaaccacccggaggtggatgtgcgggagtatatctacgacatgcccctggtgatggcagccgctgatctggtgctgtgccgggcgggggcgtccaccatcgcggagattgccgccatcgccaagccggcggtgctggtgccctcccccaacgtggtggccgaccaccagaccaagaatgccagggtgctggccaacgccggcggcgcggtactgctgccggagggggagtcctctggagagaagctgtacgcgcttatgaccgggctgctctccgacgccccccggcgggaggccatgagccgtgccctgcgggacatggcggtgccagacgcggcggaacaaatctaccagactctggtccgtttgatggaaaaacgggccaactgaaccagccgtcctccctccgcataggatagcgtaccaaacgacttgcggaggctggatctatgagtgcttacatcatcgaggggggacaccccctggacggctctgtgcggatacacggggcaaaaaacagcgtactgcccattctggcggcctgccttctggccccgggcgagtgcgtcatccacaactgcccggagctgtccgacgtggcggcctccctggacatcctccggcacctgggctgccgggcggagcggcagggggacgccgtggtggtggacgcctccgcccccacgggctgggacgtgcccgacgcgctgatgcgggagatgcgctcctccgtcatcttcctgggggccatcctgggccgcatgggacgggccgagctgtgcgcccccggcgggtgtgagctggggccccggcccatcgacctccacctgggggccatccggggcctgggtggccgcatcaccgaggacggcggcggcctgcgggctgagggagccctgcggggggcggacctcgtgctctccctgcccagcgtgggggccacggagaacgccatgctggcggcggtgtgcgccgccggcaccaccaccatcaccaacgccgcccgggagccggagatcgtggatctccagggctttctgcgggctataggggcgaaggtgcacggggcgggcagctcggtgatcacggtggagggcggcgtccccctccacggcggcagctatgccgtcatgggcgaccgcatcgtagcggctacctacctggctgcggcggcctccgccggcggcacggtggaagtgacgggggtggactaccgccacctgtccacagtgagcgccgtgctacgggaggcggggtgcgacgtgcagagcggggcggagtccatccgcctgcgccgggacggccccctccagggggtgcggccggtgcgcacggccccctaccccggcttccctaccgacgcccaggcgccgctcatggccgccctgacccgggggaagggctgcaccgtctttgtggagaacattttcgagagccgctaccgccacgtggatgagctctcccgcatgggggcggacatccgggtggagggccgtgtggcggtggtgtacggcgtgccgcggctccacggggcccaggtgcgggccacggatctccggggcggagcggcgctggcggtggccgccctgggagcggagggacgcagcgagcttaccggtgtgcaccacatcgaccggggctaccagtccctggagggagatctccgccgcctgggcgcagagatccggcggatttaagggttttcttaggatacgttcacaaatccgcaacctttctgtgggatactgacagaaaccagaacagacaggagagcagttggaatggcggcgagaaggaacagacggggacggcggcggaatcgggggcgcttcagcgcgctctataagctgctgtccgttctgatcatcttcgccgccattttgatgggctgtgtggtattctttcgggtgaataccgtggagatcacgggggactccccctatacggaggaggagatccgccgggtatccggcgtggagcagggggacaacctgtttaccctcaacaaataccagatcagcagccgtatttacacccagctcccctatatcggtaccgtgaattttgagcggaaataccccgatacctttgtcatccacgtgacggccagcgttccggtggcgtggattgagagcggcggcagccgctggctgatggacaccgactgcaagctgctggagagcggcggagcgtccttaacagagggtaaagcccaggtgcgggggctggaggcagtcaatccctcggtgggcagcgtgctgaccgtgccgccggagcagcaggacaagctggaccagctcaagggcttcctggcggccatacaggcccggcagatgacgggcagcctcaccagcttcctggatctcacctccaacaatgaaatccgcttcggctatggggcgaacctgaccgttctgttcccaatgaacggagattttacgcagaagacctattatctacagcagaccctctggaccatggatgagaagggaatcccgcgaaccggcacgttggacttgacctacgacagccaggagggacatctgctgccgaagcggtggctgccggaggcatccactgcgccggagctcagcccgccgcccgcggcggaggccggaacacaaggagagaacgatgccaatgagaagacagatgcagaataagggggagctcgccgtcatggtggtatgcgtggtggtgggcttcctgctggcggcccaactgcgcagcgtcaagctggcgggggcggccgacgccaccaacgccagccgcctggaaacccttcagaacctctacaacgaggtggtggatcagaaggacggcctggctgaccaggtgaagcagctccagggtgagctggagctctaccgggagcaggccgcctccggcgaggcgggcagccaggccctcaaggccgagctggagcaactggagatcaccgccggactcaccgatgtggagggccccggcgtcaccatcatcctggaggactccagtcaggctaacgttaccggaaacgaggccgactacctcatccacgacaacgacctgctctccgtcatcaatgagctgcgttccgccggggcggaggccatctccctcaacggagagcgtattctggccaccagcgaggtgcgctgcactggcgcggtggtaacggtgaacgggcggcggtacgccgcgccctacgtggtctttgccatcggcgatccggacaccctctacagtgcgctgaccatgcgcaacggcgtagtggacgtgctcagccagtggggcatcaccgtgaaggtcactgccagcgaccaactgctcattccgaaatacaacggcaccgtggagtaccagtacgccaagcccatcccggcggatgagggcggagaggaggcggtgggctgatgctggaactgatcggactggtggccggcctgctcatcggcgcctttttcccctggaccatcccggcccagtggtccctctatgtggccgcagggctgctggccgccctggactccgctttgggcggcttccgggcccgggttaagggggagttcaaactgggggtgttcctctccggcaccatcggaaacgcggctatcgcggtgttcctcacctggctgggccagaagctgggactgcccctctacctggccgccgtgctggtgttcggcacccggatgttccaaaactttgcggaaatccggcgggagctattgacctccaagcaaaagagagctaaaataagtcaagatatagttagagacggggaggacggcacaaaataagtcctttttcggccttacccgcgcagttacaacgaattcggttcacataggaggagcagttatggcgtttggactggataccggtcccgataatgtcgttaccatcaaggtcatcggcgtcggcggcggcggcaacaacgtagtcaaccggatggtgaaatccggcaccaagggtgtggattttatcgcggtcaacacggacaagcaggcgcttgccatttccagcgcgacgtttaggattcagatcggtgagaagctcaccggcgggcagggcgcgggcagcgaccccgaagtggggcgcaagtccgctgaggagagccgttccgctgtgtccaaggccctggaggacgcggacatggtgttcatcaccgccggtatgggcggcggcaccggtaccggcgcggcccccatcgtggccgacatcgccaaggagatgggcatcctcaccgttggcgtggtcaccaagccctttaacttcgagggacgccgccgtatgatgcaggccgagaagggcatcgaggaactccgaacccgggtggactccctggtgatcatccccaatgagcggctgaagtttgccaccgatcagaagatcacctttgccaatgctttcgagatcgccgacgacgtgctccgccaggcggtgcagtctatctccgatctgatcaagaataccggcttcatcaatctggactttgcagacgtcaccgccgtcatgcagaacgcaggcatggcccacatgggtgttggccgcgccggcggcaagaacaaggccgaggatgccgccaagatggccatctccagccccctgctggagacctccatcaacggcgccaagggcgtgctggtcaacgtcaccggctccatggacatcggtctggaggaagtggagatcgcggccaacctggtgcagcaggccgcccaccccgacgcacttattatcttcggcgccgctttcgacgacactctggaggacgagatccgcgtcaccgtcatcgccaccggctttgaggaggtggagggagctatgcccaacaagcccttcagcgccgctgcggagaagaaggccgaggcccagcctcaggctccggcggcccccgccgcccctgcggaggaggatcccttcgaggacatcttcaagatttttaaccggggcaagtaaacatttattacaaaagcggcccgggccatgtggcccaggccgcttttcccccttttcaaggggagaaagctgtgataccatagagctgaataccgaaaggaggattcccatgctgtttgtctgttaccccaagtgcaccacctgccagaaggccagggcgtggctggaggccaggggtctgcccgctgaggtgcgggacatcaagacccagaaccccactgaggcggagctgcgccgctggcacgccctcagcggcctgcccctcaagcgttttttcaacaccagcggcctgcagtacaaggccctggccctgaaggacaagctgcccggcatgagcgaggatgagcagttcgccctgctggccaccgacggtatgctggtcaagcgccccattctggtaggggaggacttcgtgctggtgggcttccgagaggccgagtgggcggcccggctgggctgagaccctaggcgggcaggcggcgctccagccaggagagcacgtcccggtacacctcgtcccggttggcctcgttgagcatctcgtgccgcccctccgggtagagccggacggtgagatcctttaccccggcatcccgaaaccagccggccacctttttgacccccgcgccgttggcccccaccgggtcccggtccccggcgaagaaatacaccggcgtgtccggatccatgcgggccagattggctggcttggccaggagttggaggcccaccatcatgtcgtggtacatgcccacggtgggaaggaagcggcacagggggtcggcccggtaggcgtccaccaccaccgtgtcccgggagatccagtccgccgaggtgcggacgggcttaaactggccgttgtaccgccccacagagagggcgtccagcagggcgctgtgggccctgggccccttgaggcggatgagcagggcggacagcgcccgccccgcggctacagtggcagggggctcctgcccggtgccggagaggatggccccgtccaccgtgcccggccagaacataaggtagccccgcaccacaaaggagcccatggagtggcccagcaggaagcagggcagaccggggtactccgccccaacccgctcccgcagggcgcggacgtccttcaccacgtgcttccagccgtcccggtcggcgaaccagccgaactccgaggggttccgcgccgtgcggccgtggcccaggtggtcgtggcccacgacggcgaagccgtgctccgccaggaagcgggcgaaggagtcataccggccgatgtgttccgagatgccgtggaccagctgcaccatcccccggggcggcccctccggccgccaccatgcggcggcaactgtgtggaccccatcgctggagggaaaggtaaattcttgtttgatcaccatggaaacccggctccttttgtgatagaatagcaacaatatcagtctagcctaaggcccggcgcccgtcaatagaaaggaagagcattatgaccgccattgaccgctttttgcgctacgtgacatatgatacccagtccgacgagcacagcgacgccatcccctccaccgccaagcagaaggtgctgggcgcagccctggccgaggagctggcccagatggggctgcacaacgcccacatggacgagtacggctatgtgtacgcctggctgcccgccaccgccgggtgcgagggaatcccgtgcgtgggccttatcgcccacatggacacctccccggacgcgccgggggtaggggtgaagccccgcgtcgtccgctacgaggggggcgacctggtgctcaacgaggagaagggcatcgtcatgagggccgccgagtttgagagcctggccaaatacaagggtcaggagctgatcgtcaccgacggcaccaccctgctgggggcggacgacaaggcgggtgtggcggagattatgtccgccgtggagtacttgctccagcacccggagctcccccacggccgcatcgccgtgggcttcaccccggacgaggaggttgggcagggtgccgaccatttcgacgtggagggcttcggcgcggcggtggcctacactgtggatggcggcgagctgggcgagctggagtacgagaacttcaacgcggccaacgcgggcgtgtacttccacggggtgaacatccacccaggctcggccaagaacaagatgaagaacgcaatcctgatcgctttggagttcgcggggatgctgcccccggcggagacccccgcccacaccgaggggtatgagggtttctaccacctccacgacatgaagggcagcgagacggaggcggagctgcactacatcctccgcgaccatgaccgggccaggttcgaggcccgcaaggagtacctgggccgggcggcggactacctcaacgccaagtacggcgcaggcacggtggagctcgtcctcagggactcctactacaacatgcgggagcagattgaaccccacatgtacctgatcctccgggcgcgggccgccatggaggccgccggggtaacgccggtggaggtgcccatccggggcggcaccgacggggcgcggctgagctacatgggcctgccctgccccaacctgtgcaccggcggggtgaacttccacggggtgcatgagtatatcccggcccaggccctcaccaaaatgaccgaggtgctggtcaatttgctgacgcggcagtaaatctaccaaaaggcgccccctctcagagggggcgccttttggtagattacagcagggtctggaagaactggaggagcagcttggctccgtagaagatgatgatcagtccgcagacaatgttgatgacccgcaggatcttgtcgttgaacttggcggagaagaaggagatcaggatggtgatgcccagaaaccacaggcaggaggcggaggcggagcccagcatgagctgggaggccaccgcgcccgggttgccggcccggaagctgccgaacagcatagtgccgtcaatcagggcctggggattgatccaggtgaccacaaaggccttggcggccagcttgggcagggggatgctcacgtccacgtcccggtccagggtgggcttatcccgcagcaggccgatgccgatccacaccacgatgcagccgcccacgatcagaatcaggcgctgcagccagtcgaagcgctccaccagcgcgccgatgccgaagaagcaggccagcgccaggctgatgtcgaaggcgatcacgatcagggcggtgagcagggcccgccgccggggctgggtcagggcggagttgatgacgaacaggttctgcatcccgatgggggcgacataggccagaccgatggtcaggccctggagataggtcggcatgggggcttcctcctaaaaaagactttccttttttttctttacctggtattatattagcacctatggcccgctgtggcaagagcgcagaatttccgtaccaggtaaggaggaactgaccttatgcccatggaacacgaaaactgcccctgcatggagacctgcccgctgaaccgggccatggccctcatcggcggcaagtggaagatgcagattctctgctccctctacaacaacggccccacccggtacaaccagctgaaaaagaccctggacggggtatccaacacggtgctggccaacgccctgcgggagctggagggggacggactggttcaccggcgggagtacctggaggtccctgtccgggtggagtacgccatcaccgagccgtgccgccagctcatccccattttggacgcgctgggcgattggagcatggccctctaggcgcaaaaaggccgcaggcggagcctgcggccagacagatagggtcagtgggtgaggcggaaccagagccggttccagaaggtgtccttcacatagcccttggagacgcggaagttccactccgcgtcgcgggcccgtttgcggcaatcctgctcgtccccgtcggggcggtcgtagtgggggagcgtcgagctgagccgcccctcgagattgtcgaagaagaaatccataaaaggctcctttccggcggatcagtcccggtcggtgagacggaaacggagatggttccagaaggtgtccttcacgtagcccttggagacgcggaagttccattcggcctcccgggctttgcggcggcaggcgcgctcgtccagggtcatatcgtggggaggcgggagctccgcgttgagcttggcctgtagataagaggcgggaaacgagaggttcatgagaaactcctttccagacagaggcccttttaccgtctccaatctatcatacgccccggggaaagtcaaggagccggatccaggcagaaatgcggaaaaacgccgggtttcggcggttaggagaagatcgtatggcgaaaacactggttttggcggaaaagccctcggtagctcgggaattggcccgggtgctgggctgcaaacagtccggagaggggtatctggagggggagaagtacatcgtcacctgggccctggggcacctggtggagctggcgcccccggaggactacgacaaggcgtgggccaagtgggatatgctcaccctgcccatgctgcccgagcggatgaagacggtggtgatcccccagtccggccggcagttccgggccgtccaggcccagcttcgccggggggacgtgggcgagctggtcatcgccaccgacgcaggccgggagggggagctggtggcccggtggattctggagaaggccgggtggaaggggccggccaggcgcctgtggatctcctcccagaccgacaaggccatccgggagggcttcgcccacctgcggcccgcggcggagtacgacaacctgttccgctccgcccgcgcccgcagcgaggccgactggctggtgggcctcaacgtcacccgggccctgacgtgcaggcacaatgcccagctctccgccgggcgggtgcagacccccaccctggccctcattgtggagcgggaggaggccatccgccgcttcgtcccccaggagttctggacggttaccgcaaagctgcccggcttcaccgccacctggcgggatccgaacggccaggcgcggctctttgaccgggagcgggcggaggagctggccgcccggctggcggggaaggagggggtggtgacccgcctcaggcgcacccgcaggcaggcaccgcccccggcggcctacgacctcaccgagctccagcgggacgccaacaagaagtacgcctactccgccaaggaaaccctggccatcctccagaacctctatgagatccataaggtggtcacctacccccgcaccgactcccgctacatccccgacgacgtggttcctaccctgccggagcggctgcgcagcgtgatggtggaggactacaagcccctggcggcggagctgctgcgcagccgtcccctccagaccaaatatctggtcaacgccgccaaggtcaccgaccaccacgccctcctccccaccgaggagccggtggagctgtggcggctcaccgggccggagcgcaacatctatgatctgatcgtccgccgcttcctggccgtgctgctgccccccttcgagtacgaggaggtggccctcaccctggaggtggagggggaaaccctccacgccagagggaaggcggtgctctccccaggctggcgggcggcctacgaccgcacctttgccccggaggaggaggacgaggagggggacgagaaggagcagagcctccccaccctggcggagggggagcgcctgaccgtccagtccgcccgggccaacccgggcaagaccgcgccccccaagcggtacaccgaggccaccctcctcaccgccatggagcacccggccgcccaggtggccgaccgggagcagggccggattttggaggagactggcggtctgggtacccccgccacccgggcggacatcatcgagaagctgttttccgccttctatgtggagcggcggggaaaggagctggtacccacctccaagggcgtccaagtggtgggcctggccccggaggagctgcgcagtgccaccctcaccgcccagtgggagcgccgcctgggggagatcgcccaggggcgggagcaggagggggccttcgtggacgagatgcggcagtttgccgcccggctggtggcccaggtgaaggccagcgacgcggcctaccgccacgacaaccagacccgcaccccctgtcccgactgcggcaagtacctgctgcgggtcaagaccaagcggggggagatgctggtgtgccccgaccgggagtgcggctaccgccgcagcgtcaagcagaccaccaacgcccgctgccccaactgccacaagaggatggagctgcggggcgagggggagaagcagctgttcgcctgcgtgtgcggctaccgggagaagctgtccgacttcaagaagcggcgggcccagaagtctgcgggcaagggggacgtgcgccgctacctggcccagcaggagcagcgggaggagaagggctcctccgccttggccgagcagttggccaaatggatggcgcagcagaagggagattgaagcatgagctggttttcgatccaggagctggagtacctgctgcgcattgttctggcagcggtgtgcggcggggccatcggcttcgagcgagagcggcgctccaagagcgcgggcatccgcactcacattatcgtggccctgtccgccgcgcagatgatggtggtgtcctagtacggcttttttgatgtcttcggcctggggggaatctctctggacgcctcgcgggtggcggcgggggtggtgaccgccatcggctttttgggcgtgggggtcatctttacccacgggcggacggtcagcggcgtcaccaccgccgcaggcctgtgggccactgttggggtgggcatcgccgtgggggctgggctatacgtcaccggcggcgtggccacggtgctgatcgtcctcttccaggtaattctccaccgctcatcccccctggtcaagacccagcgtacgggcaccgtcgtcctggaactgagcgaggcggagagcgatccggcggaggtgcgccgcctgctggaggagcgggtgtccgccgtggagggggtgcgggtgacccgcctggcagacgggagggcagaggtgaagtgcgatgtgctcttccccgccgggtacaccgccgaggacatcctgcggacattgaagggcatgcccgccatccgttcggtggagatgcaccatccgggctgacacaagagcgaaagagaggcagaatgtatggaagcgataatcagcggaatcaactggctggatgacttcatctggggcatgcctatgatcgtgctgctgctgggcacccatctgtttatgacagtgcgcacaggcttcattcagcgcaagacctttaccggtatccgtctgtccgtgcgcaaggacccagacgcccccggcgacgtgagccagttccaggccctcaccaccgccctggcgtccaccatcggcacgggcaacatcatcggcgtgggtaccgccatcttcctgggcggccctggtgcggtgttctggtgctggcttgccggcgtgttcggaatcgccaccaagtacgccgagtcccttatcgccgtaaagtaccgggtccgcacccccgacgggaggatgcagggcggcgccatgtacgccctggagcggggactgaacctgaagtggctgggggtgctcttcgccgccctggctgccctggcctccttcggcatcggctgcggtacccagatcaacgcaatcgccgaggtcattgagaacaacatacccgtgggtattccgcccatcgcgatcggcgtcgtgggcggccttctcaccggcgtggtcatcatcggcggtatccagtccatcgccagcgtgtgcgagaagctggtgccctttatggcggctttctacgtgctggggtgtatcatcattctggcgatcaactgggacttcctggcccccgctgtgtccaccattctccggctggctttcacccccggcgcggcggcgggcggactggtagggcaggggctcatggcagccatgcgcttcggcgtggcacgggggctgttctccaatgagtcgggcatgggctccgccccactggtggcctccgccgcacagacccgtaacccggtgcggcaggctctggtatctgccaccggcaccttctgggacactgtggtggtgtgccttatgaccggtctggtgctggtcactacgatcatgaagaaccccgccatcgacatggcacagatatccgacggcggccaactcactaccctggcctttgcacagatccccgtactcgggcctgtaatcctggtagtgggcatcatcactttcgcctggtccaccatcctgggctggtcctactacggcgagcggtgcgcccagtacctatggggcaagagggccctgctgccctataagctggtattcgtcgccgtggtggtggttggcccggtgttggccctggatctggtgtggaccatcgctgatatccttaacgccctcatggccatccccaacctggtcgccgtcctgctgctgagcggggtggttgcccgggagaccaggcactatttggggaatctggacgaggtagaccagactgaaattccacgcgtagacaaatgaggagtcaaaacttcttgacatttttaaaccatgggtgtatgcttcctaatgtaaagattatttgacatgtggaggaatacattatgaaagggatccgcaagatggatgagatggagctgcagatcaccctgcgcgccagccgtgccgcctggttcttcctggtgctggccctggtggtctggtcggtgtgggaggcatttcacggaggggacactaccctgcccgccttcctgctgggggcccaggtaatgattttttgcctggtgcagtggatcggccgggccagagcgggggacgaccgggtaaagcgggaatttgtactgtgggttattctcactgtggccctggtggcattttcattgctgctggtgctgggcggatgaagaacagggtcaaggagctgcgaaaggcccgcggcctgcggcaggaggacgtagccgccctgctgggggtgagccgccagaccgtcaacgccgtcgaaaacgacaagtacgaccccaccctggccttgggtatgaagctggcccgcctgctggagactccggtggaagagctgtttaccctagagggctgagaacgccccccgaaccgattcggttcggggggcgttcccgcgccgtaaccatttgagagaaatttgtaacggtttttagaagaattatgtcaacaaaagtggtacactgtatccacctgaccggcatgaggtgtatcaaatgcggataaacaacacagcggccttcgctctggccggagtgatcgccctcaccctggcgggctgcggggagacccttccgccgcccaccccttcggagccgccggaggcgacaggcgctccgcaaccggccgtggagcatggcttcaccttcgcggaactgaggcagtatgagtttgtgtttgccagcggcgcggggagctggggcacggtgctgtatgtgaggccggacggcagcttttccggaaccttcagcgatacgacctgggaggagtacgggggcagcacacgcgccgtcctcctctgctccgagttcaccggccagttcaccgagccggtgcgggtgaacgactatacctattccgtgcgcatcgcccgcatcgactatgagcgggcggtgggcgaggaggcattcgccgacggcttccactattactataccgagcccaggggactggaggacacggaggagcttttgatctacctgcccggcgcgcccctgggcgagctgccccaggagttccggggctgggtggaccacggcgatcagggggaggcgctgctctcttatgccctcaacaacgaggcgcaccagcagggatttttcagccggaatctggtacgggagatcatttacagcctgatcagcgcccgggatgagtcgggcgagctgcaacaacagctccaggacgccacactctctcaggaggagcgggagacaaaggcggaggagctgtaccaggtgtgggacaatgagctcaatgaggtgtgggacgcgctgaaccggcttctgtccccggaggatatggaggtcctgacagcggaggagctggagtggattgcctggaaggaggagcaggccgccctggccggggcggggatggccggcgccctgcgggcggcggagctgacccgggagcgtgtgggtgtgctggaggaatacctggaaacgctgtagcatcagcatgcaaagcgatagaaggtggacagaatgggaaaaaatagaatggttttctgcgcgctggctggtgcgctggcgttgaccctggcgggctgtagagagacggcccccgtgccaccctccggcaaccctgcgcccatggcctctcccgtcccggcggagacggagcccgcggcggagttctccttcgctgatttgcagcggcttcagttctgcttcaccagcggcgcagggggctggtacaccctgctggccgtccggccggacggcagcttttatggcgagtaccacgacaccgacatggggggtggagagccgggcatccatgcggtgcagtggaactgcaaatttaccggccggtttgcccagccggtgcgggtgaacgactatacctactccatgggcatcgctgagatcagctatgagaaagaggcgggcaccgaagaggtgattgatggcatccagtactactataccgccccctacggcctggaggacacggaggagcttttgctctacctgcccggcgcgcccctggccgagctgacccaggagttccggggctgggtggggtactacgagaacaccagggataagttgcccttctacgccttgaataacgaggcgcaccagcagggctttgagagctatgactgggtggagcgcgtccgaaccgacgtggagtgggcggaggagacggcggcggaatacgaaacgaagatcctggaggacacctccctgagccagggggagctcaacgagttatcggcgcagatgttcgacctgtgggacatccagctcaacgaggtatgggccgtcttgctgcagatgctgcctcaggcggacatggaggccctgacggcggaggagctggagtggatcgcctggaaggaggagcagctcgcccggacgggcgaggaggcgggcggcggctctctggcgattatgctccaggcccagcgggcggcggagctgacccgggagcgggtctatgtgctgctggaatatcttgcatgacaaagcgcgggtgggcgcggcagtttgccgtgcccacccgcgttttttgctataccggcgaatggtactgggccgcgtactccgggtagagggccgtcagctccgccgaaatggcccggtactcctccggcgcgatgtcccgcgtccgctcgtaaacgtacaccgtcaccccgtcctggagggggaaggaaacgtccagccgccggtaggcggtgccgatgccggtgccctccagcaccggctgggccaggacggtgaccaggtgctggttctcctcccccaggtggtactgaatggggtcggccacgatgaggtagtcgcactccagggcggcccaggagaagccgtcccgcttgtccaccgtggcgaaggtggcgacggcggttttggggccctccggctggggaatgcccgccgagcggagggtgttgtcaaagatgctggagttgaagacgaaggaggaggcgatcaccgccgctgtctttggctcctgggcggacagtccatccacatacacccgcagggccaccaactgggccagatcgctccgctggggcggggcgtaggtgaaggtgggcaggggggccagggagccgatctcctgggggctggcgggctggggccgggggaggagggagctgcccagcatgcacagggccagaacccaggcccccgcccggacgggtctgcgggcgggcagggcctccagccccagggccagggcggcgcacagggcgggcagatagagcagcaggtgctgctgcccgtgggactgcacacgggtgaacaggagcaggcacagcaccggctgcgccaaggtgagcagggccgtgtaccgggcggcaggccgccggaggaggcaccacaccacgcacacaagggcggcggccatgagcacccagccgaagtagcggcacagcatcaccgcgtccacccaccggccctggtcgtaggccgagtaggtgtcaaagtagttggagcgcagtacctgttcaaccaggaagctctgcccgaagaacagggagcacaccacgccggaggcggccatggcggcaaaggacttccactgactgcggcgcaccgccagggcggccagggatgccagcccgaaggacacggtaaagaagaagaagtaccgccgcagcaggaacaccagggtgagcagggccccggtgaggatgccgcgggccgactgagggcgctcttggtcggtgtagatcacaaaggcccagatgccggcccccgccgccgccacgtccacaaagccggtgagtccggtgtagagcagcatgggggtggcgcaggccagcagcaggccgccccggcgtacccgccgggccagggccgccatgcccgccagggcgggcaggacgtagaggttggcgatggcgaagaggtagacgtaccgcccggtacccagcacccgcatcaccagggagatgggccaggagagcaggtagttgtactcctgggtgatgacactctggagcaccagccgcacctgggccagatccaggctctgacccgccagcatggtgctggagctccaatagatgttgctatcccagtagtagaccgtggcggagcccgcagcgtagagggcggtgagaacattcaccgccagggccagcagcagcagggctctcccgcggggcagctccaggcggccgaaccgccgggcggcggtggccagggccagcacgacgcccgccagtaccagcccgctgcccagggcgcagaccagccggaaggggagacgcccgatggccatatctcccgcggagaagaggtcgtagctggtgtccagcaaagccccaaggaaaaaggccgccccagccagcagggcggtcctccaggtggggccgaacgggagcagcaggcgggggatcagccggagccgccgcgccgcccccaccaccagggcggccagcgccgcggcggcggccagaatggccgggccgggcacgcggccgtacagcacggcccaaagacgcaccagagccaggccggacaggcagccccacgccgccagtccggccagtccctggagcagggtgcgcggcttcatactcagccgggaggccaggtcatgtcccggcccgccagcacgtggaagtgcaggtggtgcacggactggccggcctgctcgccgcagttggagaccacccggaaatcggtgatgcccagttccttcgtcacccgagagatgacctcaaaggcgtgggccaccacggcggaattttccggggagatctccccgcaggagccgatgtgggccttggggatgaccaggaaatgggtgggcgcctgggggtcgatgtcgtaaaaggcgtacaccagctcgtcctcgtaaaccttgttggaggggatctcccccgccgcgattttgcaaaacagacaatcgctcatgctatatcctccttttccgcggatttgactctagtatagcacacaggaagcggaatgtcattcctttgaggcggaaaaaatcgggggccgcggatgcttccgcggcccccgttcgtgcgctcaacaggagacaaattgattccgctccgggctgtaccggcagtcgatggcggccagccgccggctgacctcgcccacgtcgatctggaggtcgtcgcatagagcgtccagtgtggggtaaaagtcccgcagcttggtattgaggtaactgagcagaatcatagggtcctggggaagcataggtgtaactctcctttgggtaaaaatgtgttcgtttgattctatgcggcaaatgcgataagtgcctctgctgcacacgtttatctgtggggcggcaagcatctgcgccatgccgtagggacgggtgcccgcacccgcccgtcggcggcttacagctccagcttctcggcgaccaggtcgtctaccttggccagcgcgtcacgccccacacgaccatgtcgtgcgggggaccccgcattataatctgctcagggcgaataaatcgccctggcatcaagattttgcctgcggcaaaacgcttgagacgccgcagctgcggcggagctggacgacgcgccttctaccgaagcgggtgcttttgttacagccccagcttctcggcgaccaggtcgtctactttagccagcgcgtcgtccagcttgagcaggtcatttcctccgcccatggcgctgtccggcttgccgccgcccttgccgccgcagatggcggtgacattcttgatgatgtcaccagccttgacgcccttggacacagcctccttgccgcagacggccaggaaggtgatcttgccgtcgttgacagcggacaggacggccaccacattgggctgcttgtcccgcagcatgtcgcccatctggcgcagcttggccgcgtcggcgttgggcagggtggcggtgagcaccttcagctcgcccagatcgtggccgcccatgaggaagcgctcggtctcgccggcggcctccctggcctggaacttctcgacggtgtggcgcatctcccgcagctcggccatattctgctcggccttctcgcgcagctcggcgggcttggccttgaggacggcggcggtctcaaagagaagggactgggcccggttcatggtctctagggacttaaggccggtggtggcctcgatgcgccggacgccggaggccacggagaactcgctgtcgatgtggaatacgcccaccttggcggtgttgtccaggtgggtgccgccgcagaactccaccgagaagccctggcccatgtccaccacccggacggtgtcgccgtacttctcgccgaacagggcgatggcgccccgctgcttggcctcctcgatggtgagcacctcggtgctcacctcgtagccctccagcaccgcctcgttgaccagggcggacacctgggagagctcctcggcggtgagggcggcgaagtgggtgaagtcgaagcgcagcttgtcgggctccaccagggagccggcctggtgcacgtggtcgcccagcaccttgcggagcacggcgtccagcagatgggtggcggagtgggcacgcatgacggctttgcggcgcttgacatcaatggaggcagagacggtgccgcccaccttcagcacgccctgggtcagcttgccggtgtgcatatacttgccgcccttgttcttctgcacgtcggtaacctggaaggtgacgccgtcggcggagatgacgccgtggtcggccacctggccgcccatctcggcgtagaagggggtcttgtccagcaccacaatggcttccacgccgggcatgagctcctcggcctgctcgttctccaccaccagggccaccaccttggcgtcgtcaatggcggtgtggtcatagcccacaaactgggtctcgggcacgtccttgccgaactccacgccggcccagcccagatcgcccagggcctcccgggccttccgggcgcgctggcgctgctcgtccatctgattgtggaactccgcctcgtccagcttcatgccctgctcctccaccatctccagggtcaggtcgatggggaagccgtaggtgtcatacagcttaaaggcgtcggcgccggagaaggtgctctcccccttggccttgtgcccggcgagcatgtcgccaaagatcttcaggccgctgtcgatggtcttggcgaagttctcctcctcggtgcggatgaccttggtgatatagtcctgccgctcccgcagctcgggatagtggccctcgttctcacggataacggtgtcgcacacctcgtagaggaagggctcgttgacgcccagcagcttgccgtggcgggcggcccggcgcagcagacggcggagcacgtagccccggccctcgttggaggggagcacgccgtcgcagatcataaacacggaggagcggatgtggtcggtgatcacccgcagagacacgtccttggcggcggtctcgccgtagtgggcgtgggtgatctcggacaccttgttggtgatgttcatgacggtgtccacgtcaaacaaggaggccacgttctggcacacgcaggccagccgctccaggcccatgccggtgtcgatgtttttctgcttgagctcggtgtagtggccctccccgtcgttgtcgaactgggagaacacgatgttccacacctcgatatagcggtcgcagtcgcagcccacggtacagcccggcttgccgcagccccactcggggccccggtcgtagtagatctcggagcaggggccgcaggggccggagccgtgctcccagaagttgtcctccttgccgaacttgaagatgcgctcggcggggatgccgatctcctcgttccagatgcggaaggcctcgtcgtcggcgggggtggtctcgttgccggcgaacacggaggggtagagccggtcggcctccaggcccacccactcgggggaggtcaaaaactcccatgcccagtggatggcgtcccgcttgaagtagtcgccgaaggagaagttgcccagcatctcaaagtaggtgccgtggcgggcggtgtggccgatgttctcgatgtcgccggtgcggatgcacttctggcaggtggtcacccggtggcggggcggctcctgctccccggtgaaccagggcttcatgggcgccatgccgctgttgatgagcagcagggaggcgtcgttctgggggatgagggagaagctgggcaggcgcagatgcccctttgtctcaaagaatttcaggaacatctcgcgcagctcgttgaggccgtagttcttgtgcatggacagaccaaactcctatctgtaaaaaaataagctccgccccggttaggggcggagcaggttcactccacggtaccaccctaatttgccccggaaaggggcatctcagtcatccggtaacggggatggggcgtcccggtcgtcccgggcagctcggaagtggcgcgcagacccgtgtcgcggagggctctcaccgtcccctctcgctcggcgcggcgtggcctgcttggcttcgtcatcgcgtttcttgtgatagctgaattattctatcacatttttcgccgttgtcaaccgctttttcggcaggagggagcccaaaaagaagagcatgggcggcagcaggccggccatgaacatggccgcgaaccaggcagaggactggaaaaaggcgtttaccccggcgtccctcagggagcctgagagcagatccagggtgaggagcatgaacagggcggaagggctggccagcagaaaggagaagaccagaagggcaaagcccgtgaaggcgagggggaacagcgcctcccgccccgagaagagcagcagaaggccgcagcccccgaaggcccagccccaggcgcacagggcgggatagagcactgccttgcagccggttttccggtctgggcggggccagccccgcaggcgggagaccacccagcctgcgggcacatagagggccatcagcaggaggacataccaggaaaagagggcgcggccgtgcgcgcagtcgggcaggccggccagccccagccatcccatccagcccaaaagggagaggataaaatgtccggcggcgaatccgccgaagcggccggggacggttcctcttggtttcagacagcatcacctcttgcggccagtatacgccacaataaactgtatgtcaacataaatttaatgaaaaacaataaaaataaattgagaagcagggcggcctcatgggccgccctgctgtgcatgattaggacgccggggtttgcttggaagggttccgccggaacagggcgaacaggttgcactcccggcaggcggaggaaaagctctggccggtaaagagccagcacaggggcttgacggacatgagcagggccacgcccgccaggcagctgagcaggatggccagatagtagccgagctggagggggatggtgtccaccgcgggggtgatccaggccgtccacgccttctgccagaactggatggccatggggtgtaccaggtagacgccgaaggaaagcccggacagggcggtgagggcccgcccgctgctccggccctccccataggagcgcgccagcaggaacagggccgcagccagcacggcggtaaagagatgcagatagctcttgatgcgctcgtcgtagacgccggtgcggctggtgagccagaaggtgccggcggcgatgacggcaaagctggccgccgtcacgccccacagcgtcccccggcgggggagcttttgcagccgggccagccgggcgcccagaaggaagtagcccagatagccgcccacaaagtccagattcagcgtccagtggacggtgagggcgctctgccaggggccggcgggggccagatcgcagagggtgtccatgccgatggtggcgatcagccacaggcccaccaggtagttccagtgggcctcgctcaacccatcggtcatctttttgagcagcggagagaccagatagatgggcaccagggcgtacaagaaccagtagggcaccatcaccggcgtgttgagcaggggaatgagcttatccagggcggcctgggggccggagagcacgccggccagggcgatgacgacacccgaccaggccagcagagggatcagcaccttgggcaggcggcggcgaaacagggtgcccagctccgccgtccgggggtgggacaggagcagcgcaccggagagcatgaagaacaggggcaccgccgccgtggccagggaggagagcaggttggagaagtgccacaggggggtgccaagctggcgcagggcgcctgccgcggtgtggaggtagaccacccccaccatggaggccacccgcagcagatcgtagtcccagcggcgtcgggacagcgcgctcacaggcccaccgccttccgccgcaggagggacaggggcggggcctggacagggagcctcagacggaagggcatctggggcttccgggcctccaggatgggcaggccgtccccgtcggtcaggccctccgcccggaaggagacggggcgcacgccggggcccaccagctccagctcgtccccctcggcaaacttgttgcgcagctcacacagggcggcgccgtcgggggcgcaggaggtgaccacccccaccacctgccagtcccgcaggtagcgggcgtgggcggtgtgctgccccggctcgccgtagtagaagccggtggagtaggggcggtggctcaccttgtccacctcggcccgccacaccggatccagcggctccccggcctgggcggcatcaatggcgtggcggtaggcggcggtgacaatggcggcgtagtaggcgctcttggcccggccctcgattttcagcgaatccagtccggcgtccatcagctcgggcacgtggtcgatcatgcacatgtccctggagttgaggatgaaggccccgcccgcgtcctccccgatggggaaatactcgccggggcgcttctcctccaccagggcgtactggtagcggcagggctgggcgcaggcgccccggttggcgtcccgccccgtcatgtagttggacagcaggcagcggcccgagtagctgacgcacatggccccgtggacgaaggcctccagctccagcgccgggggggccttggcccggatctcccggatctcgtccagggacagctcccgggccaggatcacccggctggcccccagctcataccaggcggcggccgcctggtagttggagacgctggcctgggtggagatgtgggccttcacgccgggggcgtgctttttcagcagggagagcacccccacgtcggccaggatggcggcgtccacccctgccgcctggaggaactccagccactccggcaggcgggccgcctcgtcgttgcggggcatggtgttgcaggtgacgtggacggccaccccccggctgtggcacagctccacggcctgcctgagctcctcaggggtgaaattgcccgcaaaggagcgcatgccgaaatcggggcccgccagatagacggcgtcggccccgtaggccagggacatgcgcaggcgctccatgtccccggcaggggagagcagttcgattgttttctcagccattttgataccgctcctgtgaggcgataaagttctgctgttcccggtaggtggcgaagaagtggtgctttccgtcgtcccccagggcatagaagtagtacctggtggagtcggggtacaccgcggccttcagcgcatctacaccggggctggcgatagccgtgggggtgaggcccttgtgggtccgggtgttgtaaggggtgtcggcgttgaggtccacctcggtgccgccggtggcgtagaggatggtggcgtcgatgttcagatagcccgccgtctcgctggtggggttgtccaggcggttgtagatgaccgaggcaatcttggcctggtcggagccgtcggtctccttctcgatcatggaggccacggtcaccacatcctggatggtgcggccgtcgttctgtacctcctggcgcatctcgtcggtgaagatctcgtcaaagcggaggatcatcttgttgagcacgctcaccggttcctcgcccatatagaactcgtaggtgtcggggaacaggtagccctccagccgcttggggtcgcccaggggcaccacgcccttgaggaaggagaacttgaagtcgtaattggcagcggcctcctccaactgctccaccgtggacacccccttctcctccagaagggcgaagatctgggcctctgtcatgccctcgggtatggtgacggtggtggtcatgcggttggcggaggaggagcccatgctggagatgagggcccggtagtccatgtcggtgttcagctcataggtgcccggggtgatcttggccccctcctctccggccttgccggaggtgtgggtcagggaacagaagagcttgaacaccatcttgtactcgatgaggccctgctcctccagcttgtcggccacctggcccaccgtgtccccctcgtcgatctccaccacggcggtaagggcgggcttgttgagggccagcacatcgttggcccagatccagcccacgccggccaggagggcggagatgccaagcacaaaaatgacatagagcagcacaccccagccgccgagacgctttttccggcggcggggggcggagcggcgttctccctccgggtgggagggggcgacccgcctgccgccgtggccgctcctcgactgggccggccggcggccctcattccggtattcttcctgagacataggttcaactcctaacgaaaaaacagatgacccgccgggaaccactttgccgccccccacatagtatgagccagataaaacaagtgaggtgaatcaagaatgtgctgtggtaacaatggttggggcggcggcaacggctgcggctgcctgtggatcatcctgattatcatcatcctttgctgctgctgcggcggaagctggggcggcagtggctgcggctgcaactgtggctgcaacaacaactgcgggtgcaacgacggctgctgctgagccgtttacgtaccgtccggcgaggagcggggcctttgggccccgctcctctgcgcatccgcccggtacaggccgtgctcggtgagcaccagctccaccccccggtcatggggggcgcgggggacttggggcagcagcagcgccgtccggcacagggcggcggtacagccggcgtaatccgccagccagcggtcataaaagccgcccccctggcccagacggccgccggaggggtcgaaggccagaccgggcaccagcacaaggccgatggcgtccttgcccaccagggggcagtcctcccccggctccagcatcccgtaggggtgggggatcagcgcgctgtccgtccggacaagccgggcctccaggccatggcccggcagacagcggggcaggcagaccgccttgccccgcgcccagagggcggggaggaggcgggcggtgtcgggctcgccccccatgccgtggtagagcagcagggtatccgccgcctccacctggggcagggccagaaagcgggcgaacagggcgtcatcgctcgcccgccggacctggggagagagctctctcagatattggcgggcccggcggcgcagctccgccttctcagccgtggtagtggacggcatggcagacctgccgggcggcctctgcccccttgagcacctccaccagcttcaggccgaaggggaaggaggagccggcggcctcgccggtgatgatgtggccgtccgccaccacgggagcgcccttctgcaccacggcggagcccatcagctcctccatgccggggtagcacaccgccctgcgccggtccagaaagcccaggttggccagaatggtgggggcggcgcagatggcggccagccaccggccctcgtcgtagcagtgttgaatcagggcctgtacgtggcggtcgccctggagcacctccacgccccccagaccgccggggagcaccagcatatccaccgcctcccggtccagctcggccagggtcaggtcggcggtgacagtgacgccgtgggcgctggtgacggcggggccgtccacgcctaccagtcggacctcaatgcctgcccggcgcagcagatcggcgggcaccagggcctcgctctcctcaaatccggttcccaacagaatcgctaccatgtgaaacagcacctttcttttctgttcttctatcctaaaatacgggcggccaccgcccagatgtcacggtgaatgtcctctgtggagcggagcgcacccgccccgtctacacaggggattttgacccagcccagacagtccgccgcccggagggcggttttgcggcacagggcgagatagccggtgtccacctcgtggatgtcacccttggtatgggtggacgcctcccggctgcggaggaggcgcaccgcctgctccgtgggcatgtccagatagaccaccagatcggggaggggcaggcccagcttgccgcactcgaagtcaaacagccagcggaaaaagccctcccactccgcctcgggcagcttgctggcctggtggacggcgttggaggtggtgtaccggtcggagagcaccagcccgccgccccggtagtagtccccccacacctttttccatgaggcatagcggtccaccgcgtaaaaggtggaggccgcgtagggattcacgtcggaggggtgggaaccgaactccccgttcagatacattttcaagagggcggaggagggctcctggtactgggggaagatcagccgccggaaggggcgtccctcccgctccatccgctcacagagcatgcggaactgggtggacttgcccgacccgtcggtgccctcaaacacaatcagctttccctgcatgctcacttcccccgcagccgggcgcccgccgcctggaccagcaccagaggcagcttggccatgcgtccgatgcgcttcggttccttggccaggcggtagagccactccagccccaacctctgaaagccctccggggcccgctccaccacgccggcgaacacgtccagggagccgcccaggcccaccatcaggtgggcgccggtggcggggccgtgctccaccatccacagctcctgcttgggggcccccaggcagacgaacaccacgtcggcggcggcggccctgatctcctccaccaccgggccgtcctcccggaaatacccgtcatgggtgccgcagacgatgaggccggggtgggcgtccttcaggttggcggcggccagctccgccacgccgggcttggcccccagcaggaagagccgcttgccgtgccgggccatccacgccagcagccgctgggcaaagtcgatgcccggtaccttgcccttcagcgggcggcccaggattttcgcggagtagaccacccccacgccgtcggccagcaccagatcggcccccagcagggcctgccggaaggccggattgtgcttggcggccagcagaaactccgggttgggggtgaccgcgtagtggaagcccccggcatccaccagggctgcgccggccgccgcagcctcctccagcgtcaggtcgtcgaagccgacgcccaaaacatcagtcctcaaaatacattgcctccgattggaattctgtccataatttcatgccattttaccatagatagcgaaaaaagtccatgcggaaaccgggaaatcaggggcgggaaagatgaagtttctgtgaagaatcacgaagtttcccgttgacaaaccgggcggatgtgctataatagggcacagctaattctttagctgttaaaattgctaaagagcggtagggattggaggaactcgattatgaatggaagaaaactggccgcttttgccctgagcggcgttatggcagtcggcctgaccgcctgcggcggaaacggcgaaccgaatgagtctcccgccggcggctccgggggggaggcctatctggtgggtatctgccagctcgccccccacgacgcgctggacgcggccaccaggggcttcaaggcggctctggtggaggccttcggcgaggatggggtgaagtttgacgagcagaacgccggcggcgagtacaacaactgcgccaccatcgtggacggctttgtgtcggaaaatgtagacctgatgctggccaacgccacctattcgctccaggcagcccagtccgccaccgccgacatccccattctgggcaccgccatcaccaactacggcatcgccctgggcctggacagcacagaggacgaggtgctgggcggcaacatctccggcacctccgacctggccccgctggaccagcaggccgccatgctccaggagctgttccccgacgcggagaacgtgggcctgctctactgctccgccgagcccaactccgtgtttcaggtggagaccatccagggctatctggaggagatgggctacacctgtacccagtacgccttcaccgacgtgaacgacctctccgccgtgacccagtccgcctgtgatggctccgatgtgatctatatccccaccgacaacacggcggccaacaacaccgaaaccatcgccaatgtagtcatccccgccggggtgcccgtggtatgcggcgagtctggcatctgctccggctgcggcgtggccaccctctccatcagctatgaggagctgggccgtatcaccggtgagatggccgtccagatcctcaccggcgaggcggacgtgtccgagctggcaatccagtacgacacggccgtgaccaagatgtacaacgccgcgaactgtgaggcgctgggcatcacggtgcccgacggctatcagcccattgagtgaggcgcaaacgtcagaaaaccgcgggaatggacctccatttcccgcggctttttggcacgtgcctgtctgtaatccactttcgagcgggaggcatgaagaaagatgaatgttttggtaagcctgttcaactccctgcccggcgccgcggggcaggggctgatctggggcattatggccatcggcgtctatatcacctataaaatattggatgtggccgatctgacggtggacggctccctggccaccggcggcgcggtggcggccctgtgcgtcagcatgggctggaacccctggctggcggtgctggcggcggtgctggcgggtatgctggccgggctggccaccggtgtgctgcataccgcctgcggaatacccgccatcctggcgggtattctgacccaactggccctctactccatcaacctgcgcatcatggccatcggggatgaaaatgctaccaccaaggccaccctggcggtgagtgtggacaagaacgacctgctcctgtcctcccgctacgtgcgggagcctgcgctgaacaaccctctgctgctgctggtgctgctgacggcagcggtgatcgcgctgctgtactggttcttcggtacggagcagggctccgccctgcgggccaccggcgccaaccagagcatggcccgggcccagggcatcaacaccaacaccgccaaggtcctgggcctggtggtgtccaacggcctggtggccctggccggcggcctgctggcccagtatcagggcagcgccaccatcgacatgggccgcggcgcaattgtcatcggcctggcggcagtcatcatcggcgaggtgctgctggacaaggtgttccgcaacttcgccctcaagctgctctccgcggtgatcggcgcgatcatctattatgtggtcatcaccgtggtgctccgtctgggcctggagtccaccgatctgaagctgctcaccgccctggtggtggcggtgttcctggccgtcccctattggaagggccgctatttcaccaagcccgtgcggaaggagggcgctccccatgcttgaagtgcgcgaaatttataagaccttcaacgccggcaccatcaacgagaagcgggctatgaacggcgtcaccctcaccctcaacgaaggggacttcgccaccgtcatcggcggcaacggcgcgggcaagtccaccctgctcaatctggtggcgggcgtctacccggtggacagcggctccatcgccatcggcgggcagaatgtgacccgcctgccggagcacaagcgggcccggttcatcggccgggtgtttcaggaccccatgatgggcaccgcggccaccatgcagatcgaggagaacctggccctggccgcccgccgggggcagagccgctccctccgccccggcatcacccgcgccgagcgggagcagtaccgggagttgctgaaaatcctggatctgggactggaggaccggctgaccagcaaggtgggcttgctctccggcggccagcggcaggccctgactctgctgatggccacgctgaagaagccccggctcctgctgctggacgagcataccgccgccctggaccccaaaacggcggccaaggttctggacaccacggagaagatcgtgcagcgggataagctgaccaccctcatgattacccataacatgcgcgatgccatcgcccacggcaaccgcctgatcatgctctacgacggccggattgtggtggatatcgcgggggaggagaagaagaagctgaccgtggagcagctcctcgcgctgttcagcaaagccagcggctcggacgaggccgacgacaagctgctgctgtcgtagccgctggcttccccatcgcagatggggcggcgcctgcgccgtgcaagcgttttgccggaggcaaaaccttgccgcgggcggaattcacttctgcccgcgcgggatgaaatccggggccccggctggcctgggccggctggggcacagcggttccgacgaggccgacgacaagctgctgctgtcctgagcggtaaaagcaaacagagcgccccgccgtccgtggacggcggggcgctctgtttaagaaggaagaatcccgaaatagttcagcagggtacaggtcagggcggcggcctcctcccgggtggtgacggcggccgggtcaatatcctccaggggctcccacagcaggttgatggtgttgcccagcagccccttctggctcagggccagcagccagacggagtccctggcccagccggagtaggagagcagcccggcagcctccgccgcgtctgcgggcatctcttgcagggtgaggtccatatacatattgagccgctgggacagccgggccatgatggtgatgaactgctcgtggcttactggcgcgtcgggggcgaagcggccctctcccacgccctccaccaggcccagccgggccacggcgttgacgcacaggccgtaccagtcgtccatggatacgtcggtaaactggctctcgccggtgggaacccgacagttgagggcctgggccagcagggcgcagagctgggcgcgggtgagggagccctcgggctggaaggctccgccgccggttccggccaggataccgtaggtggccagccggtcgatctgggcggcgtagggggagccggcggtgtcggtaaagctgcggtcccggtaactggtgaggacataccgccccaccagctccttcacggtggtgtcggcccagccgtcggggccgccggtgccctccagcacccggacgccgtcgggcagagcctccagcagagcggtaaaggcgtcccggtgtgcttcactcagggcggtgtccagctccacataccagcgccagttgaagtcgatacgcagatagccctccgtggagcccttggggctggaggcggagagaagggtggcgacctcgggggccagatcggggtccaccagcaggtgggggatcaggcccacggtgtcggtggtggagccggagggggcgtagaagcggtaactggtgatcttgatggcgtccccgtcggggaagtagtcgggcagggcgcgttggtccagaaccgtctgggccactcccttgccgaaggtgcgcccgcccaccaggatgccggtattggtgtcccggatgtcggaggcgaacagctcggaggcgctggcggtctccccgtcggtgaggacgatgacgggggagagggtgcgggcgtcgtcgttgctgccatacgcgccgtaggcgccggtgctgtccttgaggtaggccagcacgccggagccggtgaagcagcccgccgcgcccatggccgcgtctacctcaccgccgccgttgccccggagatcgacgatccagtggtcagctccggcggcggtgtcctccatgccgctgacgaagtgggccaccgtctcgccgccgaaggtgtcgcagtcgatgtagccgatgtggccgtcccacagctcggtataggtggcggggacggtgatggcccggcgggtgaggacggcggtgtactccgccccgtcccgccggtaggacagttccacccgggtgccggggtcgcccttgagccaggcggccacagtacccgcgtcctgcccggcggtggagcggccgtccacggcggtgaccagatcaccgggctggaggccggcgtcggcggcaggggtgttctcatagacccgctggatcagcggcccgtccgccgtgaccagcgagtagatgcctacgcccacggtatccgtatcggacatggagccggtaaaggccccgtactcctcgggagagaagtaggtggtgtaggggtcgcccagggcctccagcatggcctggatggtgttctggtccagaacgtcctcggggacctcgtcgatgtaatagtcctgtagcagctcccgggcctgatcgggggtgagggcctgggcggcgggagagaggagcagggtcagggccagggggagggcaaacaggcggctgagcggcatacgcttcataggagggcctccttggacaaatatgttatgtaacccaattctacgacaaaatgggagcgggcgcaaggcccactcccattttgtatctatttgtcatttttacgcctgcgccccgcgctccggtattatgtcatccggcgccctcgtgggccagaatccagcgggcgatatccgcgatcacctgggaatccacggcctggggctgctggtactcatgcagaacctccgcgatggcgccggtgggggatggcatgaacaggtggttcaggccggggtacagatggaaggcggcgtcagggtgggcggccagaagggcctcgtaacggcggaagtcccgctccaccgacagatgggcgtcccggtcgccctggagcaccagaacgggcttggtcaggcggcggaggtactcctccggggggtgtgtcaggatctccttaaagtaccacgcccagaggttccccagaatgtgggtgtgctgggcgtcctcctccgccatgcgggggagggcggcgaactgctcccgcagggcctgaaccagaggcgcggcggcggcgcgctgctccgggggcatggccgccagagaggcctcgttctgctccaggatcagggcgtccagagtgcggggggtgcccgcccagaagatgagcccggcgaaggcgccgccctccgcgtcgatgcggggggccagcatgccgcccatgctgtgccccaggagatagacccggtccgggcggatcaggggttctgcccgcagcagggcggcggcgcacagggcgtcccggatgacctcctcctccacgctgaggcggccctgaagggcgtcggccagccgcttcccgtgggcaaaggtgcgcttgtcgtagcggaggctggccaccccgaggtcggccagcccgacggccagatcccggaaggggcggtttggacccacggcctcgtccctgtcctgagggccggaaccgtggaccagcaggacggcgggaaaggggcccgcgccgtcggggagggtgagcaggccggggaggggataatccgcgtcggcggccacagtgatgggaagggtgcgcatgagacggcctcctttcatatagggcggaggtgcgcctacgcctcgcccgcgatgcgcacggcggtgccgtaggcggtgatctccgccgccccctgcatgacggaggcggaggtgtagcggatgccgatgaccgcgtccgcccccatggcctccgcgtcgtccaccatgcgcttggtggcgatctgccgggcctcggtgagcatctgggtgtagctctcgatttcgccgcccaccagggtcttcatgcccgccataaagtccttgccgaagttcttggactggaccacgctgcccttggcgatgcccagggcctcgattttcttgccgggaatatactcaatatttagaagcagcatcttcttctcctcctcgaatctgtttgatgcgctgccacagggccagcagcacgccgatgatgaccacgccgggaatggcgagcagaaagagcatcagccccaggggcggggcctccgccggctccaccgtcaggccccagaccatcagggcgatgaggccgcccatcagggccacgaagaccagggcggcggccaccgtcccgccgtagcgggtgacaatgtcgttttttcggatgttcataaactgcgttcctccctcctccatccgctccatcttctccagccagcggcccgcgtccaggctggccaattgctcgcccgactccgccagctcctggcagagggagcgcatggtggccagattgtcctgggcccgctccaactggatgatgtgccgccgcacgccgtcggtgagggtcagggtgccctgctgcatcctccgaatctcctccagggggacgtccagcttccgcagcagcttgatcttccgcagggcctccacgtccgcctcgccgtagtcccggtagccgttgtccgtccgaccgggggagagaagcccctccttttcatagaagcggatgtttcgctttgtgacgccgaccagctgctcgacctcgttgatcttcactgtgtatcacctctgacagccctaccatacaccctctaccgggtggaaggtcaagaaaaatctttctgaaaccgtagtatacaccggcgggagggaaattaccaccctccgtcccgatgaacggactgggtaccggcagatcctctcacggttctgggcaactgtgggggcggccctggtggtcgcctcaatgcccctgcgctggggaaatcctctccgggcggggacaagccccgcccctacgttccagcgccgttccccggttttctcacatacaggccggtgcggcgggggcgttacagcgtaagcccccgccgccggaaagccgccggcagaacagcccgggggaagttccaagaagggggaatcgcaattcccccttcttggccgtttcaaggggtggattgttaaggcgggggaaatcggaatcccccgccttaaccggctctttcgcccctttctggccgctcagaaaggggtccgccggaggcatgacaagaaaacaggtgtcaaaaagggtaacatggaaggtacgtcagcccggcacaaggcgggccgatgtgggcatcggcccctacgcagggaaaaccatttgcgggcagccacaagggccgccccttcacagtaagaatgtgattccggatatacttgcaaataaggccacgccgtgtataattacattcatatggtagcagactcacaaccggatgccacaaaacagtagcatttggttgaggtgctgccaaatgtattttcctcgtctggaggatttgcgggtcgatcacgacaagacgcagattcaaattgcagaatatttgaacttaaaccgagaggtttaccgccgctacgagaagggactccgggagattccggtgtgggctttagtcaagctggcggagctctaccacaccagcaccgactatctgctgggccggaccgacaacccctctccgccccatgcgtaagctggcctggtttgccgcttcctgttcggcggcggtgttcctggcggtctatgtgctgccggagggggcgctggttccgctgggggcggtgtgcgccctggcggcgctggccgggctgacgctccggggagaccgccgccggcgggtgcttttggcgggctttggcctggccgcgggcctgctgtggacggcggcctacggcgcgctgttccaggcccccgcccgcgctctggcggggtacgaggggccggtggaggtgacggtggccgactggccccaggccacggcctacggcagctcggtgctggtgcgcctccacccggtggaaggttggccggtcaggacccttctctatctggacgcccccgcgcccgacctccggcccggcgatgggctgaccgtccaggcccggctccgggcggcggataccatcgcgggggagtctaccgactattattacgccaagggcgtccgcctgatcgcctacggcgagggggagggggagacggcccgccccggccggccgcccctgtggacatggcccgcctatgtgtccaaggccctcaaggaccgtgtggccgccgccttcccggaggaggccgcgcccctggtcaccgccctgcttaccggggacaggtccgggctgtccgacggggactatgccgccctccgccggtcggggctggcccatgtcatcgccgtctccggcctccacgtctccttcctggcggggctggcggccgccctgctgggggcccggcggcggcgcaccgctgtgtgcaccatcgccctgctgctctgtttcgcggcggtggtgggaaacaccccctccgtcctgcgggcggtcttcatgcagtccatgcttctgctggcgcccctgctggggcgggaggaggacaagcccacctccctgtgcaccgttctcatgctcctgctgctccaaaatccctacgccgccgcgtcggtgtccctccaactgtcctttgccgccgtggcggggatctatctcttttccgggcctctcaccgagcggtggacggccaggctccccgccaggcccaagggcttctgggccaaaaccggctgtctggccgcccggtttgtcctgtccagtctggcggtgagcctgggggccattgccttcaccacgcccctgaccgcctggcacttccagtcggtctccctggtggggccgctggccaatctgctctgcctgtgggcggtgtccctggccttcctgggcgggctggcggcggcggtgctggggctgttcctccccggcccggcggccctgctggccctcccggcggcgctccccgcgctctatgtccagcggatggcggacgccctggcggcgctgcccttcgccgcgctttccacccagtcggtgtacttgaagctttggctggcgctggtctacgccctgctgctgctctatctgctcgggcggggggagaaaaagcggcctctggtacccctgggcctggggacggccgggctgtgcgcggccctggtgttccaggccgcgtcccacaccgccgggcggctcaccgtctcggtgctggacgtgggacagggcctgtcggtggccctgctctccggcgggcgcgccgccctggtggactgcggcggcaccggggcggacaaccccggcgacaccgccgccgactacttccagtccctgggcctgagccggattgatctggtggtgctcacccattaccacgaggatcacgccggcggcatcccggagctgctggagcggctggaggtggggctgctggtgctccccgacgtggaggaggacgaccccctccgccgggagatcacggcgctggcggaggaaaaggggattgagaccctctttctggcggaggatgccgacgtgacctttggggagtccgccctgcgcatttacgcgcccctgggcagcggcggggccaacgaggagggcctctccgtcctgtgtaccgccggggacttcgacgggctgatcaccggcgacatgaacgacacggtggagaagcggctggtcaaatatgggtcgctccccgatctcgagctgctggtggcggggcaccacggctccaaatatgccacctcggaggagctgctgctggcgacgaggccggagctggcggtgatctccgtgggctacaacacctacgggcaccccgcgcccgagaccctggagcgcctggccgccgccggctgcgcgatctaccgcaccgactggtcgggcaccgtcaccatcaccgcaaagtaaggagaattgccatgccgcccaaagcaaagccggacaccgcggcctatcagaagctgaaaaaggacatcaaggagggcaccatcggcaccctctacgtgtttcacggggaggaggcctacctgcgggacttctacctggggcagctgaaaaagaagctcctgcccgccggaatggaggagttcaacctccacaccctcagtggaaaggagtttgacgtcaaaaccctggcccagctggtggactgcctgcccatgatgagcgagcgtaccctcatcgtggtcaacgactacgatatttacaagggggacaaggacgccctggcggcggtgctgcgggagctgcccgactacgtctgcctggtgtttgtctacgatctcatcgagtacaaggccgacgcccgcaccaagctggccgtcctgctcaaggagaagggaagcgtggtgcccttcaaccgccaggggcagggggatctggtggactggatctcccgccgcttcaaggccatggaccacgacatcggcaccgaggacgccaagtacctgatcttcctgtgcggcgatctgatgaacaacctgatctccgagatcgggaaaatcggttcctacgccgcccaccaccgggtgacccggcaggacatcgacgccgtggccaccccccagctggacgcggtggtgttccagatgaccgacgccatcgccgccgggaacttcgataaggcggcggaggtgctgggggagctgctccacatgcaggaggcccccatcaagctgctggcggtgctgggcaagcagctccgccagctctacaccgcccgcctggccatcgagcacagaaagggcgtgccctacctcatggagctgtggggcatgcgctcggcctacccggcggagcggctcatgcagtccgcccggcgcttttccctgccctggtgccgccgggcggtgctccgctgcggccagaccgatctggccatgaagtccaccggggcggacggcgaggagctgctgatcggcctgctcatggagctggccgtcaagaaaggagcgtaagcaaatgaaaaagaagacgctgttgggagtggccgccgctgcggccgtgggggccgcgggctggtatctggccgtcggcggccgcaaaaaccaaatcgagcacatccgccgggaggccaagcgcctgctggcggtgcggcgggacgagctggccgccctgcgctccgctgcggaggagggagagctggacgccggcgctctggggccggtgcccctggacggggcggcgctggagtccgtccggatggaggacggggccgcggtgctggctctgcggggggagaaggcggcggcctggctgtccagcgagccgctggaccggctgggggtgtactccgtgccctggcgggggagcgcccgccccggcgtgctctacaccgaatatctgggctccggctggtacgcgggctacgcctgcctggggtggggctgacatgctgcgcatcagggaggccatcgtggtcgagggccgttacgacaagaacaccctctcccagatggtggacacggtgatcgtggagacctccggcttcggtattttcaaggataaggaacgcctggccctcctgcgccgcctggcggagaagcggggactgatcgtcctcaccgacccggacggagcgggctttgtcatccgcagccacctgaaggggagcatcccgcccgagcaggtgaagcacgcctatgtgcccgacgtgtacggcaaggagcgccgcaagcgccggggtggcaaggagggcaagctgggggtggagggtatgcgccccgaggtgctggaggcggcgttgcgccgtgcgggggccaccttcctggacgagacgggggaggccgcccccaaacgccaggccatcaccaaggcagatctgatggcgctgggcctgtccggcgggccgggggcggcagagcggcggaaggagctgctccaccggctggaactgcccgaacggctctcccccaacgccctgctggaggtgctcaacgccctgtttacgcttggagagctggaggatacggttcggggagcagatgcgaaaaaattttcctgaaattcgaaaaaaggacttgacgaaaaagttaagttgtgctatcttataaacagaaatgataatcattactgattagaacttctgacatataccaataaaatctcattattaaaataaacaggaggaattacatcatgaaaaagtgggtttgctctgtctgtggttacgtccatgagggagattccgctcccgacttctgccccatctgcaaggcccccaaggagaagttcgtgctccagggcggcgacaagacctgggccgccgagcacgtggtgggcgtggccaagggcgctcccgaggagatcctccagggcctgcgcgagaacttccagggtgagtgctctgaggtcggtatgtacctggctatgagccgtgtggcccaccgtgagggctatcccgagatcggcctgtattgggagaaggccgctctggaggaggctgagcacgccgccaagttcgccgagctgctgggcgaggtgctgaccgactccaccaagaagaacctggagatgcgtgtggatgccgagaacggcgccaccatgggcaagtttgagctggccaagaaggccaaggagctgaacctggacgccatccacgacaccgtccacgagatggcccgcgacgaggcccgccacggcaaggcgttcgagggcctgctgaagcggtacttcggctaatcaagcagaatacggaaaagggcggagccttcgctccgccctttctgattgtatgaaccggcgataggcggcggacccaattccggtatccgctgtgataggagtatgtacggatgaataaaaaagagattttactggcgcggcattttgcgacgttggccatggtctatgcggtgattgccatggcattgggcgtattttatagggagtttaccaaattcagcggctttgcgggcagaacctctctgtctttcctgcatacccactattttgcactgggaatggtgttttttcttatcctgatgctgctggaaaagacatttgccttctcaagccgaaacagcgggaagttcctgctggtctatcaactaggtctcaatatcacagggctgggattctttctgcgggggatgagccaggtgctgggaaatgagttgagccgaggaatggatgcctccatttccggaatctcgggcattggtcatattttgctgggtatcggcatgctctctctgcttttgcaggttcggagggcggcagacggaaccagtgccggacagaaccaggacggcgcgctgcggggctgatgttccgcagcgcgctttttctagtttggcggccggaagcctattgacccgggaaatgggatccactatgatggaggaagaacatgggaggagggattatatgcccaacaacgggaacaacttccggcatgctctggcagagtatatccgaggctggggcgaaggactggcggtcgaggaggagaaatacatcggctggcgctttatcggcacaccccgtaagctggatatcgtgatcatgaacccccagaactgccgctccatggccatcgaggccaagctccaggagaccagcggttcggctttcgagaagctgagctatgccctggacgactgtatggcggcccccatcccgtccattattgtcttttcggggcggtatatccgggacgacatgaaggcaaagctgatttcctccggtcatggtattgaagtgggctatgaaaacggggcgattgcggatcggtatgagctgctcaagcagcgcatttacatcgaactggggatgaattatttccccttcctccgtccatagccgtgcagaaggggaaaaggccgtgtgccgccaaacgcggcacacggccttgaaattccgatgctgggacgtatgggaagggaacaggcgccttacgcgccgtgccggtcgaaacggatatcaaaatactgcttcgcaatatcggggtggtcgtgctcgaactcagacatgtagcggaaagcagagctggtcaggccgttggcctcgcagaactgccggaagctcttcttcttgagaaagctgggttggttgcaccagcgggccagggtgatgaacatccctttgtaaggagagcggttgtagtactcgtggcgcatgatgtagggcagacactggtactccatcaggatacggatgcgctcaaagatggaggcgatctcctccgcgccctgggactcatagccggagagcacgtagagcttggtggacttgtcggagtgtctccgccaaattttcaggccgcgcaccacctgttcggcctcgtcgatgtggtcgaaggcgaagatataatccccatgatacttcacgttcgccagccgcctggccttctcctcggtcatcagacgcacatccaggccctggcggaactgaaagcggcggccggtttcatccagctcgtccagcacctcctgccacttgggaaagccgaaaaactggtcgtcccacaggtatatgtgcttgcgggaggggtcgaagaactccttcaccggagagtggcggaacacatggtcatacttctggttgacacagaaggggcacttgcggaagcagccccgagtggtaaagccgatgctgtagtccatgtagtcgctgtaggtctggggcttgatgccccgggcgatctgcctgcccacatattcgtcgtagaggtggtagtcgggcatatggtgttcgacctccaggggaaggtccggggcggtcatccagaaaaagccggtgcctccaatgtgcagattgggatagttcttgggatcaatgggtacgttggtaaaatcaaatacccgggagagataaacctcgtcgtatttgggaatggagtagtaatcctccagcagggtgacgtcgttgcccagctccttttgatagccgctgattttcatgagagccaggttggggtgacgggtcccgttatcgagcagatccgcgtcgataattccgattgtcttgggcatgttttcaccgtccttccgacccagtatagcaaaagtcgatcgacctgtcaatccgggatctctctggatcattttaaaaatgatccgaagagatcaaagcgaaaatggtccggtttataggacggatgcaccttaacggacgttttacttgcaatctgcgccggacgggcttataataaaaaagcaaatgacaatactggaaaaggagtgatatgcgctgtgagcggtgaccctgtgagtcgagaatgtcccatatggagcgcggcgcattggctctgcggctgaccggcccgtccggtagacccgcacgccgtgtcgccgcttggcctgtgcaggaaggatattttccgcacaggcggcaaagacaaatgcgtgcggggatttttatacccttttgaggggcccgcgccgagaaaggcgtgagatcgttgctctctatttttaaaacgattcaaggaaaaatgacccggctggattccgtgcaggacggctgctgggtgaacctgacctatcccagcgaggacgagctgaacaccgtagcggtgacgttgggtgtggagccctccttcctccgggccgccctggacgaggaggagacctcccggatcgacaccgaggacggacagaccctcatcatcatcgatgtgccagccgtggagaaggatgacgcggtggtgtactccactctgcccctgggcatcatcgtcaccgacaagcacatcatcaccgtctgcctgaaggagacctccattctgaaggacttccaggacggactggtgcggtttgccgagacccagaagcgcaccagcttcattctctatatgctgttgcaggttgccaaacgcttccttcagtacctgaagcagattgacaagatctacaactacatggagcggcagctctacaagtcccagcgaaacaaggagctcattcagctcctggatctggaaaagtcactggtctacttcaacacctcgctcaaggccaatgaggtgaccctggagaagattctccggggccgcatcattaccctttatgaagaggaccacgacctgctggaggacgtgctcattgaggtgcgccaggccatcgagatggctaacatctactcatccatcatctctggcatgatggacgctttcgcctccgtcatctccaacaatctgaacgtgatcatgaaggtgctgacctccatcaccatcctgctgaccatcccaaatatcttcttcagtttctacgggatgaacgtggccaatctgcccctggaccagttctggtggttcccgctggccctgtccggcgtggtgatcctggtggtggctattatcctgaaaaaacgggatctcttctgaagaaacggtggaccaagtccaccgttttttgaatcaaactttatgtgtggattcatattctggtaacaattacatgttatactggattatattggagagatgcacatttcacaaaggcgttctgcggtacgcaaggcagagcggaagaatggaggttttctatggcgagcaatccaaactactgcgatatcacccctgagattgaagcgctggcggcccagtccctgcaaaacagcagcattgacgcaggggactatgtgagatacgacgtcaagcgcggcctccgcgacctcaacggcaagggcgttctggcgggcctgaccgagatctccgacatcatcgccaaaaaaatggtggacgggcaggagatcccctgcgacggcaagctctactaccgcggcatcgatgtagagaagctggtggcgggggcgctgaaggaggggcggttcggctttgaggagaccgcctatctgctcctgctgggccgcctgcccaacgcggcggagctggagagctttaaaaaccagctggcctactaccgtaccctgcccggcaacttcgtgcgggatgtcattctgaaggcgcccagccaggatattatgaattccctggcccgcagcgtgctgaacctggcctcctatgacgagcggtgcgacgatatttccctgcccaacgtcatgcgccagtgtctccagctcatcgccctgttcccggtactcagcgtctacggctaccaggcctacacctacaagagcgggaacagcctttacatacacgccccccagccggagctgtccacggcggagaacatcctctccctgctgcggcctgactcctcctactccttctgggaggcccacgtgctggacatctgccttacccttcatgccgaacacggcggcggcaataactctacctttaccacccatgtggtcacctcctccgggacggacacctactcctgtatggcggccgccctggcctcactgaaggggcccaagcacggcggcgccaacatcaaggtcattcgaatgtttgaggacatgaaagagcaggtgaaggactggaaggacgaggacgaggtgcgccattacctccaggccctgctggacaagcaggcatttgacagagctggcctcatttacggtatgggtcacgcggtctactctctctccgacccccgtgccaacctgctccactcctttgtggagaagctgtcccgggagaagggccgtacggaggagtatgagttgtactccctggtggagcggctgggccccgagatcatcgccggggagcggaagatgtataagggcgtatccgccaatgtggacttttattccggttttgtctaccacatgctggatctgcccctggagctctatacccccctctttgccatggcccgggtggccggatggagcgcccaccgcatcgaggagctcatcaacatgggcaaaatcatccgcccggcctacaagtatgtggggacccacgcggattatgcgccgcttgcggagcggtgacctcaaatccatccgaaagaagtgtgtgcggagatgaagtttacgctggtaaagggcgtgcctgagcggctcgaggagtatcgggaggtcttttatggctccaagctgtacgacgcctacttcgccgagggggacagcctgaatgagaacctgctccgtgcgatggcggacggcgatctctatgtagccatgagccccggggacgaggccgtgggcgtcatgtatatgacccggaacggcctggccggcctgccctatctgaatctgctgggcgtgaaaaagaagtaccggggccagggcatcggcacggatctggtcaaaattttcatcggggttatggaggaaaagaactatcccaatatgttcatcatgaccagccagttcaatacgggggccaagcggctctatcaatccctgggcttccagcccaagtgcctgctgcacgatgtgattcgcaagggcgtgtccgagtggctcttcatgcgacccaaccggaagctggcgtaaagaacataaagaggaatcccccggctgcgccgggggattcctctttatttgatccggcgcacctccagatagtagtgctcctggtccggggccagcggcacggaagtaagtcccgccgccagatcaaagccgaagttctgacggacgatggcaatctgctccgtgtgggccagcgcggcggtctggcacgtgaaggagagggtggagcccagccgcgttaccagatcatagccgtaaatgccccggttctccgtgtgggcgcaggcgaagtcaaagctggcctccttgggcagggcggcctccacctggacgctttccccggcgggaatcgtgagggcggcctccgtatagaagatgcgctcctgtatgttgacccaggagaacacatcctccagcatggtcatgtctgccggcaccgccgtgcccaagccccggcaaagggtgtcaaaaaatacctccctggagagggacgcggcgtccgtctcgccgccgtacttgtgggccagggtatccggggagggacagagggcgttcagcacttccctcagagtggactcgtaccgggtgacggcggcgctcaccccgtccagctccccgccggggtcgcagcccccgtcccggtagccctggagggtatagtcctccagagcgccgcccaccgcgatgagcaggcgggggtcctgggcgtggggggagtccggctcgggcagggagaagctgcgccgggcccaccccgcctcccggtcaatggagctgccgtgaaagccgtaagtcagcacggcgggggcgtcctccgaccaggggtaggtcaccgccagggtgggggccgtagcgtcgctctccggccgggtgaggtcggtgaaggcgtagaccgtcaccggcgtgtccagggcggagatctcggcgtgggccgccgccagatcgttctcctccaccagggcggcgtactcctcccaggactccagactctggctcccgcccacgccggggcggatgacggcgtccagcgccgtaccgtccgccgtcagggtggggggatagagggcgtagaagctgccggaaaaggggtagaccagggtgacactctggtcggtgtcggtgggattggtgagcacataggagtcggtgacgtcgatgtcggtggtgtgcccgtcgccccagggagcgaagtccagtgtgatggtgcggcgggcggtgagcccggcgtcccccagggtggtcaggggaaagaccggcccggcgtaggactggaagatgctcccaccggcgtggccgcctccgccggcggagctgccccccagccgcggcagcagcagggttccccccagcagcaggacggccaggcaggcgcacacccccatccaggggcggagtctccggcggcgggcgggcgtcccggccagcccggccacccgggcccgcagctccggggaggcgcggagggcctccacctgggccagatagtctgatttatgcatcgtcaaagcctccgatcatccgctcccgcagggcctgccgcccccgggccagccaggagagcaccgtgttccgcttggcgcccagtatcctcccgatctccgcggcggtatagccctcaaagtagtggaggtagagggtactgcggtagggcgcgggcagggcgcgcacctcgtccaggacggagggctccgccgcctccggggcgggaatggcctctgtcaggggcacctccgtccggcgcttggcccggtagaggtttttgcacttgttgacggtgacccgcagcagccaggcccgcaggtgttcgggctcccggaagcgcttgccgctgcggagcagggcctcaaagacctcctgggccacgtcctcggcgtcctggggcgagggggcggcgtggaaggccgcgcggtatacggtgtccagatagtgttccactgcgtaggaaaagagggcgtccccccggagctggtcggccatggctctcgctcctttctgccctatacacacctgaggagggcggatgattgcatggattgtaccattttttgcggaaaagcgccaggggcgcggatgtttttcatccgcgcccctggcgttatttcagcgcatttgccacccggtccagggtggcggtgtggttctgatccagcaggtgggtgtagatcttgcccgtggtggcgggggtggagtggcccagggccttgccgatgtcgaacaggggcgcgccctgggcggaggccacggtggcgaaggtgtggcgcaggccgtgaagggtgattttgggcaggtggtgggcctggatgaagcgggtgaaggccagagatacggcgttgggggagtaggggttacccttggcgtccaccgccaccatgccggtgtccggccaggcgtcccccagggccagcctgcgctcggcctgccgggcgcgctcccgccgcagcaggcggtagagatcgtcgctcatgtggaggatgcggttggaggagcggttcttggtctccttctgcacgatctccgccccggcggcggtgcgggcctccttgatgtggagcttgcgcagctcgaagtccacgctgctccaccgcaggccgcagatctcctcccgacgcaggcccaggctgcccgccagcttgacgatcagctccagccagtggccctccaccaggccgaacagccgcttgagctccgccggggtgtagaatcgggcctcatgggggatgacccggggcggctccacccgctctgtgggacagcggagaatgatgtcctgccggagcgccatgtgcagggcgcaggagagcagatcgtggtgccgccgtaccgtattggccgacaggcccttgtcccgcatgagcatggagtagtattgctggagatgctggggcgtcagcttctggatggggacggagcccagcgcgtcggacaggtggttgtcgatgatcttgcggtagccgtagatggtggtggcggcccggttgggctgaatgacctcctccatccagtattccagccactgatccaaggtcatggagcggggggccacggtctggtgggtgtcctgttccgtctgaaaatcgcgcaggccccggcgggcctgggccagcgtggggtaggtcttgtacttcttcactcgcttgccggtttcatccaggccgtaatccatgcagacatagtatttctgtcgcatttcgtcaaaagaaatattagtttctactttttttcgagccatcgcttcaaaatccctcacttttcgacagaattggacttttacagtatcatacgaaattgtgaaagaccataataatccccattctggcgttattatgcgccaaaatggggtttttatgtaaaaaatatgcttatttggaagcaatggcctcggcgacccgaatgccgtccacggccgcgctggtaatcccgcccgcgtacccagccccctcgccgcaggggtaaaggccccggatgggggactgaaagtcctcgccccggaggatgcgtaccggagaggaggagcggctctccacgccggtgagcacggcctccggcgcggcaaagccgcggagcttgcggtcgaagagggggagggcaccccgcagggtgtcggccacgtagccgggcaggcagcggtccagctccgccggggtgacgccggggcggtaggtgggggtgatgcgccccagggccgtggagggccgccgggccaggaagtcggccaccgtctgggccggggcgcggaagccgccgccgcccagggtgtaggccgccgcctcccagcgacgctggaattctacccccgccagggggtgctccgagccaaagtcggcgggggacacccccaccaggaagccgccgttgatgttggccccgtcccgggcgcggcagctcatgccgttggtcaccagccgcccctcctccgaggcggcggccaccacctgcccgccgggacagacgcagaaggtgaaggcgctgcggcccgtgggcagatggcaggccagcttgtagtccgccgcgggcagccgctcccacgccgggccaaactgggcctccgacagggcggcctgcgcatgctcaatgcgtaccccgatggcgaagggcttgggggccatgggcactccggcgtccagcagcatctggaaagtgtcgcgggcggagtgtccgggggagagcaccagcgcgtcgcagggcaggtcgtaccggccgccgggaccgtccaccgcaacggcccgcagggcgccgtcccgcacgtccaggcccgccagccggtgcccgaagcgcacgtcgcaccccagggccagcagctcccgccgcacattgcgcaccacgtcccggagaatgtcggtgccgatgtggggcttgtgctggtagaggatgtccgccggggcgcccgcctccaccagcgcccggaagaccgtggagatgcggggatcgtgggtgccggtggtcagcttgccgtcggagaaggtgcccgcgcccccctcgccgaactgcacattggaggtggtgtccagcacccccgtggcccagaagcgctccacgtccgccgtccgctcctccaccggacggccccgctccagcacaatggggatgaccccgttccgggctaaaaagagggcggcgaacagcccggaggggcccatgcctaccaccaccggcggcaggggggaggtccgccgtaccggcggaaaggcgtaaggccgctctgcatggaggctcacgtttttgtcccggcagcgggccatgatccgggcctcgttgtccacctccacatggacggtacatacatagtgtacgtcggattttttgcgggcgtcgatggattgccgggccagggtgagggagcggagctggccggggttcagccccaggagcctggcggcccgcttgcggagctgctcctctccgccgccgatgggcaggggaatgttttgaattcggatcatggcgttacctctctgttaaagttgggggaatgggtatggcaatccggcgcatcgggttcatgccgcccgcgggcggggacaagccccacccctgtattccggggccgctctttccatacaggccggagcggcggaggcgttacggagtaagcccccgccgccggaaagctaccgatagaacgacttgggggaagttccaagaagggggaatcgcaattcccccttcttggccgtttcaaggggtggattgttaaggcgggggaaatcgggaccgcagcggctttgccgcgaggagggaaccatcacaggggcccgccggaggcaggacaagaaaacagatacaaaaaagttcatatggaagatgcgccagcccgacacaatgcgggccgatgtgggcagaaggtgaattgccccagaggagcaagagaggccgccttggggcgtcggcctcctacgcggaagggagacagtcgtggcacccggcccaacgcatagcggcgtaggggcgacccttgtggtcgcccgcgggcggccataaaggccgcccctacatggttgggcgagtccctgccagaaacaaggtgcttatagtataacaaaaaatcaggattcgtcaaagtcgataatgaataggtcgtttggagtacagtttagaagaaaacacattgcttcaatgttttcataacggatggactttgtttcattgttgaccattcgattaaaattttgatagctcataccgagctgcttatacagccaatacttactttttccttttgcttttaacagggagagaatatctaacttaatcatagtctatgccctcgctatctaatgtaataattagatattagggtaaccagactataaaactatagacttttacattagataatgctatagtctatattggggggtgactttaatgttggaaatagaggagctattaaacgaacgcaaggactacatgcgggaaacctgtccggcctaccgtctggtctgtgccgagcatgaggccctcgtggagattctgggaagctggccgggaatcagcgaggcgttccggtcttatgaggcatatcgccatatggttgccctccgctattgcgcagcctgctaccaaaagaataaaaagctctccgatctctctgccgagggcatctttacctatggagaggacgacatctcccaggaaaaaattttggcttccccccaggcagaggacaaggcggagcggacggcatttcgtatgctgagcaggttggtcgcagaaaagggaaagccgctgagctcattttgggacagctaccggaccgccgtgctataccgggacgatttcgaggccatgtatagctgttatttcggctgtcaggcgggggcggggacgccggagtacaaggcgtggattcagcggtacatcgaaccgaaccgggaatatgaataaaaagcaggtgtcccgccgggacacctgcttttttctgcgtctatttcacatgctcggggcaaatgaattgcccctgcgccaaggttttcgcctccggcgaaaacgcttgtacggcgcttgccgcgccgccccatcttgcgatggggttccggtggccgacgggccgcaggagaacggaaccttttttaatagctgacgccctgccagatcatcgcgtcggccaccttcatgaagcccgcgatgttggcgccggccaccagattgccctccatgccgtactcggcggcggcgttggcggcgttgtggtagatgttgcgcatgatggtgtgcagcttctggtcaacctcctcgaagctccagctcaggcgcatggagttctggctcatctccaggccggaggtggccacgccgccggcgttggacgccttggcgggggcgaagaggacgccgtgctcctggaaccaggccaccgcctcgggggtggagggcatgttggcgccctcggccacggcgaagcagccgtgctccaccagggccttggccccctccaggggcagctcgttctgggtggcgcaggggagggcgatgccgcagggtaccgtccagatgccctggcagccctcgaaatacttggcagtgggtacatagtccagataggtcttgatgcgggcgcgcttgacctccttgatctcctggatcaccttgtagtcaatgccgttttcgtctacaatatagccgttggaatcgctcatggcgatgaccttgccgcccagctcggtggccttctggttggcgtagatggccacgttgccggagccggagatcaccacgctctggccctggaaggacttgccggcggccttgagcatctcgtcggcgaagtagcacaggccgtagccggtggcctcggtgcgggccagggagccgccgtagctcaggcccttgccggtgagcacgccgttgaattcgttgcggatgcgcttgtactggccgaacaggtagccaatctcgcgggctcccacgccgatgtcgccggcgggcacatcggtgtcggggccgatgtggcgctgtagctcggtcataaaggactggcagaagcgcataacctcgttgtcgctcttgcccttggggtcaaagtccgcgccgcccttgccgccgcccatgggcaggccggtcagggagttcttgaacacctgctcgaagcccaggaatttgatgatggacaggttgacggaggggtggaaccgcaggccgcccttggaggggccgatggcggtggagaactgcacccggtagccccggttgacctgtacctggccgtggtcgtccacccaggagatgcggaacagcaggctgcgctccggctccacaatccggtcaatgacgccggacttagccagccgctggttctgctccaccacgggctggagggactccagcacctcgccgacggcctggaggaactccggctcgtgggcattctttttgcagacatcttcatagacaccctggagatacgaattggtaaaggtaaatgccatattgccaaacccctttgcgtggcgcctgcccggcaggcggccgaatttgagcgatgaacgcgggggagaggccccgcgcttccacgatggagctattataatctgttttctctaaaaatgcaagagaaaaaaataaaattgcaaaaatgacggggaagccaccggaaaattgggctgttttgcaaaaaatgaattgagtgatgcaagatgtcggagaaagtgtaaccttttttcggctgagacgttgaatagacagaaaggggggagcggagtggagccgcgcacgctggaggagctgtaccggcgctatgccggagagctgtatctctacgcctattccctgtgccagaacgaggcccaggcccaggatctgaccgcggaggccttttgccgcgccctgctggcactggacggggcggacgccgggtggcggagttggctgtataaggtgtgccgcaacctgtggctggatcaggtgcggcgcagccgccgcctggccctggagccgcccggcccggagctggcggcggagggagacgtgctggaggagctgctccaggaggagcggtgccgggccgtctaccgggcggtgcaggccctctccccggtggatcgggagatcgtcaccctccactactacggagggctctccctgaaggaggcgggggaggccatgggactcacccccggagcggcccgcaccctgctgtgccgggcgcggaagaagctgaagagcagattggagggacagatatgacatttcgggaactgctggacaaataccgggccgggcagaccagcgaggaggagcgggccctggtggaggccgagctggagaagagcgaggccattgccgactacctggccgagcaggtggaggacgcgctgggggcggcggagacgcaggcccccgccggagaggtacggcatattcagaagaaggtaaaccgccgcctgcggcggacggcggtgtgggcggcctgcatcgtgctggccgccctgctgggggtgcgctttgtggtcagccccctggtgtcctccctgtactatcagccaaacgcctacacggtgggcggaatggaagatcgcgcgccggcctctcttgtaaaggagaacggcgtggaggtgatcagaatcggagacctgccgccggaggaggtggagcgccatctgcgcgtggagagtcaggacgtggcggtggatcttactgccctttacagcctgctcgccccgggggcgacggtgacagccgcctcggcgcagccggaggggttcgggcgctacaccctcacggtggagacggaggcgtggctcaccggggagacgagccagcggagcggcgagctgggcccccatgcagacggattctgggggcactccagtccggggcggagtattctggagattatggagtcggcggagagcgggcgcgtcagtgataaactggaattcagccgccacacccaggactacctgcgcgagctgcccggcacctcctatgtggcggcgtgggtgcattttccggagcatctgaaccccgtaaagctgtactggctggaggagcagcaggagtacagcggtatccgctttctgtgggcgggcgtccgtacgggggaggagagcatgctgggattccccatgctggatgcgcggggcagcggcttcagtcccgactgggaggactatcccatgtttaactgggcccaggccagtctggagcgggccgtgggcgtggcctatgaacagcggttccgcagcctgttggcctatgtgaacgaccggcctcaggcaatagaggccctgctggggggcgaggtctgggcggactactatcagagctatttcgcggaggccgccgcctatgtggaggccaacggcgtggaggtgaccggcgcgctggtgtacgccgaggctgacgatctgctccgcctgtgggagaacggggacgtggacaaaatcgccatcgacaccgtactgccctccaagtactctgccggcgggacattcggctggggttgagaaaatccgctttgacgaaccggccggtttgtattataataaaatcaggataggaggtgtccttatgaagcacgttgtcatcaccatcggccgggagtacggttccggcgggcggctcatcgccaagcagttgtcggaggagctgggtatcaccttctacgacaaggagctcatcacggcggtggccaggaagaccggattctcggagaatttcatccgggattccgagcatcaacgtcccaccaacagcttcctgtacgacctctacaccgcggtacagactccgtcggtgcccgaccaggtgttcattgcccaggccaaggtcatcaaggaggccgcgtccagggagtcctgcgtcatcgtgggccggtgcgccgactacatcctgcgggacgaccccaggcggctaagcgtctttgtgcacgcgccgctggacgagcgggtgcgccgcgcccgggaggagtacggcgtccaggagcccaacctggaggcctatgtgctccgccaggacagggcccgcgcctcctactacaactactttgccaccggcaagtggggccagagccgggaatacgatctgtgcgtgaacagccgcatgggcatcgccgcggcggtggccaccatcaaggccgccgcgctggccgtggcgggcgaagccggggtgtaagccgcagggacagctcgccggctcgggccgtccgcgccggagcagacaattcgtttgacaagaatttgacaagaagctgagaggccccggaatcccaagggattccggggcctcttttctatatggcgttcagctgagcacaatggcgtgaaccgcctcaatgagcgccaccgccgcgctccgctccaccagacacagcggtttgccatccaccgtggccaggcagttctccccgtcaaagcggtagagggcgatctggacggtgggggagccctccccctccagatggagggtcagggcgatctcctccttgcccgtgggggcctcatcggtgaaggacacggcggtcagggcctggagggcgctctggaaatcggtgctctccaacgtctcgccctgataggcgaaggcggggccgtccgcgccgtccgccgcggtgagggtgtaggtctcgccctccagggtcacgtccacctggctgatatcctccagcgcggcgggcagcacctcctggtgccggagagcgtcataggaggcggccatcagcgcctcgtactccgcgccggtgatctgatagagcagcttggactggcccacccgggcgtaggcggtgatctcctcctcgctctccccgtcggcgggggcctccgccgcccgctcatccggatcgcggctgacgttcagcgtgaaggtgccggaggccccgtcttctccgtcgtaggcgacctcgatggtcagctcggggctgtccaaaccgcaggcctggagatcgtcgtcgttggcgctgtaggttacgcagtccgtcagcgacagggactggatggcctggagatagtcctccacccggtcgggatccagcgggacttgctccccgtcccgctcggtgaagtacacatcgtcctcccggtaggtgttgccgccgtcctcctgataggagacggcgtagttctccgcgccggagaagcgcagctccgacacctggccgaaggcgggaatgtcgtcctggtcgatcagctcgtccagggtcacgtcaaattcgtccagggggtcgtgggccgccaggtacacgtttccgtccccaatggagacataccgctgggcgtccatcttgctgtaatcccccagttggatcgtctgagtctccccgccggcggtgatgcggatggtgcacaccggattatccaggccgtactggcccagatcgtccacattttcgatgatgaaggcggcgccgaaggccgcgaagggctccagaagtaggtccatctgctcggcgtccaccgggaaggccgcgtcgtcgtcgtagctccaggttccgtcccggtggaaggacagggtctgcccgtcgtagtcccaggagaggccctccacctcgtcggcagagatggagaggatggtctccccgctggtctggatctgctccttttggtctttgtaccggctgagggcaaaggtggcgatacaggccgccagaagcaccgccagcaccacatagagccgcttataccgcttcattctgcatcctccttctcttaacgaccacggcgatgccgacgcccaggtaggccaggggtacgatgccgatcatgagcaccttcagcagggaggaggtggacgcgctgatggtcaggtagttgtagttcagagacttgctgcggatggccatggcctcgctctcccccaccagggaggacagggcgttcatccccaggttcacgttggcccccgacgaaagggcgttatacttgtcgtccaggaaggcggaggaggagaaccacaccatctggccgctggcggcctccacggagaccgccagggtgaaggggccgtccagatctccctcctccttgtcgtaggtgtccagctcgtagccggccagcttgctgtaggaggcgtccgaggtggtgagcaggggggtgactgtggcgccgttggtgtcctcccccacggtgaggcccagagagaggggcaggatggggaagtagcgctcgtcgatcagggagtcggtgatggcgctggaggccaggtcgggcaggagggcgaagggtgcctggaaggcgtagtgctcccggtcggactcgatcacaatcccctcgttggccgtcacgccgtactcggacaggaggctgtagaggttgtccagggaggcgccatccaccgggccggccatgaccagcagcttgccgccgccggtcacatagtcggcgagcatatcccgctcctcctcagagatgtcgctggtgggggcgtagatgaggaggcaggcggcgtcctcgggaatggcgtccacggtcagcagggagaggtcgtgcagctccatgttcgccttctccagctgctcctggaaggtggagggcagcgcgctctcgccgtggccctccagccggtagagctggggctgctcggcgttgaccacataatcgatggccgaggtgatggcgccctcaccgtcaaaggaggtgttgtaggagtaggtgtacatgtccggctcggacagatagatgtcgtcgtaggagataaaccggctgcgccccccgcactccaccaccaggctgttgttcttcaccgcctcgtcggtgtactgctcggcgaaggtggggtagacgtcggggtttttcttgaccacggtaatgtggtcggacaggctctcgtatttgcccaggaggttttcgatcaccgcgtcctcctcgccggactgcacgatccagtaaatggtcacgtcctgctccagcgcgttgaccaccaccttggtgttgctggtaacggagtagagcttggaggcgctgatgtcgtaccgggtcaggctggtgggcagggcgctcaccagaaggttgagaacgatcagcagcgccagtaccgccgccgtcagcatcagagagtaggttccgccctgaaaggcctggcggctgtgccccgccgggccggagggtgttgcattcggccgcttcttcatcagttgtacctccttttctccaaagactgcaccgagaggaacaggaagagggcggctaccgtcaggtagtagaacacggccgtcaggtcgaacacgccgttgacaaaggtgtaaaaccgctcaaagagggagagggcggacatcaccgtgggcagcaggccctcgaaggcggtgctgtccacgaagtacagggccgccaccgcggccagcagcaccagacagacgccgtaggccaggttgctgtttcgggtcagatagcgcaccaaggcgcccgccgccagaatgagcaccagcagggcggccagcgcccccaccggggtggaggagacatactcggagaggctgacgctgtagtagttcagcaggatgaccgcgatgcccaggccggcggccagcccctggttgtcggtcagcgaggagagaaagacccccacggcgatcagggccgcgcccagcaggaaaaaggccaggatggagccgtaggaggtaagcagatagacgtcgccgaactgggcgaagatcagcggatagaccgcgatgatggcaagggggatcaggtacagcaccagcagggccagatatttcccggcgatgatctgcacggtggtgatgggcagggagtagagcagctggtcggtcttctgcctgcgctcctccgccagcacccgcatggtcagcacgggtacgatgaccacaaagaccaggctggcgaagctgagaacgtactcgaagttgctgaccgcggcctggaggttgtagagcatggcgccgatgccgatgaaggccagcaggaacgcgccgaacacataggcggtcagggagtgaaaatagcttctcagctcatgcttgaatacagcggtcatgcctgcccctcctctccctccgcggcggccggggcctccgcgctctgttccgtcagctcgatgaagatatcctccagattggccttcttcagcgccatctccagcaggggaacccccgccccggcaaaggcgaagaagagggcgcgggagacgtcgtggaggcttgcctcccgtccggttttgaggtgcgcggtgacgagaccgccctcctccgccgtgatggaccggccggtgatggcgccgatgccgtccagaagggcgcgcacctgctcctccgtcccctcggcggtcagggtgatctcgttgggggtgagcaggcggctctccagctcgtcgggcgcgccgaaggccgccagcctcccgtgggcgatcatgaggatctggtcgcagatggtctgcacctcggacaggatgtgggagctgaacagaaccgtatgggtctggcccaactgccggatgagctcccggatctcaatgatctggagggggtccagccccaccgtgggctcatccagaatgatgactctggggctgcccagcagcgcctgagcaatgcctacccgctgccggtagcccttggagagcgcggagatgcagcggccccgaaccccctccaggcgggtctgctcgatgacctccccgatctgggcctccagctccttgccccgcagccccttggcctcgcccacgaaccgcaggtattccaccggggtctcgttcagatagaggggcggctgctccggcaggtagccgatgagccgcttggccgcgccgggctcctcgaaaatgtcgtgcccgtcgatgcgcacacgcccgcttgtggcggacaggcagccggttatgatgttcatggtggtggactttcccgcgccgtttggccccaggaagccgtatacatgcccctcctcgatttcaaaggagagatcgtccaccgccaggaaatctccataacactttgtcaggtgttccactgtgatcatggttgacctcctcgtttccatttgagtgcatggcacccgaggtcattataaagaggaatgctgaaacgacgctgaaagcccggttccccggaggacaaaaagggggtgcggcccagcggggccgcaccctcaggctgtccataaaccctcctgctaaagcgttcggagggaaggagagtgtgaaagggagctgtcaaggttccctggaggtgaattggccgtaggccaagagagaccggcctgggccgttcgcgttggatcaagcgacattttgaaacgttttcagagtttcaaaatgtcaccccagcagggccgcaccctcgcgcggtcgttcggagcgccgctccggtcagtcattggggaaagcggcgcggtagacggcctcctgctccggtaggtgggtgacatatcccaccgggatccggtttccggtggcctcgatgatcctccgcgcgccgtccgggccgaaggcgccgcacagctcgatgcagccgacgccctgctccagcagctcctgcgcggccgcacaggcgccctccagggtggagacgccgcgcatctgcgccgctccgccgtgtatggccgcccggtcggtctccgggcagaagtcccccaggatcaaaaatgcaaatttcatacacatgcctcctgtatctctgatttccagacgcgcttactccggcgccgctactcctgccggcagggcagctccacccggaagcggttaaagcctccggcacacgttacgtcaatggttccgtggtgctgggccacaatgccctcggcaatggacagccccaggccgaagctgccattccggctccgggccggatcagcgcggtaaaagcgctggaagatctggcggcgggcctccggcgggatcggttccccctggttggccaccgtcagcgcacagtgattccgccccctccggtggagagctacctgggtctcgccgccggggctggagtacttttgggcgttgtccagcagaatctccagcacccgccgcagcgcttcctcatcgccgctgacggtgatcccctcgtccacctgggagatcagggtgaggccctgctcaaagaacagcggctcaaagggcaggaggctccgggcggtcagaccgctgagatccaccggatggagcacaaggtgggattcggcgctgtctgtccgggccagctccagcatctgctcgatcagggcgcgcatctggcgggacatggtcaggatgttggacagaaagccggcctggctggccgcgtcctggcctccgtcctgcaggagctccgcatccgtcatgatgacggtcagcggggttttcagctcgtgggaggcggctgcgacgaactgccgctgctgctgccaggcccgctccaccgggcgcaccgcccacttggagagcaaaacgctgacccataggaaggccaggaagctcagaccgccgatcaggaggcaggttctgcgcagtccgtccagcgtggcccgctcactggagatgtccgcgaacaccaggaagcggctcatgggtgcgtcggagcggtaatagcgcaggttatactcctccagcacccccaggcggcggggggaggccgcggcggcctgggccaggccgcccagaaaggcgtcgtcggacaggtcgtagtagccaccgctggcgtccagcagctcgccgtgggggccgagctgcagcgtgaagaagggcaggcgcacgtcctcccccagctcgcccggtgcgttcatttgaaagggctggctggcgatgcgctccatcatacggatgctctcggtctccagattggcgctggtgaagtagaacaccaggcccagtatggcgctgagcaggatggtggcgatgcccatgttgatgacaatgaacttcaggcgcagccgcttaatcatcgccgctcacctccaggtggtagcccagccggcggatggactcgatgcggatgttggagccgatgctggcgagctttttccgcagaaagcaaacgtagacctccacatggttttccaccgcgtcggagtcgtacccccatacccgctccagtagggccgccttggacaaattgcgctcgcccgcctggaggagcagccgcatgatgtcgaactccctggcggacagccggatgctgtccgccccgcaggagagggcggcggtggacagatccagagatgtattgcccagggtgagctgattgacctgggcgccctgccggcgcagcagggcgttgacgcaggccagcagctcccgggtgtcaaaaggcttggtgaggtagtagtcggcccccgcgttcagaccggtgatgcggtcctccaggccggagcgggcggtgagcatcagaatgggggtgcccagatgcctggcgcgtacctgccgggccacggtgtagccgtccaggccgggcatcatcacgtccagaatcagcaggtcgtagacgcccagctccgcgtattccgccccggtctccccgtcatagacggcctccgcctcaaagcccttccgccgcagcacctcggcgatggagtcggccagcagctgttcgtcctctataatcaaaattttcaacactgtccctcctgcgtttgtcccacgtgtctttctgatcataatacagaacgaagctgaaaggaagctgaaaaccagcggatctttcgcggcgtcccctgcctgatggctgatagagatgggaggagatattcttagaaaaatggagccggataccgatggtacggcatccggctccactattgaagcagtcagaatcattctatccgttagcggactctgatttatgaaaaattttggccgtttcctgcccgcggagcacccgcaggccgcccagggccagggagcgcatctcgtcctcgccggggtagaccaccacgggggccaggaaggagacccgcttctcgatctcgctggtgacatactgggagtaagcgatgccgccggtgaggaggatggcgtccaccttgccgcacacgttgggggcgcacttggcgatgttcttggcgatgttgaggatcatggcgtcgtagaccagcttggcgtgggcgtcgccactctggatcatctgctccaccgcgcggctgtcggtggtgcccaggtgggccatcaggccgccctggttcttcaccagcttcatcatgcccttgtagtcgtaccggccgctgaagcactccttgatcacgtcgaacatgggcaggccgccggcccgctcgggggagaagggaccctcctcgtcgctgatgaagtcctcaatcttcccgttgtggtgcaggttgacggagatgccgccgcccaggtgggccacgatgacggtgatgtccttgtagtccctgccgctctcccgggcgtagcgcagggccgcggcgcgggtgtttaggttgtggcccatgcccttgcggcgcatggagggcaggccggtgagcttgttgatgggcagcagctcatccaccgtgaccccgtcgtagatataggcggggatgccaagctggaggctgatggaacgggcgatcatcgcgcccacgttggaggcgtgctcgttctggggcttgttcttgagctgccacaccatgtcgtcgttgacctcgtaggcccccgcctcgatgggggtcagcaggccgccccgggagacgatggcggtgagggagtccagcgggacgctgtgccgcttcaggcagtccagcaccagctcgcggcggaattcatactggtcggccacgcagtcgaagggggtgagctcctcggcggagtgggtgatggactccacgaacaggggctcctccccgtcaaagacagccagcttggtggacgtagagccggggttgagaatcaaaagtcgctccatgggggttcctccttactgattgcgggcggccgcggcggagatgacgatggacagatacttctcctcggcggaggagccgcggctggtcatgacgatggggcactgggcgcccacgatgaagccggccatcttggccttgcaggtgacggtgagcatcttgcccatgatgttgccggcgtggatgttgggggccaccagcacgtcgcagtcgccggcgcaggggctttcaaagcccttgaaggcggcgatctcgcggctgacggcgcagtcgtaggagatggggccctccaccacacagccggtgagctcgccccgctggttcatctgcttcagggcgtcgccctccacggtctcgggcatcttggggttgagcttctccacgcaggccagcacgcccaccttggggcagtcgtagcccatggcccgcagggcgcccacggtgttctcgatgatggccttcttctgctccagggtgggataggtcaccatgccgccgtccaccggcatcagcagcttgtgataggtggggatttcaaaggcggtgaagtggctcatgacgccgcccttgcccaggccggtctccttgttcaccacggccttgagcagcacggaggtgtccagcttgcccttcatcaggaagtcggcctggcccgcccgcaccagggccaccgccttgcgggcggcctccgccagatcgggctcgtcgtggatgtcctccgcggggatgtgctcgcccagctccgccagcacctggtcgatcaccgccttgtcgcccaccaggatgggggtcacaatcccctcggcccgggcgcgcaggacggcctcgatggtgtgggcgtcgcccgccgcggccacggccatgcgggcgcggctgggctggcccttcacgtgggcgatcagctcgtcaaaattgtgaaataccatgccgaattcctccttactgcttctgggcgcggcccagctccaggcccttctcaaaggcctgcctgttgaggggcaggagcttgggcttggaggagagcttgtgctcgatggtctgccagacgatggcggggtcgatgacctcggtgtagcccacgtagacgcccagcatgatgacgttgagcaccttggcgttgcccatctccagggccagctcggtgacgggagccttgaccagcttcacgtcgtcccggccgatgtcgtcggagacgatggagctgttgatgaacagggtgccgccgctcttgagggtgccgataaacttcttgagggaggggccgttcatgacgatgagatcgtccatcacgtcgcccagaggggcgccaatggcctcgtcggagatgaccacgaagcagttggcggtgccgccgcgctgctcggcgccgtaggaggggaagaaggtgacgttcttgtcggtggaattacaggtggcgtccgccaggaacttgcccagggtcatgacgccctggccgccgaagccggccacgcagagattggtttccatgttcgctctcctcctttagcggtcgcggacgacgcccagcgggaactcgggcagcatcttctcttcgatgtactccagggacttcatgggatccaggccccagttggtggggcagctggtgacgatctccaccatggagaagcccttgccgtccagctggttctggaaggccttgtgaatggcctgcttggtcttgttgacgttggcgggggtgttgcagctggtgcgaaccaggtaggcgggggcggtgagctggttgagaatctcacacatgtgcatgggatagccgtgctccttgggatcgcggccgtggggggcggtggaggccttcatgccaaccagggtggtgggggccatctggccgccggtcatgccgtagatgccgttgttgatgaagatgacggtgatgttctccccgcggttggcggcggaaatggactcggccaggccgatggaggcgaagtcgccgtcgccctggtaggtgaagaccaggctgtccgggttggagcgcttcatgccggtggccacggcgcaggcgcggccgtggggcgcggtggtgttgtcgtaggcgatatagtccatgtgcaggccgcagcagccgatgcccaggacgcaggcggcgcggtccaccagatccatctcctccagcacctcgccgatgagcttgatgacggtggagtgcatacagccggggcagaagccggagaccttgtcctcctggatggtttttgttcttccgtagatcttttccatcttacttgccctccatgatcttcttaaccgcggcaaggaccttgtcgcggctcatgatgttgccgccggagcacaggcacgtctcgatggggcagcggtccttcacagccaccgccacgtcgtccacaaactgggcggggatggacatctccacgtccagcacggccttcacccggctgtagtcgatgtggtcgtaggcggcgtaggggaaggggtggacggtgatggggcggatcaggccggccttgacgccctgggcgcggagcagctccaccgcggacttgcagatgcgggcggagatgccgtaggcggtgagcaccacctcggcgtcctccagccggtactcctccacctgcacgtccttctcccaggaggcgtacagggcggcggcgtcctcgttggccttctgcatgtcgctggtcagccagtggcccggctggatccaggcgcggtgggcgtagtccagcttgtggcccacgcaggcccagccctgcttggacgccttgagggcggccacctcttcctcgctcttcatgtcgggcagcaccaccggctccatcatggtgccgatgacgccgtcggccaggatgagcaccgggttgcggtctcgatcggcgtagtcaaaggcgacgtaggtcatgtccaccgcctcctggacggtggagggggcgaagaccatcatctggaagccgccgttgccgctggccttggtggcctggaagtagtccatctgggcgggctggatggagccgacgcccgggccgccccgggaaatattggcgtacaccatggggatgcgggcggcggcgcagtaggagatgccctcgctcttcagggcgattccgggggaggaggaggaggtcatggcccgcacgccggcggaggcggcgccgtacaccatgttcaccgaggccacctccgactcgccctggacgaacacgccgcccacctcgggcatccggcgggaaaaatactcgggaatctcgttctgcggggtgatgggatagccggcaaagaaccggcagcccgcccgcacggccgcctcggcgatggcctcgcagcccttcataaatacgcgtgacatatgccttcctccccttacttgtagatctcgatggccccgtccgggcacatgcggccgcagatggcgcagccgatgcagtcctccgggtgcacggacactacgtactcatagcccttggagttgacgcctgtgccgatctccagcacctgcttggggcagaacttcacgcagtagccgcagctcttgcagcgctccgccacaatttccacttttgccatactgacatctccttcttgcatattgcatcttgcaaactgttgaatagggggcttacggtgcgtccggctccggcccggccgcccagggataggtcagccacaggcggatggggagcaccgggcagggcagcccctccggcagggcggcgcacagctcccggcggacgcacaggtaatccaccggcttgtaggggctcaccagctcccagagcctccgggcgccctccgccacgtcggcgggggtggtctccggcccaaggttggggttgcccaccagccgcagccgggccagctccacatgggagactcccagggtctcccccagcacctggtcaatgtgctccagagtggccgaccaggggcggaaggggttgatcacgtaatacaccgtagtgccgtcccggttgagcaggggggcatatcccccgatggagcgggcgccgatgtagtcgccccccacatccagcacggcgcagcagtgcggatcgttcagccgctgccgcacgccgccggtcagggtgggggcatccatgaactgggcctcgtagtgcacctccacccccagcgcctccagggcctcgcgccggtctctggagcggaagaggggcttggtcatgtccaggtcaaagaagtggacgggcttgccgcccagttccgccaatgcctgggcgaaattaagggcaatctcgcttttgccgctgcccgcctcgcccaggaaaacaacattgctgctggaagtcatatccagtagactggatactgaggtttgctgtgccatggatacctcctataatcaaacaagatataatttgtatcttgcaagatttatgagttaagaataccacactttttttaaattgcaagaggggtggaccaggtttggaaaaagtgtcaaaattgagtgcattgatttgggaaaaacgctggccgggcttgtcttttaaagcggacgctgttataatatcttgcaagaaatgaaatggaaggagacgaaaccatggcggcgatcaaaaagcgctccctggtggatcaggtttatgaaatgctgcgcggcgatatcatcacgctgcggcgccccttgggcagcaagttgaatgtcaatgagcttcaggatgagctgggcgtgagctgcacccccattcgggaagcggtaaacaggctccagcaggagggactggtggtctacgagaacaacgtgggcgcccacatcctggacttggaccagcatgacatcacggagattgaacagctggccatgaccctccactgtgcggccatccgcctggccatggcgcatggcgaccgggccgcaatcgtgacagggctggaaaagtacctggaggagtaccggcgggcgaggaatgtgcagagcgaggttatggcggttaaccgttttgtggggaccttttacgcgcactgcggcaatcgccggctggatgcgaatatgatctccatacagggccagcagttgctgttgcggtatatctatgccgactgcctcaccgagcgcggcagccacgcggaggactttgaaggcatgctggaggcggcccggaggggggatgccgaggaggtctgcgtctgtctgcaacggaacaccgaccggtgtattccggttctgatggagtatgtcctgaaggagaaagcggcccggtaacacgccgcagaaaatgggggccagagtaagcagcgccgccgatcccaacggatcggcggcgctgctgcttgcgctgtattcaacagatggaccggaatacgtccagcaggtggggcagggcgggattctggttgtcctcgttccacatcaggcggacgttggcgaagggaacccccagcagggggataaaagccaccttgccctggcagagacaggccatatcatcgctgagggtagagattccaataccgcaggaaaccaaggtgagcagaaccggcacatgagtggcctccgccaccacatggggggcgaagcctgcatcagccgccgtcttccagataaaatcatggccgggaatggaggcggtgcgggccatgaccacaaacggctcgtccttcacctcttccatccgtatgctgccacgagaggccagcgggtggtccaaagcggtgatgatgcactggtggtttttgtgcagcaggatggagggggactcctgcccggagggcattggcatatagttcaggatggcgtccacctctccccgctccagcgcggacagcaagctggagtggctatagccacggataagcagcgagacatggggataggccgtgcgaaagcgctgatagagtgtgggcagctttggttcgaaggtgtcccgcatgatgcccagggtcagggaaccgcgatagccctcctgggccagccgggcggccaccacgctgccccggtattcgtccagaattttcggacattttttgaaaaacaccgtgccggccggggtgagggctacgctgcgggagttgcggtagaaaagctgaaggtccagctctttttccaatgcggaaatcagccggctcagagccggctgggccatgaacaggtcgtctgccgcctgggtaaaattgagacgctgtgccagcaccatgaaacactccagttgatttagagtcactgggaatccctccacacgttcgataagttggggatatcagtatatcaaaattcgtgcggcttgtcacgacctgtttgctatgcaaaagcatagcaaagttggccatgtgccgcttacagcggcacggccatgagattatcgcacatgggccgggacggcccacatgcgcaaagacttcatgcgtctaagcctttgcatagtttcgtagtgcgccctgtgcgcacggagttttatgcagttaggagatagtagccatatggtaactgtgcatcaattcatggttagccacagagagttaccttcgtttttgtgcaaaataaacaataccgaagctgttgaattcctctatatggaaaattagagtcggattgcagtaatctaatcgaaagctgcatttcagccatacaaaaccggcattttacacaaaggcaaagaacgggtaatatgcaggggaaacgaaggcaaactaaactttttgcttttcagaaggaggaagtacagatgaaaattttgggtatttccggcggtatgcggaacggcagcaacgacggtatgtgcatcgaggccctgatgggggccaaggagatgggcgccgaggtggagttcatccagctgcagaacctgcacatcgagcactgcaccggctgcaccgcctgcgtgcagagcgtgctgggcggccgcggcggcaagtgcgtgctgaaggacgactttgactggctgctggacaagatgctggacgccgacggcattgtcttctccacccccatctttgagaagggcgccaccggcctcttccacacgattaccgaccgctttggcccccgcatggaccgcggcaacaacatcatcggcaccaagatcgccgaggaaaccggcggcaccgcccccgatccccgcatcctgaaggacaaggtcatctccttcatgtccgtgggcggctccgactgggtgacgcgcacccagtgcgacgccggcatgctggccctgacccccatgtggaaggtcattgacaacgaggtgttcccctgggcgctgtccatcctggtggaggacgagcgggtggcccgcgcccaccagatcggccgcaacatcgccgaggccgccaaggacatcgagcacgcccagtaccagggcgacgccggcgtgtgcccccactgccacagccgcaacttccacctgcaggacggcaaggccatctgctgcctgtgcggcctggagggcgagatccacaacgagggcggcaagtactccttcaccttccccgccgagcagctggagcacgcccacgacaccctgtccggcaagttcatccacggcaacgacatcaaggagaacaccggcaagaagattgccaacatgcagaccgagaagtacaaggcccgccaggccgcgtaccgcgcctttatcaccgccaccgtgcccgagaagggctgagaaggagggttcgggatgtccgtggaatttcgtcccatgcgcagcgtcatctatgtggacgtttgcagagaggagtaccgccaccgccttcagcactggctgtacggccaccatattcaggattccatctccaacttcggcccctatgtgaccaagtacgccttctacaacgccctgcccgtgcccccggagggggagcgcttcggcacccggcggatgcagatgaccgagcactactggctggtcaacgagatggagcctgagatgcgcaacaaggccattgccgagtatatgcccatggacgtgctgcgctggcagggctgcgtgcccgacaccgacgagaccccccacgagaacctggacggcgacgtgggccgctccatcggcggcgacaacggctgcccgcccttcgtcttcgcccatgtgcccatctcctgggaggaggacttcaagggcaagggccgcatggtgtgcgacggccccaactaccgctggcagttcgtcatccagtaccccgacggcatcagcgaggaggagggcgagcgctggttccatgaggagatcgtcccctacttccaggcccggccggaggtcaaccgcttcctgtccagccggatctaccacgacgtggtgggctgcaccttccaccgcctggtggagctgtggttcgacggccccgaggagtggtatcaggcggcggtggagggcgccaaggccctgcccaagcccgtctgggcgcagcaggagcgcttccccttcctgaaatccaacttcaacattgtgggcatgttcctcaccgacatccccaccagcgacaacctgacccagttccgcggctacatcaccatgcgttaagcgccttccgccccgggcggagcgacgcgccggcctcccgccggggggccggaaacacaaaaggatggagggattccccatgttccgcaaggatcaattcggtattgtcttcaacaccattttctcgcttatgttcgccatctttctgcccctttacatcgacggcagtaacatgttccgggaggcgggcgccatcctctgggggccgctggttcagcagctcaccaaggacttcatccccggcttcgccgtggccttcgccatcggcacctacattgatctcaaggccatgggcgacggcttcgcccggctgtgcggggtcaagaatgaaaacggcctgctgttccatattttgcgggtggcctccattacgttcgtcatggccgtgctgatgagcctcgtcatgatgttcctggccgtgggctacaccatgccggcgggcgccttcttcatggcctatctgatgagcttccccctgacctacgtggtggccctggtggtggcgttcatcaccttcgccttcggtatgccgctgaccatcgccctgtgccggaagccccccaagatgccggcccatccctaatcaaacagcgatctgggcgcaccagcttcgggtgcgcctggatccatttccaaggaggtacgttatgtcagttcccttttacgccaaaagcccggagaaccagggctatatcaagaacatggaggtcgtgggcttctgcgatctgaacggcgtcaacgccttccagatggccctccacaagaccgacgacgggcgctattacatgtactgcggctccttccgcggccccggctggaacgtggtggacgtgaccgaccccacccagcccaaggtggtcaactggctggaggcctgtgatcccaaggagtaccccgccaccaacacccccaagattcaggtggccgacggcctgatgatcggcgccaccggcggcggcgtctccttcctccacggctgcaagcccggcgacaagagcctgggcagcctgcagatcttcgacatcaagaccgatcccgtccaccccaagctgctgggcaagtgggagaccggcgtggagaacggcatgggcgtccaccgcttcttctacaacggcgggcgctacgtccacctgtccgccgactgcccgggctacaccggcaacatctaccgcatcctggacatcatcgaccccacccacccggtggaggtgggccgctggtgggtgccctgccagttcaccgacggcctgaaggagggcgagtacccggtggacggcccccagcactgggagtttatggactggccccagctccacgggcctccgttcgtggtgggcaacttggcctatctgtcctactactgtgagggcctcatcattctggacatctccgacatcacccgacccaagaagatcggccagctccagctgaagggccccttctccggcaagttcgccggcgcccgcacccacacctgcctgcccctgcccggccgcagcttcctggtggccaccaacgagggcgagcgcttccccttctacaacaaggagattctcaccaccggcccccgcaagggcgcccagcccatgaacaacctgcacatgatcgacatctccgatcccaccgatccccagctggtggccgagttcccctaccccgaggtgcccgagaactatccctggcccaacttcaacaccgccggaatggacggcgcccagggccccttcggcccccacaacatccacgagcccatgagcaacaagccctggctggaccagaaccccaaccgggtctactgctgctacttccacgcgggcatgcgggtgtatgacgtgtccgacccctactacatcaaggagctggcctacttcatcccccccaacccggagaagctgctcttcgatatcccggtacccggccccatgctggccaccaccgaggactgcgtggtggacgaccgcggctacatctacatggatacctggcacgacggcatgtatatcctgcgcatgaaggaagacaacaagaactaaaccacaaaaaagccctccgccgttcggcggagggctttttatcggcctgaggaggctcagggacgcttgatgctgaggttgagtgccagggcggccacggcgagcaccagcagcagcaccagtggggcggcgtagcccccggtttgggtgagcaggacgctggcggcggtggcaacgaaggaggcgccggtcaggttgaagttcatgacggagaagttgagggagaagtacttggcgccgtagaaggaggaggtaaaggcggaggagatggtggggcaggcgccgtaggagatgccggtgatgcacaggccggccacgcacagggggacggagtggacggccacggacagcagcgtgaccagggcggccaggatggcggcaccgttggccagcagcatggtgcggcggcggcccaaggtgtcgaagagggcaccggtgaggatgcggcccaggccgttgcacacggcgagcacgcccaccagggtggtggacagggcggcgctggcccccacggagagggagagatcctttgcaaaggagataacggtgttgcccatggcggccaggaagatgatgcacaggaaggcacgccagaaggtgaagcggcggagcatctggccggtggtgtagtcggcggcctcaaagtcctcctgcacccggttggcggcggccttgggctggggcaggacggtgccgggggcggggaggcggataagaagggcggccgcgaccagcacaattccgatggcgacgcccaggcagaggaaggccgcccgccagcccacggcgggattctggatgagggcgtcggccagggagccgagcacgagggaggaggcaccgaagcccatcagcagcgcgccggagcaggtgccctttttgtcggggaaccaggcctgcacggtggagagcaccacattataggcaaagccgatgccggtggcggtgatgacgccgtagctgaggtagagcatgggcaggctgctgccgtccagccgggcggtcagtacaaagccgatgcacgccaaagcgccgcccagggcgatggtcaggcgggtacccagccgcctggccagcagaccgccgcccactccgcccagacagaaaaagcacatggtgagagtaaaattcatggtcagttgggaggcgttccagccgaatgcgtcggccagcggtgctttcagtatggaccaactgtaaaggatacccgcgaagagcatggaaaggatgcctatggtcaaataaaaccaccgaattgtgggggccttggtgttgcagggcataatatgtcgcacctcaaatcttgtattttatattttgcattatatataaaattttaaaaattgtcaatcggcggctgggaattttacaggagggagcggccggcccggaggccaatgccggtaaaggctgcggaggtatggagcgttacccgtattgaaaaaaacacggttatagaggagggtttaagtctgtcacatctgtaacaattctgtaaaaaattttttgaatcatgtaaaaaggtggttgcccttttcgaagggatagagtataataagggcacacgctcagggaggggaggacaaaatcgtctggaccaaactgggctatttttctgaaaggaaggtagattacaatgaagaagtccaagaagctccttgcactgctcctgtgcctggcgatggtcttcggcctggccgcctgcggcaacagcaacaagcccgccgacagccagacccctgcgcctggcactaacaccgagacccccgcgcccgagaccgagacccccggcgagaccgaggccgaccccgacgccatcgaggacagcatgacctccgccgacggcaagtatcaggtggccttcgtcaccgacgtaggccagttgaaggacaagtccttcaaccagggcacctttgacggcgtaaagctgtatgccgccgccaacggtctgagctacaagtactaccagcccgccaacggcagcgaggccaccgacgatgaccgctatgacgccatgaaggccgccgtcgagggcggcgctgacgtggtggtgtgcgccggttacctgcaggaggccgcgctgaagaaggccgccatcgagaatcccgagacccccttcgtcttcatcgacggctatcccctgaccgatgacgccggcaacaccctgtccaacgtggctggcatcgccttcaaggaggagcaggccggctacctggccggttacgccgccgtcatggacggctttaccaagctgggcttctccggcggcggcggcggcaccaatcccgcctgctgccggttcggttacggctatgtccagggcgccaaccacgccgctgaagagctgggcatcacggttgacatgaactactcctggcagtacggttctaccttctccgcctctaccgacctgcagaccatgatcaacggctggtatgtgaacggcaccgagatcgtcttcgcctgcggcggctccatgttccagtccatcgtggccgccgcctccgccaacgacaagtttgttatcggcgtagacgtggaccagtccggtgagtccgagtacgttgtcacctccgccatgaagggcctggctgacgccgtgcagtgggctgtggccaaggtctatgacggtacattcgacaccatcggcggccagcagacctccctgggcgtcgccgacaacgccgtggagctgcccaccggcgcggattcctggcgcttcgagaccttcacagtggagaagtacgagtccctgtaccagcagatggtggacggcaccctggtggtggacgacgactacactgtgatggacaacgccgagaccgctaccaactggagcaacgtgaatgtgaatatcatctgattcacacaatcacctcagaaagagggagagggctttgtgccctctcccttttcttgtgacagaaaagggacaaatttcttgtgttttccatgggggtattatataataaaactatactgtatagaggaggcgggatgaggactatggaagcggaaaacgtcattgaaatgcttcacattaccaaggaattccccggtatcatcgccaacgacgatatcacactccaactccgaagaggggaaatccacgccctcctgggggagaacggcgcaggcaaatccaccctgatgagcgtgctgttcggtctgtatcagccggaagcgggcgaaatcaagaaaaacggtaaggtggtgaagatcaacaatcccaacgacgccaccgcgctgggcatcggcatggtgcaccagcacttccaactggtggatgtgttcactgtgctggacaatatcattctgggcgccgaaaccacgaagctgggcttcctgcagaagaaggaggcccgcaaaaaggtagaggccctgtcggagaagtacggcctaaaggtggatctggacgccagggtggaaaacatcaccgtgggcatgcagcaacgggtggagatcctcaagatgctctaccgcgacaacgagattctgatctttgacgagcccaccgccgtcctcaccccccaggagattgatgagctgatggccaccatgaaggagtttgccaaggagggcaagagcattctcttcatctcccacaagctcaacgagattatggccgtggccgaccgcgtcacagtgctgcgcaagggcaagtacatcggcaccgtggatactaaggacaccgacaagcagtccctgtccaacatgatggtgggccgcccggtgcagcttgaggtggtcaaggagaaggccagacccggtgaaacggtgctcaaggtggagcacctgacggtcccctcccatacccaaaagagggatgcggtccatgatgtcagcttcgaggcccgggcgggtgagattctgtgcatcgccggcatcgacggcaacggccagagcgagctcatctacggcctgaccggcctggagaagtgcagcggcggcacggtgaccctctgcggccacgatatcagccacgcctccatccaccaccggagcgcggacatgagccacatcccggaggaccgccataagcacggactggtgctggactttaccctggaacaaaacatggtgctccagcgcttccgggagccacggttccagcacatgggctttgtcaagcagggcgaggtgcgcgcctacgcggaaaagctgatcgagcagtacgacgtgcgctccggacaggggccggtgaccattgcccgctctatgtccggcggcaaccagcagaaggccatcattgcccgcgaggtcgaccgggagaagccgctgattgtggcggtgcaacccacccgcggcctggacgtgggcgccattgagtacatccacagccagttggtggccgagcgggacaagggcaaggcggtgctgctggtctctctggagctggacgaggtcatgagcctgtccgaccgcatcctcgtgatgtatgagggcgagatcgtgggcgagctggatcccgccgccaccgacgtccaggagctgggcctctatatggccggcgcaaaacgaatgaaaaaggagggcgagggggcgtgaagcagaagctttccaacctgtggggcaaagacggcaccaagtctgtactggcctcactgatctccatcctcatcggcatggtggtgggtgcgctgattatcatcatcgtgggtgccgccaacccgtccctggggctgaacagcgcgtgggagggcatccgcctggtgttcggcggcctgttcagcaccggacgcgacgcggcgggcacgctgaccttcggctttaactccacgaacttgggcaacatgctcttccgggccaccccgctgatccttaccggcctgtcggtggctgtggccttcaagaccggcctgttcaacatcggcgcgccgggccagtacctgatgggcaccgccgccaccctgattctggcactcaccatccccactgaaacggttccagctcccctggtgtggctcattgccttcctgggcggcatgctggccggcgccctgtggggctgtatccccggactggtgaaggccttcctcaacatcaatgaggtgctggcctgcatcatgaccaactggattgccgccaacctggtgacctggctgttcgacaagggcagcctgtttgagagcctccagaatcacgtggagaacaccaagactgcctatatctacaagaccagtttcaatggtgtggagaccgccaagctgggtctggacaaactgttccccaactctcaggtcaatggcggcatcctgattgccatcggtatcgcaattctgatctatatccttatgaacaagaccaccctgggctacgagctcaaggcctgcggcgccaaccgccacgcggcccggtacgccggcattgccgacaagcggaacatcgtcctgtccatggccatcgccggggccctgtccggcgcggccgcttccctgtactacctgtcgggtaacacggagtttttctggtctacctaccagacccttcccgccaccggcttcaatggcattcccgtggccctgctggccgtcagcaatcccatcggtgtgatctttaccggatgcttcatgtccatgctggatattgtgggtctgcagcttaccaacctgacggcttacaatgagtatatcaccgatgtcatcatcgccatcatcgtctacctcagcgctttctccctggtcatcaagatgttcatcagcggccagcggaagcgccggagcaaggctgccctgcccgcggcagaggcggcggccaaaccgccggagggcggaggtggcgcagaagtggagaaaggaggcgagtcggcatgacgttcctcattcagcagaccctgatctatgccgtcccgctgatgatcgtggcgctggccggcgtgtttgctgagcgcagcggcattatcaacctggccctggaaggcattatgatcttcggcgcgttcgcgggcgtcctctttgtcaacgtgacccagaaggcgggtatcttctccgaggccaaggcggctggggactgggtggcgctccagggcttcatgctgctggccatgctggtggcggccatcctgggcgcagtgttctccctgctgctctcctttgcctcggtcaacctgaaggcggaccagaccatcggcggtaccgcactgaacctgatggcccccgccctggtgctgttcttcatccgcatcatcgccaaccagaacaccctgcagatggcggagggcgacgcggcaagctggttcatgctcaaaaagagcttcttcggctacggccgcagcgacgaaatgggcttcttcggagacaccttcatcaacaaggcatatctggccacctacatctgtattatcctgtttgtggtgctgtccatcctgctctacaagacccgcttcggactgcggctgcgctcctgtggtgagaatccacaggcggccgactccctgggcatcaacgtctatgtgatgcgctacgccggcaccacaatctccggcgccctggcgggcatgggcggcttcgtctacgctctcaccaccgccaactgcgcctctaccggcgacgtggccggcttcggcttcctggcgctggccgttatgatcttcggcaactggaaacctttgaacatcgccggcgcggccctgctgttcggcttgttcaagtgcatcgccgcctcctatgccagcatcgacatcaacggcgacggcgtattcctgctggccgagctcggcatcagcccccacttctaccggatgctgccctatattatcacgctggtcgttctggccttcacctccaagaagtccagggctcccaaggcggagggcatcccctacgacaagggaaagcggtaacggagtatacctgtactttagcagatgttctccactggaaggtaggccatatgtcctaccccaggaaagaaaagtgccccgccgttccatcggaacggcggggcttttttcagagaatgcgggagggctccacgctttcggccagggcctgcagcgcgtcgggctcttccagacgccagccctcgggggtacggcggaggtatccggcctgggcaaagcggctcatcacccgggtaagctgccggtagctggtgctcagcgtctcggcggtgcgggtcagggtgccatggaaccagccgtcctccgcctgggagagcagataggcggccagacggttttccagcggaagcagcaggtcgttggtggcgcggaaggtattcattaccacaatgcgggccagccgccgggaggcatagcgcagaaaccccaggtcggagcatagagcctcccggtactccgccagtgggagggccgcacacagcgcgccgtcctcctgggcgcgctggtcggtggtggcctggatgttgcccagcaccacctctacgtcgccgcccactagttcccccggctgggcggtggccaccagccgggtgcggccggcggcgttggtcaggctggtctggatgccgccctccagaagcaggtagaggctctccatgggttcccgcaggcggcagaggtattctcccttctcatagtactgaagtgtccagggataggcggcggtccagggaaggcgctcgggaatccggcagcgggcaaacagggccgccagccgctccggatcttggaagcgttccatgcgattccctccttgtgcagtcaaatcacgcggatgcgtttccatctgccccgccagtagcggaacaggaagaatgcggcccgtaccacccagtcggcgatcatggcgagccataccccaagcagtcccaggttcaggccccaggcgcaggcaaacacatagctgagcaccacccggcagacaaacatggagcccagggagaccgccatagtgaagatggcgtccccagccgcccgcagggagttgggaagggtgaaggccaggggccagaacaggacgttgcccacggcgcaggcccggagcacttgggcagccatggcgcaggcctctgggctcaggtgaaacagggtgaccagtcccccagccgagaagaagagggcggcgctcatgaccagcatgcaaagatagctggctcccacgagacgcttggtgtagtagaccgcctgccctgtctcgccagcccccatacactggccgatgacggtaatgatggccagtcccagggccatgccgggcacattgatgaccccggccacactgttggcgatggcgttggcggccacggcggaggtgccgaaggtggtaatcaggttgaggaccatcagcttgcctgcctgaaacatgccgttttccataccgttagggatgccgataaataggatgcgcttgacgatggcgccccggaactcaaaacgcagcagaccctccacccggagcacatggtcggggtggttgagcagcgtcatgataatgacggccgccgcgatgcgggagaccagggtgccgatgccggcgccggcggcccccatgccgaagccgaagatcagcaccgcattgactgtgatgttgattacattcacaaccagggagcagaacatggacaccttgctgttgcccatggcccggaacagggcggccccggcgttgtaaatgcccatgaagggataggccgtggcggtgagcaggaaatagaccagggcgttctccatcacgtcggcctccacgcggccgaagatcaacgccagaatgtgctgccggagcaccagcgcggcccccatcagcagcagggacagggcgcacatggcgtacagaagctgcttggaggcggccttggcgttgtcggtgtcctgccgccccagatactgggagaccaccaccgcgccgccggtggagagggcggaaaagacctgaatgatgagtgtattgatgttgtccaccagcgagacgccggatacggcggcctcgccggaggtggtgaccatgacggtatccgccatgccgacagtcatcagcagaagctgctcaatgaccaggggaatgatgagccgcagcagtgcgtcgcgggaaaagagcaggctgctgcgggccggtgcctgttccggcattctcccgcctcctttacatgaattttacatagctctaccattttactcctgtgaggcagaaatacaagcgccgaactgcacaaaaaacggaggccgggcggagaaaaaccgtccggcctccgggcgtgggctcagcaacggcccaggtagcggcacaccgccgcattggcccgggcggccagctccccctcgtcggcggtcaccagctccccgttctgcaccacggccacgccgttgacgatggtataatccaccgggcccttgagccccaccgtccccagcagggagagggggtcgaactgggcgcccgccagctcaatgcggtccaggctgatcaggaagcagtcggcggccatgccggcggccaggcagccgatgtcgtcccggcccagcaggcgggcggagccgcgggtggccagcttgaggatgtcgtacccggtgggggcgttctggctggactggaggcggtggagcaggtagcacacccgcagctcctccagcaggttggagccgtcgttggaggcggctccgtccaccgccagacccaccggcacccccaggcggagcatctcaggcacccggcacacaccggaggagagcttcatgttggagatggggcagtgggccacgccggtaccggtggcggccagcgccttcagctcgtcatcgttgaagtggatgccatgggcaaaccacacgtcggggccggtccagcccagcccctccaggtaggtcagagggcgcaggccgaaccgctccagggtgtactgctcctcgtccctggtctccgccacgtgggtgtgcagccgtacctccagggagcgggccaggcgcgcactctcccgcagcaggtcggtggacacggagaagggggagcagggggccagggctacctggcgcatggagaagcgggacgggtcgtgccacacccgcaccagccgctccgagtcggccagaatctggtcgatggtctgtaccacgctgtccggcggcaggccgccgtccttccgggagagatccatggagccacgggaggcgtggaagcgcatgcccaccagctcagccgcccggaactgggcgccgatcagatcccccgcccgggcggggaagacatagtggtggtcgaagcaggtggtgcaccccgtcttgagcagctccgccatgcccaccaggctggaggtggccaccacctcttcgtccaggtttttccacacatcgtacagcgtcaccagccagggaaagagctccatccgctgcacttcgggcagattgcgggaaaagagctggtataggtggtgatgggtattgatgaggccggggtagaccaccatgcgggaggcgtcgatgacctggtcggcctgccgcagctcggggccgatgtactcgatggcgttgtcccggatgaacagattgctccgctcatacaggcggtcggtgtcgtcgcaggagacgatgtagcgggcgtttttaatcagcagagtggacataaaaaacctccaatccccaatcaggcgggcgcataggtcagccggtagaagctgccgagctggatggtgatggcgtcggagcggagaaagagagcccggtctacatacagggcgaactgttcacccgggccctggctggccagccgggccgcatcggggcggtcctctccgtcggcctgcacgggcaggtcggaaacccggagctgggcggtgatgccgccgtcctcgtcaatccggtaggggaggagaagctgtcccccttcccgggagagctgatgctccggctgaatgacggcgtagagggtgccggggtcctcgtcagaccgggcaaaggcggtgagatagaaggtggtgtccccgtcctggagcagggggagcttcagctctccctcagcctggctgatgggaacctcctcgggaaagccctccggcatctgctccctggaaagggtgagggtgacggtggcctcctcctggccggtgatggcgtagccctgccgggccgcgatgcgctccagcgtgacgggacgcccccgcaggagcagaacgaccgccccggccagaaggacgagggtgatcagaaaaagtacaaggggaagttttctgcgtgacgccatggcagcgcctcctttcaccccttaataataccacaggcccgcgggaaaagaaagtgccccggacgttgtccggggcacttcggagattattcgtcggcagtgatggtgtagccgctcaggtcgatctggaaggtataggtggcgatgatattgtcctgggagccgtcggtgtcgataaagcagagggtgtagtcaaagacgccgccgtccttgagccggtagctcccctccgcctcctcggcgaagacggcgccccacttgaagtagtagttctcgccgtcacgggtccaccagccggagccggcattggcctcggtggtgctgggcatggcccaggtgttccacttgccgccgttgacagagcgggcaattttgtcaaactggagggtgccgccggggatggcctggggcacggtgtagtagacggtatactcgccgccgccgcccatagaggccacctgggtgtgggtcagggtgccgctgccgccgttctgcaccagggcggtgctgccgtcaaagctcaggccttcggcggtggaggagaccccggagggcatctcgtgggtggagacggtcacgccggtcagcttgacggcgggcgtctgcacgccggacaggtccaccacgtactgcacggcctcctgtccctcccacttcacggtgatgtgggtcttgggcgcggtggaggaggcgttgaggaagaacaccgcatacttgccctggccgatggaggagtcctccgtgatggccgcgctttgggtggcctcggcgctggcctcggtgccgaagtggtactggaaggtgccctgctcatagccctcgggggcctcgatggccacgcccacccaggcgcccttgccggcaccctcgctctggtggatgggcaccacgccgtcggtggacagggcgatgcggacaaaattctccccggttttcttggtggccttggcggtgacggagggcatgtcctcctcgaccccgtcctgatccacagggcggacgcctacgatgccggctacggcctcctcagacacggagccgccgcccccgccggaaccgccgccaccctggccgggttcctggctgtcctcggagccggtgacctcctcgccctcactgttctggggcggggccacatcgtcggcgacctccacgtgggcgggccgcttgccgtcaagcaccacgttgtcggcctgtacctccgccttgttaatggcgccctggttgtccaccttgacggcggcgcgggcggtcagggtctccacagaggcgccgctcttcacggacacggagctgccggccccgtccacagccagacgggcaagctgcgcgccgctgcccagggtcaggctggcgcggtcaccggagagggccacgtcgccctccacctgggaatcggccacagtcagagtggcgccgtgggtggaaacccgcagatcccgctccagcctggcgttcttcacggtcagattggcctcgccggctttgggggctacaagcagattgccggacacggcggcgccgtccacggtgatatcatcggcggccaccagcaggatgccgtccacatcttggtcgatggtggcgccctcctccacggcatattcggccacggagctgtccagtattttgaccacggagccgcgggtgatgctggacccgagggccagagtctggttgcccacgccctggatgatgccatccttcgccatggcgtcaatgtacccggccgaccagtcggcggcgtccttgccgtccacaaagccgctcagatccggctgggcggtgggacggatgcccagggcccgggcaaagagcacggtggcccgctcccggttcatgggctcctcggcgttgcagttggtgccgtcgccctggagaatcccggcggcggtgagctggaggatgtagggggcgtaccattcggtgcccttcagatcggcataggggttctccacagtctcggtgtagcccatcgcgcggctcagaatggcggcaaactcgcccacggtcatgttggcgtcgggacgcatgccgcggctgtcaccctctacaatgccgtaggcgtgccagcgctcgaaggcggactggctccagtggccgtccagctccggcagagtgcttccggttccggcggccgaggccagcggggcggtcagggaggccgtcagggccagggagagcagggcggcaggaatctttcgcatagatgatgctcctttttgttgaacgtcccggccggcgtccggcgcgggctgtggtgttatcatactaaaacagtaggagcatttcaatgcagaagttctggaaggggagggagggtctgtacagcctgccacaagactccggcgggggaaggacggttacagttcctcggtatgcagcctgaatttcgcagcctgctccttcaacagctcagcctgtccggacagctcctcgctggcggcggcgctctcctccgctgtagcggagctggtctgtacaacactggagatctggtcaaatcctgccttggcctggtgaatggaagacttctgctgttgggagagctcactgatgacctgggcgctgtcggacgccagggtaaccccttgggtgacgagtcggaaggaagcggcggtttcatcggcgagagccttgcccttctccaccactgagagggcattggcgatcagctccgcagtttccttggatgccgctgcggtcttgccggctaagctccgtacctcgtccgccaccactgcaaagccttttccggcgctgccggcacgggcggcctctaccgccgcgttcagggcgagaatattggtctggaaggcgatatcctcaatatttttgacaatctgcccgatttcattggaggtagaggtgatctcatccatagccgtcagcatgcgctccattttgcggccgccctcctgaacctcctgtgaaacctcctgcattttttggttgacctcagtgattttttccgtgttcagatcgacatcgtgctccatttccgacatcatggcagccaactgctggacgctggatgcctgctcggtggctccctgcgcctgggactgggcgctgatggcaatttgttctgctccggagctcacctggtccgcagacgacgcgatggatttcagtgcatcggatacccggcctctcgtgttgaggagcccctccttgatggaggagaattctccggcgtaatcatgctggagggcaaaggaaaagtctccgtccgccatttgggtcagaacagcagatatctcggagatgtaatcaatatacagccttaaccgctccaccatctgctccagggaaaggcttacagccccaaattcatatttggaattgcgcgggatctccacagacaggtttccgtccgcgattttctgtgtggtagcctggagggtgtggaggggccggacgatgctccgccggagataggccagaaggatgaaaaacagaagggcggcaaataccgcgcacaggatggaaagcgtgatgccaagcgtatgggcgtccgccatcagctcctgctccgaggctgtggtgacgatataccagccgctgtccgggatctggcggtaccaggccagataggtttgaccgtctgccgtgtagctgccggagccctcctgctggctcagaatctgccgcccaagcgcggcgaatgaagggttgtcatcctccaatatgttggcggacaggagcttctcgctgtcctcgtctgcaatgtataccccggtatcatcaatcagaaaggcacggccgttggccacaacgtccagcgagagtaccatctgctgcatctgagtcaggtcaatatccgctgtggcgactcccagaaagcggccggtctcgtcgtagatcggggcggaggaggtcaccatggaaatctgggcaaattcatcgtaatatggagcagaccaaacggacttttgagtggtattggcggcgtttgtgtaccaatcctggtcggtataatagacgccctcccccagagaatagttgtctacataagtgacggctccattctggcgcatgcaatagggagagaaataccgctgctccggtcggtactggtagggctcgaaccaaatcccgccgccgaacgtctccgggttgctccccacaaaggaggtcagaatttcctgataggctgccgcatcccaatctgacgcggtctgctccccctttacagcctgcctttggacagcctccacgccgcgcgccatagtttcagcaaccatgcggttattggacagcgacatttcgatggaacccatggctaccgaaaggcactgggacatttcgttgcccgcgctggtttggatgatggccttggagctcaggtatcccatcagcgagaggactgccatggatataataactgccggtacgataacgaatagaagtgaggtctgaatggagcgaaaccgtgttgcatgcttttcctgtgttctcataaggcatgttctcctttattctctatctctcataacagatgcatccttgaacgcgaattggctgctgcgccgcgccctcctttctgtttgaaaacgtgtaccttttaaaattaaaaaaattgtagcaaaggcttaatttgaaccaaaattgctccgattaaaaattggagaacagagaatctcaaaaccagctttaattgtttggaaaagtgtactttttcagcttcattttatgatttaaataacttgttgctactaattgatttcttgtaaaacacgcagcatattcggaaatatggggacagagttaaatttttaaaaaagtacaggttttcaaattttcggaaatacctccatttgtttagtccggtgtttccagttttattgccttggaatagaaggtccctgtgggcattccgcaggccctggccgcctgtcggagtgttattttttggccccgccaggcctgatggagcatgtggaaattgtctgggaggggaaggggagggcggccaaagcgtacgccccgggccttggctgccgcgataccctccgcctgccgctggcggatgttgtcgcgctcgttttccgccacgaaggagagcacctggagcacaatgtcgctgagaaaggtgcccatcaaatccttgcctcgccgggtgtccagaaggggcatgtccagtacggcgatgtccacgcccttttccttggtgagcatccgccactgttccagaatctcgctgtagttgcgccccagtcggtcgatgcttttgacatacagaagatcatcccgccgcaggcggcgcaccagccgtcggtactgggggcgctcaaagtccttgccggactgcttgtccatatagatgttctcctccggcaccggcagggcagccagagccagccgctgccggtcttcgttctgttcccgggtactgactcggatatagccgtagattgttccagccacgttccgtcctcctttttttgatctgaaacttttattttatcgaaaacaggagaatgtgcccacataccaggaactataaaagcaaataaaaataccaaaaaagggcccggtgcagtctgcaccgggcccttttcctgggagggctgttactgaatggagaccacctcgtagcccgcctccgtgacagcgcccctgagtacgtcgtcggacacgtccttggacagggtaagggtggcggtcttggcctccaggttcaccttggcctccacgccgtcgatggcgttgagggccttctccacgtgggcctggcagtgggcgcacatcatgccgttgatgctcatggtcttggtcatagcactcgttcctttcgtttccacagatttgggggttccttctgaaaccggggcggcgggggactcccggcgctccggacggaagaacttgaggcgcagggcattggacaccacgcacacggaggacaggctcatggccgccgcgccgaacatgggggagagctggagctggaacaggggataccacaccccggcggccaggggtatgccgataatgttgtagatgaaggcccagaacaggttctccttgatgttgcggatgaccttcctggagagctggacggcggtgaccgcgtccagcagatcgctcttcatgagcaccacgtcggccgactcgatggccacgtcggtgcccgcgccgatggccaggcccacgtcggcccgggccagggcgggggcgtcgttgatgccgtcgcccaccatggccacccgcttcccctgggcctggagctctgccacggtcttctccttgtcctggggcagcacctctgccaccacccggttcacgccaagctggcggcctactgcctcggcggtgcgccggttgtcgccggtgagcatgaccacgtcgatgcccatggcctggaaggcgcggacagcctctgcgctggtgggcttgggggtgtcggccaccgccaccacgcccagcatccgaccgtccccggcgaagtacagcggcgtcttgcccgcctgggccagcccctccgctaccgcgtcgaagccgtccagcgggacgccggcctcctccagcatggcccggttgcccgccaggagccgctggccctggatgacgccgcggatgccccggcccggggtggccagaaagtcctccacaggggccagggggatgttccgggcctgggcctcggcggtgatggcgtcggccagggggtgctcggagggcttctccagggaggcggccacgcacagaagttcctcctccgtcacacctggggcggggcggcagtcggtgaccaccggcttgccctgggtgagggtgcccgtcttgtccagcaccacggtctggatggtgtgcagggtctccagcgcctcggcggacttgatcaggatgccgttctccgcgcccttgccggtgcccaccatgatggccacgggggtggccaatccaagggcgcaggggcaggagatgaccagcaccgccaccccggcggtgagggcccgggtcacgtccccgccggtggcgatgagccaaacagcggcggtgacgacggcaatagcgatgaccacggggacgaatacccccgccaccttgtcggccagcttggcgatgggggccttggaggaggccgcctcgtccaccagacggatcatctgggccagcgtggtgtcctcccccacccgggtggcccggaaggtaaaggagccggacttgttgatggaggcggcggccaccttggcgccgggcagcttctccacgggcaggctctcgccggtgagggcggactcatccaccgaggaggccccctctgtgaccaccccgtccaccgggatgcggccgccggggcggaccacgatgaggtcgcccaccgccacgtcctccacgggtacctctacctccgcgccgtcccgcagcaccatggcggtcttgggggccagatccatcaggcgggtgatggcctggctggtcttgcccttggagcgggtctccagccacttgcccagggtgatcagggtgaggatcatgcccgcggactcaaagtagagatccatggcccagtgttccacctgggccagctcggcggccgcgtcgcccgcgccataggccgcccggcccaggtgccaggcgatgaggaacagggccgccacgccgtagagcaccgcggcggaggagcccagggcgatgagtgagtccatgttgggcgcgcggtgccacagggtcttgaagcccaccgtatagtatttgcggttgatatacaggatgggcagggtgagcaggaactggaggaaggccaccaccagggcgttggacggctggtggaagaaggcgggcaggggccagcccatcatgtgccccatggcgatgtagaacaggggcgccagaaacactaaggacgtgaggaagcggcgcttcatccctgccagctcctcctccatggcgtcggcgggccgggcggccggggcggccttcccggcggggccggggagggaggcgccgtacccggcgtccgtcaccgcctgaatgatctgttccggcccggtcttgccgccgtactctaccagcatggagttgcccaggaggttgacgctgacgctgtccacaccctccacctggcgcaccgccttctccacgtgggcggagcaggcggaacaggtcatgcctgtaacattgaatttctgcttcatagggttcaccagactttctaatgtgcgtgagggttcaagggccgcccctacttcaaaatacggcccagggtggccacgaactcatcgatcttctgtccgcgctcggcatcgctggcggcctcctgcacacagtgcttcaggtgggcggccaaaatttccttgttggcgcggttgagaatggcctcggttgccatgagctgctgggatatgtcgatgcagtagcggttctcctccaccatcttaatgatgccgtccatctgcccgcgggcggtcttgaggaggcggaggactttcttttcatctgccatcatgcggttaacacccccctggggtgtagtatatggcaaagcgtaaaaaaagtcaaggccctcttgttcagagggccttggctttttattccttgccgtgggtgtcgcggaacaggagcgaaatgcaccagagcgccgccaggcccacgagcgcgaagatcacgcggctgaaagcgctgtcctgtccgccgaacagagcggcgacgaaatcgaactggaacaggccgatgctgccccagttcagcccgccgataatggcgagaatcagggcaatcttatctaaaatcatgggttgtactgcctcctcacattgagataccgtgactagtatctccggtgagaagaaaatcatacaaaaccattttatttcaaataacggcccagccagttctgccggagggccacggccttctgggggcagagttcgtggcagcagtagcagtggatgcaggccctggggtcgatgcgggcctttccaccggggccgtccatcgagatggctttccccgggcaggcgctcttgcagatgccacagcccacacaggcgtcggtgcggatctttggggtctgggagagcacccgcttgcacagcttgctggcaggcccggccaggggccccagaaactccatcaggttgcccttgatgcggctggggaagcggtagtcgtccatccgcagggcctccagaggctcgcccagcagctccacctcctcgatgcggctgggcttcagcccccggcgctgggcggccagaagcaccggattggaggccagaggcagtccgatgagagcggcggccgccacgtccagggcaagagggctgtcggacaccagcagcacgccggcgtgcctgggggtgccggaggcgccggggccgtccccctccatggccagcaccccgtccaggatgctcagccggggcctgacgtactccgccagatccagcagcacgtcggcaaactgctcctggctgggatgggtggcgtggtagcccaccttggataggccggggagcacgccgaacaggtttttcaccgctcccgtcatgctcataagcacgtgggtcttgagcttgggcaggtcaaacaccccgtcggcctccgccaccggggcgatcacctccgcctgcttgagaacccgtcccgcagggagggacaccgtgcgggtggaggcgtcatagcacagctccgccccggaagcggcggcggcctgggccatgccggtcttttcgtacaggccccgcaggacggcctccttgtggagggccccgccggggctgtcggtgatcaccgccgtgccccccgcctccgccaccagcttcgccgccgcagcagccaccgccgggtgggtgcagatggcgctctccggcggcgcggcccggagcaggttggccttgagcaggatgcgctcccccggccggacgaagcgctccatcccgcccaaggcggccaccgcctcacgcagctttgcctctgcctgtccgtagtccggacaggcggccagatagacccggttgccctccatgaaacccctcctaggaatccaaactctgttcagtatacccgccggagggggcttcgtcaagggcggggaggcggcccagggcccggacagaggaaaaggtcaccagcaggctggcccccatgcccagcgccacaaccacccagatgtgggcctgaagggcatcgaacagcaggccgtacaaggcctgcccaagaggcatggcacaggtggaaatagctgccacaaaggaggccaccttgcccagcaggtggggcggcgtggcccgctgaagataggtctgggcggagacggtaaacagcatggcgcaggccatgcccagcaaaacagagaccaggatgactccataggcggccagggacggaattcccagcgccagagccagggccatggggagcagcagcagggaggtacccagcagaaaccgccaggcccggcggatatccgcgccgcggagcaccagcccagagagaagcccgcccacgatggagcccaggctgagggcggcctcggcaaagctgtagtgcagggaggacaggcccaggctgattttcaccagatagggcagacccaccaccagcagggcggagaggaagaggttgagcagggccaccagggccagtacccgcagcaggccgggctgctcccgagtcaggaaccggcccgcgtcccggagatccctccacagggcggccagcggagggccggcgagggttcggcgctggaaggggatacggagaaagagctccatcacagccgagcagaagaagcaggccccgcccaccgccaccatggggagcaggcctacccagccgtagagcataccgcccaggatggggcccagcagattggccagggcctgtacctgggccaccacgccgttggcggcgggcaggtgctcctccgacgccagggcgggtatgctggcctgcactgagggctggtagagggcctgaatggctgccaggagcaccatcagcaccccgacggccagaaccgtgccccggctggcaaagaacaggccgtaccccagtaccagggcggcggtgaagaagtccagcccccacatgatgcgctgccgggggacgcggtcggccaggacgccccccaggggggagcagaggatggtgggcaccatggacacggccaggatgccgccgaaggcggcggcggagccggtggtgtccagcacatagagggacagggcgaagcggaggatggcgttgccgaacagggagatgatctggccgaggatcatgagggtgaagtcgcgggaaaacaggcggtcagagcgcatagggcggctcctttcgggcggcgggcgcgccgtctgagcggcgcgtccggagcagaacgcaggcggcgagggccgccagggccagggcggggagaagccatgttttcttcatagagatccacctttctttttaataccggcggttggtatgtatcttgcccggaaaaaccgcccccgcaggggcggtggaggagcgggcggctcaatcgtcctggagcacctggtcatagtaattcagcgcgtcggcctggagggcctcgtccagcacgggcaggccgaagcggtccagaaattccccgcagaagcgcagcttggcggcgaattcctcccggccgccggggaacatacccgtccacacgttggtcagaagcatgagcacctccgcgatctcgtgggggtgggtcacgccgggcagggacccgtcggccatgcccagccggatcatcccctccacatagggagcggcgtcccgaaaggtggattccagcgtgagcagggcaatcttggggttctttacaatgtggtggatcgccagccggtctacctcccgcttggccgggtcggtgagaaagtggcggaaggcgtggcgcagtttttccaagccgttccggccgggaagcttggcggggtcggagaaccactccaggttttcgtagtagcggtcgttgatccggtccaggatatcctccttggacttgaagtggtggtagatggcccccttggacatgcccagggcgtccacaatgtcctggatggtggtgtgctcgtagccctgctcggtgaacaggcgcatggacacgtccagaattttggccacggtctcctctggatgcttgttgcgggccatggggccccctcctttgcatacataccgtcggtatgtttaaaatagcacagccgcgcccctctgtcaagaggggcgcggaacttaccccagagacttggggccgaagccgtgggtcagcagctccgacaggggcagcttcacgaagctgtgatccctctgcgccaccagtacggtgagtccgggggcgaactcatagagcatctggcggcatgcgccgcagggccagcagggctccgtggagttgcccaccacggcgatgcgggtgaaatcgtcccggtgcccctcgctcaccgccttcaccaaggcggtgcgctcagcgcagatggaggagccgtaggccgcgttttccacattgcagccggtgaacaccgtcccgtcggcgcactccagggctgcgcccaccgggaaatgggagtaggggacataggagcgctccagcatggtaaaggccagctccaccagttcctggtcggtcatagggaaacctccttatcaaaacgtggtataaaaggtgtaagccattataccacgttttccgtgtcagcgcaatcacggacgaccacaggtacgcaccgacgggagcaggagcatcagcccgccgcaggtcagagtgattaccccggccagcaggaaccagaggggaacgtcggtggcatcggcgaacagggcggtgagtcccagccccaggggggaggccagtgtcatgatggccccggtgaggcccagcacacggcccaggtactccggctccaccttggtttggatcagggccatgaacaccgagttgaaaaagggagcggacaggcccatcagcagggacaggccagcaaacgcccggaagccggaggggggcagcaagccggccagcaccagggtgagccccagtcccagcactgccgccgtcatggtgatgattttgttccgggtacctccccacaggcccaggagcaccgatccggccagcattccggcagaaaacagggtttccaccagagcggcggcggcggagtcccctccgaaatactccatgctcattaggggaaacagggcggataccggcaggaaggccactgagaacagggcacagatgagggacagctcccacagccagcggtgagaacgcagcacagcgagcccctcgcgggtgtcctgccagagccggagcggccggccctgtgcttcggcccgcagggcgggcagccgggccaattgtactccggcgatggcaaaggcggcccccagggtgtccagcaggaggatccaagccagggggatgcgggcataaagaacggcggccagcgcgggggagaggagcatggagacggtctggatgccctggctccaaccggcgcaccgggtcagggcatcgggaggggccagcaggggcgtgacggcctggatgcagggggcatgaaatgcgccgcccacactgcgcagcgcggccaccgccaggataggggccaccggaagaggagcggcaaaggcggcggccgccagcatcagggacaccagcccgatggccccgtcagagattatcatgatccagcgccggtcgaagcggtcggcaaaggttccggtgaagagggacaggattccctgtgggaccagcgccgccatggtggccagggagaggaccgcgggggagccggtcaggtcggtcaggtaccaaatgagggcgtactgcgaaatcatgctgctgaggatggacagggcctgccctgtccagaggagggcgaatttttgcttccagtgtggtatcatagcgttccattcctttcccagccgcagtaaagggtgattatactaccacggtatccggggaaagtcaagccgaaaaaacgcccccgtccggcatcggccggacgggggcgctgctgtaggtttccttaccaggtcacgcccaggtcggggcgcacatcgagatcaatgatctcccgcgcgtcgtagaactggctgtaccactccagggccttgccgttgcgcagggtggtgccgtcggggtggagccggtcgcagatgacggcggaaatgtccttcttgatgtaggagaaggagttgatgcccacgctggcgaagatgcggaagccctggctctggagatactggaacaccgggccggtggagtgccagtcgtccccgtcggggcggccgccgtgggggtagaacaggatgttggtggggcccaccagggagcccacctcctccgcccagcggacggtgtcccgctgcacggactccagagggcggctgtccaggcggatgtggccccaggtgtgggagccgaaggtccagcccgtctccttgagccgctcgatgaccggcttgacggcctcgatctccgcctgacgattggcgtcaaaggcggggcggcggggatcgtcggcggcgatgtcgatgtcgttctgggtacggtagcccaggatgccctggtagccggtgagggagaagatggccttggccccgttgagggagaagtcggggtgctccagcacgaactggtccaggatcggggtagcgtccagatcctgggtgaggaaggtctcgccggtgttgggatcggtgcactgggcccagatctggccgtcgtcccccagcaccagcttggaggtgaagccctcagccagcatgtagtcgtaatagttcacatcatcaaaagagatgatgaggggcttttttccctcggggagcatgagggtgttccgctccatgcgggtgacgccgtcctcgccggtgacttcactccacacgtcccccatgttgaccagaatgtagcccttgtcgtagacgctctgaaggatctttttgtactcgtccgcggtcaccatccactcgtccagccccacctggcggtcgtagggcactgcgtcggaaaaggcatactcaggataggcgatgacggggtggaaaaacaggtgctccaccgcctggtcggggccccaggcctgggtgagctggtccgcgctccagtaggtgcgcaccgcgtcgtaggggtcggctgcgggggtgggggtgggctccggtgtggccgcggctacaggggtagtgtccggggacggctggttggttttgtccccgccgcaggcggccagggggagcgtcagggcgcaggccagcgccagggcaacggcttttggcatgatatggttcattggtatggttcctcccacataatatctctatagctgttatcttacgacaccgggcggcaaaaggaaacaacaaaaggatgacaaaatccttacgattttatgtcacccggaaggggaatccggtgaaccagcagcatggacgcgccgccggtgacggccccggtgaccagggagcagagcagcaggggcggcaggtacaccagcggggcccggctgcccagtactgccatggcggccagaatctggccggtgttgtgggcggcggccccggcgatggacaccccaaagagggagagaaagctgcaccgcagcagcagggccatgacgccaaaggccagcagcccgccggtgagggaaaaggccagggccatcagattgccccccagcagggcgcccagaaggcagcgggcggccagaatcagcagggcctcccgcccggacaggcggcaaagggcataaacggtgaccagattggccagtcccagccgcaggccgggcagggggaagagaatggtcagcggaaccagcccctccgccaccgagagggccagcgccagggcggtaagcaccgcgcagcgggtcagccgccgcagggatgaggacaagggggagcgcctcctttcagaatgagaaaacagcgggaacttttcagccgctgattgcgtcaaactcctggctgccgctgccggacagggagatcaccagcttgtcgggcaggcagatgatctgctgtccggcccggctgatccacccggtgtgaacgcagtcctggctgggacacgcactctccgcgatgcggatgcgccccggctcggcctggatcgtcaggggatagggggcctcgtccaccaccagggtgacgggaccggtgagggtgcttagctcatactccgcgatggtctcaccctctaagacgacggaggcggtcaaaaagttgctctcctccggctgaagaaaaaaaagcagcgccacggcggcggcggccaccagcagggccgccgcgccgtccagcagcgtgggccggcggcgctcagcggcgggcgatctcataggtataccccctgtctgccccggcaaaggtaaaaacgtcctccagcccctcggttaccaggagctctccctggccggtgcaaagcaccagctcgaagtcgtcccggctccgccagaagtccagcgcctcctccggccccgccacaaacagggcggtggagagggcgtcggccagcaggtggtcggcggagacaacggtgacagacagcaggccggaatccgccggatagcccgtctcagggtcaatgatatggtggtagcgcaccccgtcctcctcgaaatagcgctcgtagccgccggaggtggagagggtcacgtcagtcagggcgaggacgcagaggtagctgccggtgtcccgggggtccttcaccgccacccgccagggggagccgtcctccttggcgccgatgaccgtgacgttgccgcccagatccagcatggcggaggtccctcccgcatcccggatggccgcctcggcctcccgggccgcaaagcccttggccacggcgcccagatccacctccatgccagcacgggccagtgaggcggcagaggcttccgtgtccacggagagctcctcgctgtccaccagggccatggcggcggccagcgcatccggcgcgggtacgtgccgctcctcggtggtgaagccccaggcgtccatcaccggggcgatggtgatgtcaaagtcgcctgggagctgccgggcgatttcctgggaaaaggccagcagttccgccacgtcggggtccaccgccacggccgcgccgtccccggcggcggtgttgagccgggcgatctggctgtctgagtcggtgcgggagagcaggccgtccagccgctccaccgcttcccgggcggccgccacggcctggggtccgcggcggccggacacctggacggacatcacggtgtccatggcgaaaaaggtctgctccgccccggaggcgcggcagccggtcaagcacagaaaaacacaggcaaggaggaaagaaatacgctgtttcatggtatactcctaataatcatgatgttgattaaggacagtttaccacagttccgcgccgctggaaagaggaaagggattcttcacttgcaatgcggcgaattttctgctagaatatagaagattgatgactctgaggcgctcagccccagcggaggggcacttttatagaaaccgggcgcccggccacaggagatggatacatgaacaagaaagaacaacaagcccagcgcgcaaagcaggaagacgtggttttgaacaaggtcctctggtggatcgtgggggccgtggtgttggaggcgctgcttctccttctgaacaaggtatatgccaattacactgtcgagcagattgaactggccaagtccctgcgggatgtcttttccgtgctgatgatcaccctgcccatctgctttgtcgttttgctgatctgggcggtcgcggcccgcaagtccggtaaattcacccgcctgtcctccgtgctggccggcgtgatgctggccctggcggtctgcgccgtggtaatccgcgtctttgacgagagcggtatccggctgctgtatgtggctgtgcccgccgtggcggtgctggcgctgatctactacctctaccagcgggagttcttcttcgccgccgtgctcagcgccctgggcctgctgggtgtgaaggtggtgccctaccacttcggcttcccggccattgcctatggctacgccgtcgtcctgggcgttgccctggtgggggccgtggtggtgttccgcgtgatgcaggccgccgggggcaagctgcgcctgaaggggaactgggtggaggtgttgcccaagagcgccaactacgccctgctctacgtcacctgcggcgtggtggccgcggtggtgatcgccgcgttgctgctgggcgggctggccgtgctgtacggtgtgctggtggcctggctgctgatcctggcggtatactataccgtgcgcctcatgtaatgataagcccaagagacaaaggggcaagccgccggacggcttgccccttcttttttgaccggaggtattgcaatgaatgaaaaagaggtgggggagctgcgccggcggctccgcccggagaaaaacagtattacccacatccgggggtgctatgtcaacgagatgggggagagcgtggcccagtttgaccagtctctggccctcatgacccaggaggagaccgagaccctgctggccctgctgcgccgcaccctgtcggggaccctgggaaagaacctgctggacctctccttcgagacccggcaggtggtggagggggaggagcaccgccggctcatgcgcctgcgggacaccgccctgaaggacgaggaggcggtggaggaattcttccaactggtgcgccagtcccttaccctggagggcaactacctgatcctcctggtgtacgaccgctacgacgtgccctaccgcgccaaggacggggagcggcaggaggacgccgccgccgaggtgtactcctacctgctgtgctccatctgcccggtgaagcagaccaagcccgccctgagctaccacgtgcgggagaacgagttccacaaccggcgggccgactggctggtgtccccgccggagctgggcttcctctttcccgcctttgacgaccgcagcaccaacctgtataacgccctctactacaccagggacagcggcgagaaccacccggagctggtggaggcggtgttccggcgggaggcccccatgcccgccgccgcgcaaaaggagacgttccagaccctgttgagcgacaccctggccgacgagtgcagctgtgaggtggtacaggcggtccacgaccagctctgcgagctggtggaggagcacagggagcggaaggaggcggagcccctgaccctctccaaaggggcggtcaagtgcgtcctcaagtcctgcggcgtgtccgactcccatgtggaggagttcgccctccgctatgacgacgcctttggcgccgatatggccctcagcccccgcaatctggtggagaagcagatcgaggtgtgtactcctgacgtggtgatcaaggtcagcccggagcggagcgatctggtggacacacgggtgatcgacggggtcaagtacatcctcatccgcgccgacgagggcgtggaggtcaatggcgtcccggttcatatcgcggaatagcggaacgccccgcgcctctttgggaggcgcggggcgtttggtatctgctcagatctcgccggcggccttcttgggggccttggcaaactcctcgccgtggacgatgtacttggacacagacttgtagaccaagaaggtgacaacagagttgataccagccttgagcagattaaacgggagaatgacggttaccagcatggcatccaccatctcagtgggggcccccatataaaatggagtaatgaaatggttggcgatcatcatgcctacgcccatagcaaatgtgcccagcagcaaaccgattatcgcaccggttctggtatggaacttccggtagagtgtactggctacggtgaccagaataccggtggcaataacatgcattaaaaatccgtatataccatcgccgcccaaaaagaaagcctgaataaacgaggccaacacggtcacaagaatgcccgctactgggccgaaggcgaaagcggcgatcaggatggggacatcggcaggatcatactggagaaagggagcggcagggaaaagggggaagtgcaccagcgtgatgagcacagcaccgatggcggtgaacatggctaacagggccagcttcttgacgcgggcggatttggcggacataataaaacactcctctttgatttggtaacacccgaaagacgtatgccttccaggtgttaaaatcaaaaggagcgtgcccaatttcaacacatcttctttcatccagacttcgcgccctgggatatgcgcgtcactgtcggtcccggagttgcaccgggtctgccgtttccggctcgcggactgtaccgccgatcgggattttcaccctgccctgaagacatctcattcagttgttccaatccctattatacacacgaagtggaaaaatgcaagccccaatttaaaaaacaaatgttcgataaacattgacttgccgttctggatatactacaatgggaacaacattcagaggacggaggggcggaatgaaccgagagacaacctgctgctttaccggccacaggccggagaagctgccctggcgggaggacgagggggatccccggtgcctgaagctgaaggccaggctggccggggcggtggaggccgcctacaaaaaagggatgcggcatttcctgtgcggtatggcccggggagcggatttttactgctgcgaggcggcgctggccctgcgggagcggcgccccggcgtgacggtggaggcggtcatcccctgcgaggagcaggccgcccgctggcgggagcgggaccgggaacggtggttctccctggtggagcgctgcgacaatgagaccatgctccagcaccactacgaccgggggtgcatgctccggcggaatcgctacctggtggaccactcggccatgctgattgcggtgtacgacggcatgctggggggaaccatgtataccatctcttatgccatgaagcgggggctggacgtggtgacgctggacattccatagggcggccggaggccgccccttttttgaatttattttctgcaaatgcaaaataatgcttgacagagctttgccctgatcctacaatggaaacaggaagatttgcaaatgcagaaaaggaggagcagcgatgaagtggaatggacgcttgccggagtcggagctggaactcatgctggcggtgtgggaggccggggaggaggggaccacggcccccggcatcctggcgcggctggagcggcccctgactgccagcgccctgcacagctacctcaagcgcctggaggaaaagggctttctgagctgcggcaaggagggaaagaccaaccgttaccgggccagagtgtcccgggcggagtatgagcagcaggagagccggacggtgctggacagactgtatgcgggctccctccggcggtttgccgccgccctccacgacggcgggagcctgacggaagaggaggtgcgggagctggaggagtacctccgcacgctgaggcgggaggagtaggatggagtcgctgtttgtacgggtgctcaccctgtcgctgacgggctcggcggtgctgctgcccctcctgctgctggcgccccgcctgcggggccgctatgctgcggggaccctttcggtgctctggctggtactggccctgcggatggccctgcccgtcccgctttccctgccgtggacggcggtgacggtggatgtgtccgccctctcgtctgtgaccctgccggccgcccctcgggcgccggcggaagtgcctgagcccgccgggccggagagcgtggaaccgccccgggcggtacccccggcagccgcgccggaggggaggcccctgccgctcctggagctggccgcctgggtgtggctggccggcgggctggctctggtgggctatcagggggcggcctatctcctggcgcgccgccgtctgctccggggcgcgcagccgggcacggaggaggagagggcccaactggcggccctggcggcggagctgggactccgccgtacgccccgcctgctaaggacaggggaggcgtacgcccctctggtggtgggacttgggaggccggtgcttctgctgccgggcaggcccctcccggcggacgagcgggaggtggtgctcctccacgagctgacccacctgcggcggcatgatctggcccacaaggccctgctgtttgtgccctgcgcagtccactggttcaatcccctggtgtggtggatggcccgggaggcggggcgcaccctggagctgtgctgcgacgcccgtgtggtgcgggggagggatgaagcgttccgccgccgctacggcaccgccctcctgcatctggccgcaggagggcgggggccggtcctgtccacccgcttcggcgggggaggacggctgctgcgggcgcggctggcgaatctgttccagcacaggcgaaggggggcggcggcggccggcctcgtgctggctgccgccctggccgtcacctcactggcggcctgtgaacagcggctcctcacggcggaggaggccatggacgcgctggaggagagcatcgaggtgcgggagtatgacataggtcccggcgagttggaatactgcatttcctttcgcctgccggagcacagcggcccggaggaggagtggaaccttcacatcgccggccgggcggagacagaggcgctggggggaatcagcctccactactttgacggggaggactggacggcggaaaagacctatggcatctatctgtcgccgggacaggcggcggatctcaccgagctgaccatggaggtgtggccgccccacggcggccggacaggaacctatgacgccgccctgcacggcaggagcatcgacctgcgggccctgctccgggagcacttctatgtggacgccaggggcttttccctggccctgccggagccctggccggacctcggggcggtgcaggcgctggacggcggcggtctgctgctctattgccgggccttggggccggagtgcggcggcatcgcgcagctgcacattgagacggaacccctggaggtgctcacaggccgggataccctgctgggcggccgggagggttgctggctctatctctatggcctccaggccccgctgcccagcctgcgggaggcgggggagggggtacaggagcagtaccatgcgctgtatcaggccctgtacgccgacccggaggagctgctgtccctctgggcggagggctgaccaccgccggcagctccccgcgcctcacccccgcagaagacgggcgagctcctccgcagtaatgccgctcatatagtgctccacatggagcggggccagggcctccgccagttgtgcgtccaggggcagaccggccatggccgcctccagctcctccagaggcccgctgccgaaaaagtcgccgtagaaccggacggcctgaatgcatccctgcttcacacgcaggtgggcggtgaccagcccggcgggaaacctggcctcccgccgcatgtcataagggggtgagaagccgtagttccacgcccatgtgacatacttcccgtcccgcagcttctgtacggccagcatatcctctgcggtcagagtatagggctccagtgctccaccggccatggcgcacgcccgcagcgccgatttgaagtcctccatagcgatgggggtgggggcgtgggtgttgatggtggtcacccggctgcgcaccgacttcacggccttcgagtcgaacttggcctgcttcacccgcagagcgtcggccacgtcggtcaggttggagtccagcatgatgcatccgtggtggagcaggcgcccgtgtttggcgtactgggaatttccggagaatttcatgccgccgatggtcaggtcgttgcggccggtgaattcggcgtggacgccgaagcgggccagggcctccaccacagggcggacaaaaatcttgaagttgaggccaggggcggtgtcctggtccacgataaaggtaaaattcaggttgcctgtatcgtggtacaccgccccgccgccggacaggcgccgcacaacccgaatcccgtgggcatccacaaaagcctggttaatctcctcggcggtgttctgatatttgcccaccacaatggtgttgctgttctgccagagcataaaataggccctgctccggtccatctgctcaaagacatattcctccagcgccagattaaaataggggtccgtaccgggcggttcgagatagatcattgcggcgccttcctttctcccgcgtttcccgccggacgccattaaaaaggccggcaggctatggttaagacttttttccacagactgcaaaaaagaagcacctgcaaagcaggtgcttcttttttggaggcgacacccagatttgaactgggggtggagcttttgcagagctctgccttaccacttggctatgtcgccgtatggataacaggagcaagatttgctcctgttatcttttgtatggagcaggtgacgaggctcgaactcgctacctccaccttggcaaggtggcgctctaccagatgagctacacctgcatgccctgatccattctatgcggatcacacacgcttgatacctgcttttgaaagattcccccggtggataccttgggtatccaccggagaaatggtgcctccggccggaatcgaaccagcgacacggggattttcagtcccctgctctaccaactgagctacagaggcgaatggcgacgcggaagggacttgaaccctcgacctccggcgtgacaggccggcgttctaaccaactgaactaccgcgccagacggtagggggtacgggagctccctcacgggagtggtgggaacaacagggctcgaacctgtgacatcatgcttgtaaggcatgcgctctcccagctgagctatgctcccttgtcctcgccgcagaccagtttgtaaatcactcttggtcacgcggcgaaggttattatactaaagcttcccccagttgtcaaccatttcagccaaaattttttgctttttttctctcaaacctacagtgaggccagaagtccttccagctcctcgtttgtatagtgatataccttgtcgcagaactggcaggtgagctcggccctgccctgctcccggatgagggagttcaactcctcacgccccatactgatgagggcgcgggtgacccgctcccggctgcagtagcagcggtactccaccggctcctcagagagtacctccaactgaaattcagagagcacctgctccaccagctccctggcgctcaggccgccccgcagcgcctcggttaccgggcctaccctggcgataccctgctcgatggcggagatggcggcgtcatctgcgccggggaggagctgaatgaggtatccaccggcgcactgcacgctctggtccacgtccaccagcacgcccagggcacaggcggtggggatctgctcactctcagcaaagtaggaggtaatatcctcggcgatctcgccggataccagggggacagtgcccacatagggctccttcatgcacagatccttgatgacagtgagggagccgtcccgccccacggcgctgcccacatccagcttggcggggcccttcagggggaggtccaccaggggattgaccacatagccccgggcgttgccctggctgtcggacaccacggtgatgccgcccagcgggccgcctcccttgatgcgcagggttaccgagccatccttctccttgagctggttgcccatcatggaagcggccatcaggctgcggcccagggccgcggtggccacgggcagagtcttgtgaatctgccgggcgcgctccaccatctccttggccgtgatcgccgatgccttcaccggcgcgtccttggccaaaacgcgaatgatcttgtctgccatgcttgtcaaaattcctttcgtgcggcaaagaaaatccgctgctccccctccctgggggcgcggaacctcagctcgccgtattgtctgatctgccggaaaccggcctgccggagcaactcctccagctccgccggttcgtaggcgtactcctcgtgaacctcctcccagcggctccacagcccgcctggatccagccggaagatgtccattccataggtgcagatgcgccggcgctccgaccagtcggcccgccagacgcagtaggcatcctcgctctcgtccagaaacatctggccgtccaggccccggagcttttgcggggtgttgatgtcaaagaggaagaggccgccgggcatgaggaaggtgtgcacccgccggaaggcccgggacagctttttggggctggtgacgtagttgatgctgtccaggcagcacacgcaggcgtcgatagtgccgtagagatccagctcctccatggcctgatgcagaaagatcggctcgatggggcctgcgccccggcatttctccgccgcctgggccagcatctcttgggataggtcggcgccgatcatctcatagccccgctccgccagaacacgggtcaggctcccggtgccgcaggccagatccagcaccgtgcggatgggcagccggcttcgggcgaagtgcttctccagatagtcggcccagcgggcatagtgcacgtcggcggtaaaggcgtcgtagcaccccgccaggaattcatatgccatcgccgcccagcttctccttgatccgcgggagcaccgcctgataaccgtcggccccgtactggagagaacggttgacccggctgatggtggcgctggacgcgccggtgcgctccagaatgtcgttgtagatcatgccgtcggacaggagcatggccacctcaaagcgctgttccatagccctcagctccgccacggtgcacaggtcggaaaagaacttcttgcactcatccagatccttcagggtaagaatggcctcatagagcacatccccatgctcccgcttttcgtttttcgtcataggtatcaatgacctcctcgtcagtctctgcggaaatcgtatctattttaccaaagtgaagtatagaagtaaacctctttttcaccgattttacggagtttcataggatggagcaccggattctgagagagggaggtgcccgcgatgaaggggctgcacacagggacggagaaggccgcgccggcttggaaggagtggaggcgggaattctgctgggaggaggagccggtgctcgcggtctccggtgtccgtctggagctgccggagggaatacccggcctgcggcggctggaacgctggtgccgccgcctggagggggcgtgggcggcccgctgggagcgggagctctatcccagggcctgcacggccgcccggcaggccagggaggtctcccaccccttccggccgtgggaggcatccctcaccggcgccgtgaccctccacaccccggagtgcctgagcctgtattatgacgccgcggagcggaccgggggcccccacggcgtcaccctgcggcagggaagcgcctgggcgctgccgggggggagccccctgacgctgggggagctgtttccgccgggattccggtggagggcatgggcgctggcggaggtggagcggcagctccgggctcggctgtccgcgggggagtcctggttcgcgcccgactgggaggcgcggctgccccgcagcttcgacccggagcgtttctatttgacggaggcggggcctgtgatctactttccactttactccatcgcgccctatgcggaggggattccggccttttctctcgcaatcccgggccagaaagaaaataccccggaggaatagctgtttttttgcactttttaccttgtcagccctgccgccgcggcgttataataaagggcgttccgggagagactccttcataaatgaaggtgccctcccgggcggttgcgcgcgggaaaaggccaatgcgcgaatccccgcggcaggaggaacgaactatggtcaaagcaatcgttggcgcaaactggggcgacgagggcaagggaaagatcaccgatctcctagccgaggcgtccgatgtggtcatccgctttcagggcggggccaacgccgggcacaccatcatctgtgactacggcaaatttgcgctccaccaactgccctcgggtgtcttttacccgcataccaccaacatcatcggcaacggtgtggccctggacgtgaagaagtttctggccgagctgaagcatctggccgacggcggtgtgcccgccccccatatcatcgtggatcagcgcacccagcttctgatgagctatcatgtgctgctggacagctatgaggaggagcgcctggcgggggctgctttcggctccaccaagtcgggcatcgcacccttctattccgacaagtatgccaaaatcgggattcaggtggccgacctctataatgaggagcggctcatgggtcaactggagcacatctgtaccctgaaaaacgtcctgctggagcacctctaccacaagcctctgctggagccaaaggcgttgtttgacgagctgatgggctaccgcgcggcgctggagccctacgtgggcgacgcggtgagcttcgttcaccgggcccttaaggagggcaggcaggtgctgctggaggggcagttgggctccatgaaggaccccaacctgggcatctgccccatgaccacctcctcccataccctggcgggcttcggcaccgtgggcggcgcggtgcctcccacggcccttaccgatatcatcacggtcactaaggcatactcctccgccgtgggcgccggcgccttcgtcagcgagctgttcggcgcggaggccgacgaactgagacgccggggcggcgacgccggtgagttcggcgccaccaccggccggccccgtcgggtgggctggttcgacgccgttgccacgaaatacggctgcatggtgcagggggccacacaggtggcgctcaccgccatcgactgcctgggctacctcgacgagatcaaggtgtgcaccggctatgagatcgacggcaaggtgaccaccgacttccctgtgcccgctctgctggaccgggccaagccggtgtatgaaaccctgccgggctggaagtgcgacatccggggcgtcactgactacggcaagctgccccaggccgcccgggactatgtggacttcattgaaaagcacatcgaggcccccatcaccatcgtctccaccggccccaagcgccatgagatctgccggcgggccgggaactgagagcgtccctctgtgcggaaaggcaaaggaaagcctccggctgtgccggaggctttccttgtgcacaccagctcagcggctgtggcgataacagtccatgagtgccttccaagagtgcttgggccagaagcggcgcttggcctcggcggaccagcccctgttttccagaattccatcgctgcgctcgtccagcgcaggaagctgtttgctcgttccatgagccttcttcataagacacacctcttttgcggttttcagagcatttttgccctgtgaggcatagtatttccattgtagaggggaaaacaaggatggttacacgcaaaatagttccaaggaacgtactatgattgtttaaccggcgcttgaaacgcacagaaggccccccgccgggcggggggccttctgtggctggagggggacaaatccttgtgcagatcaaggagggaggcatgcccgccgctccatgaggcgtgttatatggtgaaacccttgcaggacaaggtgtcaacccctgggaaacagcactcggagggcccgccaggggctgccctgccagtaagcacgcataagatcaacagagaagggcatgctgctcatttccctgtaatgctccagcgtacggtggtcggtggtccaaatcgtctttttcattgtgataactcctttctatcacaagctcttgccttccttacggtttcagtatacaataatataagatatgagacaagcgaatctttttcatgctgaatatgcggaaatggaatggtaattgtgaatcttaacaagcatcaaattctgctgaaaactgtggagctggggagcatcacccgtgcggcggaggcgctggggtatacccagtcggcggtgagccgtgtgattgccgatctggagcgggagtgggacatggagcttcttacccgcagccggacgggggtggtgctcagcagcagcggggcggcgctgctgccctatgttcaggcggtgtgcaatgcgggcagggagctggaggagcaggtggcggagctccacggcctgacccggggaaccctgcgggtggccaccttcgccagcgtgtccatccactggctgcccgctatcatgaaggagttcctcggccgctacccgggtattcagtttgacctggtaagcaactgggagttcgcggaggtggaggatctgctgcggcagggtcaggcagactgcggctttttggggctgcccgcggggccggggctggaaacctacccccttttccgggacgagctgatggcggtacttcccctggatcaccctttggcaaaggccccctactatcccatggagcggttccgggaggatccctatatcaacacaccggaggagcgggatttggagatcggcctcattttccaggaggagggattccggcccaatctccgttacaccgtcaatgatgattttgccgcattggccatggtggaacaggggcttggggtgagtatccgtccggagctggtgctgcgtgcctccagctacgccttcgccgccatcccgctggagcggagacactaccggcgtatcgccctggcgatacgccgcggccgttccccttcgccgttaactgcccgctttttggagtgcgtccgccaatgggtgggggagcattttccggcggagcagggagacggggtgtgagccaaaaaagggacggcttgcaaaatttttgttttacaagctgtctcctttatagtataatacatccgttgcggcggaagtgccgcaccgaaatgaaagataataggagtgttgttgcatgagccgcatggtcggcaccgtatccatgggaattcgtgctcccatcatccgaagtggggacgacctggtggagatcgtcaccaattccgtcctggagactgtcaaggacggagcgctcaccatccgcgaccgggacgtgattgccatgaccgaggccattgtcgcccgcgcccaggggaactatgcctcggtggacgatatcgccgccgacgtgcgcgccaagctgggcggggagaccgtgggtgtcctgttccccatcctcagccgcaatcgctttgccatctgtctgcggggcatcgccaagggggccagaaaggtcgtcctgatgctgtcctacccctccgacgaggtgggcaatcacctcatcgatgtggatgcgatggacgagaagggggtggacccctataaggatgtcctcaccctggagcgttaccgggagctgttcggctacaccgtccaccccttcacgggcgtggactatgtggactactattccaacctgatccgggagagcggcgcggaggtggaggtcatcttcgccaatgacccccgggccatcctgccctacaccaagaacgtgctggcctgtgacatccacacccgcgcccgcaccaagcgccgcctgctggccgccggggcggagaaggtcttctgcctggacgagatcatgaccgcctccatcgacggcagcggctacaacgccaagtacggattgctgggctccaacaagtccaccgaggacaaggtgaagctctttccccgggagtgccaggatctggtggaggccattcaggcccgcatcctgagggagagcggcaagcacgtggaggtcatggtctacggcgacggcgccttcaaggaccccgtgggcaagatctgggagctggctgatccggtggtctctcccgcctacaccgccggcctggagggcacccccaacgagctcaagctcaagtatctggcggacaacgactttgccgccctgtctggcgaggcgctgcgggatgccatcaaaggcgagatcaaaaagaaggacggctccctggtgggcaaaatggccgcccagggcaccacgccccgccgcctgaccgatctgatcggctccctgtgcgacctgacctctggctctggcgacaagggtacccccatcgtctacattcagggctatttcgacaattataccaccgaataagacagcggcccgccgggagaccggcgggccatttttttcaacttttttcaagtttgaaaaagtccctcagcctgtcgaaaagactttttcgacaggctaaagcgcgtgtacgaaaactacgtacacgcgcttttttgtgaccgttgttactggccgcagccggtgctgccacagcctgcgcacccggcgcagccgggatgggactcggaccacagcttgtcggccatgggagtccagttgtcggcataggggtgggttttggccgtcagatgctccacgctctcgggagactgaggatcggtggagtgggcgcccgtctcgtgaaccatcttctcaatgaactccgggttttccaacatggggcaggggcggagcatgttctcgttgaagggctggttgtcatggtaggccatgaacatgggggattgcaggcactccagcaggctcttctcccggatgttggagtcggaatagtggatgaacacgcaggggtccacgtcgccgttggcgttgatgtgcaggtagcggcggccgccggcgatgcacccgcccacatactcggcgtcgttctggaagtccatggcaaagatgcccttggtctcccgcatggcgcggatgcggcggtagacctcggcccgctgctcggggttgggcatcagctcgggggcggcgtcgttgcccacgggcatgtagtggaagaaccacacgaagtaagcgcccagatccatgatcagatcgtagaacttctcgctggtgatgtccttgtagttgacgctggtgtagcaggcggagatgccgaagggcaggtggtgctgcttcagcagggccatggcgtgggtgaccttgtcgtacacaccctctccgcggcgggagtcgttggcctcctcgaagccctccaggctgatggcggggataaagttgcccacacgcagcatgtcctggcagaactcctcgtcgatcagggtggcgttggtaaaggagaggaaggccgcatcgctgtgcttctcgcacagggcgatcaggtccttcttgcgcaccagcggctcgccgccggtgtagatgtacaggtagatgcccagctccttgccctgagtaatgatggagtcaatctcatcaaaggtcaggttgagcttgttgccgtactccgccgcccaacagccggtgcaatgcagattacaggcggaggtgggatccagcaggatggcccagggaatgttgcagccgtacttcttgcgcagttcctcctgcttgggccagcccaccaggtttgcattgacaaagaagttgttgaatatcgtcttgagcacactggggtcggtctgggtccagaccttctcaatgagctggtgccaacaggagtccttgtcgttaattaccttatcaaatgcctcccgctggagggacagggtgtcgccggcaaacttgttgaccagatccatgaccttgcccatgttgttcatcgggtccttgtccagataatcatacaccttggccaggccgtagcgcttcaaactgtcaggaatcttcatcttggttttcccctttcacggcatgtcataccattcatcgttgctactataccgccgtttttgcaaaaggaaaatagacaaaacccgcatcctgtccaaactctagacaaaaatggcagtttgcttaaaagcagtttggcttttgaagtttctttattgcgttttgacaaccgttttttataatatttaaaaccataaaaaacgatagagaatattttgaggtgcacagaagggacgggagggaaattcatttctctgaatcagaggtcaattaagcagtaaagttacaaaaaactctcaagttgttataaaagcgtcttaaaagatttgtgctgtttgtttattttgtactataaatttcggctatgtttacatactgacgaaactttgttactcaaatacaattcacttaacaaacaaaacagtaccagatgacaccgcagggcagggcccctgtatggaaggatcgcatacatgagagttacgatggaagacatcgcaagaatggccggagtatcaaaagcgacggtttccagagtcgtaaacggaattgaacagggagtcggccctgaaacacgcagacgcgtattgcaaattgtgaaggagacgaactaccgctcctacagcctgccgagccagaaccagtccaagactcttgggctgattatcccggatatcataaacccctttttcggtgagctggtcaaggcaatcgagggggaggccacagagcaagggtacaccgttctgctgggaaacacagatttctccatggaaaaggaggagcgttacctctccatcttcctggccaagcgggtagacggcattattttagtgacaacagcccagaccgccggagagcactaccagaggctgaagaagtacagcgtgccctgtgtgctggtggaccgcatgctggcgggcgccgagtatacggcgggaatctttgtggacaactcctacgcccttttcatggcgtgcagcctgctcattcagcatcgtaacgagaaaatcgctttgatctccggtccgcgaaacatctccacctcggtggagcggattcagggctaccgggatgcgctggagcagtaccgtctgccgtttgaggagcggctcattaaatatggcgactacacctttgaaagcggataccgggccatcatggagctggagcgggagggcacccgctttaccggagtcctggcggccaatgataccatggcgctgggcgccattaaggcgctcaaggagctgacttatgctatcccggaggatgtggaaatcatcggctttgacaacatcggcttttctcagctatgtgacccgcctctggccaccattcagcagccgaccatcgaaatgggacgccgggcggcggatacgctgatccgggcaatcgtgggtaatcccattgaaaccaaaaatatccacctccagcccaagctggtggtgagaggctcagtcaagaccatctatggcgaacggattctatatgtataagcacagcggatcatccggcatcggtgccccggcgggggaaagaatctaggaagacgtaggggtgttctcattgaaaaagattttggtggtaggaagcgcgaacgtcgactttgtgatcggagtacagcaggccccggagttgggcgaaaccatcctgtgccgctccttccgaaagacctgcggcgggaagggggccaaccaggcgtatgcctgcgggcgcctgggcggggacaccgcgttcctcaatgcggtgggagatgaccccctgggcggtgaactggtgcgaaatctgcaacaggccaatgtggacacccgcgcaataaggacggtggacggggtatccaccggcatggcggtggtctgtgtggatgagaagggaaacaactccataattgtcgttcccggcgccaataacctctgcgatgtggactatctgaggcggaaccgggcgcggtttgaggagagcgacattgtgctgctccagatggagatcccctttgagagcgtctgctacgcggtggagctggccagtgggctgcacaaaaccgtcattctcaacccggcacccgcaccggacagcctgcctgatgaagtatatgcgggactggactatctgacccccaatgagagcgaattcaagcgtctgaccggctgcccgaccgatgaagtggaggagcttgcggttcactgcaaacccctgctggagaaaggaacgcggaatatcatcattacgctgggaagccgcggtgccctgcatgtcaaccaggaggggcatacgctttaccgcccgcccaaggtacaggcggtggataccacagcggcaggagacaccttcaacgcggcgctggcccgggagctggcagacggccgctccacggaggaggcgatcgtcttcgccaatatggcgtccgccctggcggtgtccagggtaggggcacaggattctatcccatcgtatgaagaagtattggattttaagaagcgcatggagtgaatgcggatgagcgacatcattgttaagaccaccgggctgtgtgcagatttcaagatcaaggaccggatggttcgggcggtgaaccgggtttccctgagcctggagcggggcaagacgctggtgatattgggggagtccggctctggaaagagcacctatatgaaggcgctgctccggattctgcccaagacagccgccgtagagggacaggcggagtttctgggaaatgacctgttccgaatgagtgagaaggaattccgggatatccggggcaatcggatggccatgatctatcaggactctctgtccgcgctggacccgatgtataaggtgggctatcagattgtagagaccatccgggcgcactccagcctgacaaaggcagaggccagggagcgggtagaagagctcttcgtcaaggtgggtatcccttcgcccagggagcggatgaacgcctacccacacgagatgagcggcggcatgcgccagcgggcggtcatcgctatggcgctgtgctgcaatccctgcctgctgctggcggacgagcccacaacggccctggatgtcaccatccaaaaacagattctcaacctgttcttggagctgcaggagagcgaccgcatgtccatcatgatggtgacccacgacatcggtgtggcggcccaggtggcggatcagatcgccatcatgtacggcggtatcattctggagtgcggcgccaccaggcaggtgctggagacgccggcgaacccctataccaaggcgctgatcgccgcgctccccaagagcggcaaccgggagcggctggttgccatcgagggacagccgcccaccattgtccatatgccgcctggatgccccttttccaaccgctgcgcctacgcaaccgaggcgtgccggcagagcgttccagagctcaagcccatcgatgagcaccatatgacggcgtgtcatatgaatttagtaacgtctggaggtaaatggggacatgaaacacgtgaaaagattcctggcgctctctctggcggcagccctgttggcgggctgtgtctcctgcggcaattcggatgagaaaacctcgcccaccggcggcggttccggtgtggacagtaccggcgacggcggcactctgcggattgcgatgacctgcgcggccctgcccaataccgattccgagcccacggaggggcaggagggttaccgcttcgtcagcttccagctctatgacgccctggtgaagtgggatgcgagctcggaaactgaggccggcaagattatcccaggcctggccacctcctgggagcagaacccggaaaaccccaagcggtggacgttccatctgcgggagggagtcaagttccacgacggaacggatttcaatgcggactgtgtgatctttgcgctggaccgcgtgatgaatcctgactttgagtactacagcaccacctgcgccgcatcggtgggcagcttcttggccaatatcgaatcctatgccaaggtggacgactacacgatcaccattgacactgtgcaggacaacaacgcctatctgatctacgatctgccctatatcatgattccctccatggaggcggtgaaggagaagggcgacggctttgccgacgcccccgtaggctccgggcccttccggtttgtcagcaagatcgcgggccaggagctcgtcatggagcggaacgagaactactgggggaacgtgccgcagatcaagacactgatcctcaagcccatctccgacgcgtcggcccgcctggcggccctccagtccggcgaggtggactgggccgaggtagttcccgtggagtccctggagtctctgaagtcccagggctatcaggtcaagctgaacgactacccccatgcgtggctttacatcatgaacacggagtccggcccctttgcagatgcccgcgtccggcaggctttcagcatgtccattgaccgggagggactgtgcaatgacatccttcagggtgtgggcacaccgctggcgcagttaatgtatccaggttctccgtggtatgcggagggtgtggaggagtatacctataacccggagagggcgaaagaactgctggccgaggccggctatcccgacggctttaccacgacctttgtctgccccaccagcggctccggcaacatgttcccccagattatgaatgagtacatccagaagtgcgccgaggaggtcggtatccacattgagctggatatgtcggaatccgagcgggtgtgggacgtaatgaaggtgggcttcaaggatgagtacgccgatgtgggcgcgctcaacacctccttctataccatgttccccaatgtgttccagaagtttgcgggtacgggcggctccttcaacaccggcaagtacagcaacccggagtacgatgcctgtatcgaggcggcctatgcggccacggacgaggcggagtccacccagcagttcattgaagccgagaagatttttaccgaggagttgccctgggtgatcgtctgcaacgaccggaacctgcgggttctggcccccaatgtgcagaattttgtccagtcccagacatggtatgtcgatttgacgacggttaccgtcgagtaagagaaccccgtctcataagcgctgtcatttccggcaaaagactctggcctgcggccagtgaaacctggccgcaggccgcagtatacaaggggagttagtatggtccgagttatcttgaaacgaataggcctggcgttcctcacgctcttcggtgtgacggttattgtattcgccctgctgcagatgatgccgggaggacccattgacagcattgtgcctctggatgcttcggaggagctccggcaggtgatcatcgaccagtatggttttgaccagccactctatatgcagtatttcatgtggctgggcaacgcggtgcgcggcaattttgggaactctgtcagcgacaaccggctcgtgctcagcgtggtcagcgaggccctccacaataccctgattctggcgctgggggccagcatcttcgcgttcctgctcagtatcctgatcggtgtctacagctcgtaccggccgaattccatcttctcctggatcggcacggtattcggcatcggcggtatcagtattccaaactactgcctgtcattgatcctgatcggtatcttctccgtcaccctgcgcctgctgccgtctacaggcatgtataccagtggggactataccttctcctccctcatacagcacctgattcttccagctatcgcggctggcgccatgacactggggattatgacgcggatggtgcgcagctcggtctccgagatgcgcagccggagctttgtcactaccctgcgggcgaagggactcagtgagccggccatcatgcggcatgtgctgcgcaacagctttcccacgctgctgaccgtggcgggcctgcagttcggctacctgatgggcggctccacgatggtggaaaccattttttcctggccgggaatcggcctgatcatctatcagagcatcttcaccagcgactttcccgtgacccaggcggccatcctgattgtggcggcgatctttgtcagcatcaacctgctcatcgatctgctccgcattgtggcagatccgcgcctgagaaaataaagacctgcgggatacaaaggagtgattgttttgctgtcatccattggctccagagctgcggcggatccggaggagctccatttccgcagggaggcgcgcagccgctttgtgcggacctttctccgttacccggcggcctttcccgcgctgatcctgttcgtgatcgtggtgctgtgcgccctcggcgcgccgctgctcacccagtataccccctttgagggcaatgcggcggagcggctgcagggcatcggcacggccggccatctgctgggaacagacgagcaggggcgcgacatcctgacccgctgcctgtacggcgggcgcctgagcctgctgatgggcttcctgccggtggcgttggccaccatcgtgggcagtatcctggggatcatttccggctatttcggcaaggcctatgcccagatcatcatgcgcaccctggatattttctatgcgttcccctccattctgctggccatcgcactgtcctcggttctgggctcgggcctgtccagcatcatcattccaatcgccgtcattctggttccgcccatcgcccgggtggccgaatccaccgtgcaggatatcatgccggaggactttattgaggcggcgcagacctccggggccagcccgctgaaggttatcgtgtttttcatcataccgaacacctttgggcggatcttcatctactgtaccacgcaattcagcgtcagcatcctgtcggcctctggcttgagctttctgggattgggcatttctccccccacgccggaatggggctccatgctgaacgccctgcggcagcagatctacatcaatcccctgattaccattattccgggcctgttcatttttgtcacagccctgagtgtcaatatcatctcggacggcctgaaggacgccatggaggccaacagctaagcccgcgcggtatgacggcgcgccgtgattggagagcgtacaatgagcaagattttagaggtcaacgacctgtgcaagtcctttgtggtaaaaaagcgcctgctgggcgaaaacgacgtggtttcagcagtaaatcacgtttccctcggcctggaggagggggaggtgctgggcatcgtcggtgagtccggctgcggaaaatccacggttgcgcggctgctccttcacagcatccggccggacagcggcacaatgaagctctgcgggaaggagtacgacatggcccatgccacggggcaggatgtgcagacctttcggaagaatatgcagatggtctttcagaacccctactcctccctgaaccccaagatgaatgtactgcagaacatcaccttcggcctgacggccaatcaggtgcccagagatgaggcatgccggcgggcataccgctacctggacgcggttgggatgcagaagtccttcctcaacaaataccccaacagcctgagcggcgggcaacggcagcgcgtggcggtggcgcgggccctggcaatggagcctaaaatcatcctggccgacgagccagtgtccgcactggacaagtcggtgcaggcgcaggtgctcaacctgttccacgacctgcagaaggagttcggcatttcgattatttttatctcccatgatctgagcgtagtggagtacatgagcgaccatattgcggtgctctacctgggtgaggtcattgagtacagcacctccgaggagctctatcacaaccccaggcacccttataccaaggagctgctgcgctccattccccagatcagcggggacgcccgcctaagtacggccaacagggagccgccgatcgagctgcccagcccgatcaggccgccctccggctgccggtatcacccccgctgcccgtaccggacggagaactgctccaagcatattccggcgcctgccttggtgggacgggaccacatcgtgaagtgtcaccgctgcgccgcacagaatcaaccgattgaaccgatggaagggagcttgatatgaaaaagtacaagatgctgtttgccggggagtcctggctgacccataacatggaggtaaaggggtgggacgacttctcggttggcgggtatggaacggagatcggccgaatccatgccgtgatggacgagtttgcagagatcacccacctgccctcccatctggtgggagagaaattcccctctacgatggaggagctgaagacgtatgatgtggtgattctcagcgatgtgggggccaataccctgttgctccaccccctggtgtttacccaaagcgtccgtttccccaaccgcctacagctcctggcggactatgtggagcagggcggcgccctggggatgatgggaggctacatgaccttccagggcatcggcggcaagggctgctaccacggctcgcccatcgagaaggcactcccggtcgattttctcccctatgacgaccggcaggagcacccggaaggcattgatctgaaggtggacccccagcgccatccggcactgaaggggctgcccgaggaatggccctatctgcttggctacaacaaggccgtagccaagccgggggcacaggtggcggtggaataccagggagaccccatcctgtccttctatgagtacggaaagggcagaagcttcgcttgggcctcggactgcgcgccccactggatgccccccgctttctgtgaatgggagtatattcacctgttttggaagaacatgatcgactgggtggtgcagagatgaccggccggagagaaggggcggaacaatgaaggtaaaggttgccgccatacagatgtcggcggacatcggagggcgggaggcaaacgtggagcgcgcggagcggctgctgattcaggcggccaggcagggggccgatctctgcgtgctgccggagctggcgctggatgagtttttcccgctgtataaggacacccgctactttgcctacgcggaggagttggacgggccaaccgtccggcgctttcgttccctggcgggggagctggggatctacctggcccttccgctgtttgaaaagagtctgattggcacctactataattctctggttctgctgacgccggaggggacgatcggtgcggtctatcggaaggtacatgtaccctgtacgcgcagctatgagcgatactatttcacacccggaccggagtttgtggtggcggatacccggtacgggaaggtgggattggccatttgctacgaccggcgctacccggagacctgccgtgagctgatgaagaagggggccaggctgattctgatctccatctccagcagcattatgccggggggcttttccgagctgcccgtcttcgagacggaactcaagaccagggcctttgaaaaccagctctttctcgcggcctgcaaccgctccgggcaggagggagaatacacgttcttcggccacagcatgctcttggggccggacggctccgtactggcccaggcagatgaggcggagaacgtggtggtgctggcagagatggagctggaggacgcggatagggcccggatcaacggcccgctcctgcgggaccgccgcccggagctctatacctgctgatataaatcaaagaaatgaggtaatcgtatggaattctcttactttatgccggtccgtctgctgtttggcgccaatgtgatcgaccaactgggcgccacggccaagagctatggcacccacgccctgatcgtgacgggccgcagcagcacgaaacgctccggtctgctggaccgctccatcgccctgctggaggccgcgggcgtccgcgccacggtattcaataaggtggagcccaaccccctgaccaccacggttatggagggcgcggccctggccagggagcaggggtgcgacctagtcatcggcatgggcggcggctccatgatggatgcggccaaggcggtggccttctgcgcggtgaacggcggtgacgtgaatgactatatctccggtggaaagcagggtaccggctgcctgcccattctggaggtacccaccacctgcggcacagggagcgaggccaacccctttgcggtgctgaccaaccccgagaccaaggacaagaagtccctgtggggagacctgatctatcctaaagtgtcctttatcgaccctgagctgatgaagaccatgcccaaggaggtgctggcctcggtgggcttcgatgccctctcccacaacatggagggctacctggccacccgaagccagcccattaccgaccagcttgccctgcacgccatccgcctgacagccgggagcctgcccaaggtgtaccacggtgagggcacacaggaggactgggagaacatcaccctggccagcctgctgggcggcattgtcatcaacaccgccggcgtgggcggcggccacgggatggagcatccggtcagcggcatgtataacgtggtccatggaaagggactggcggccctgacaccccccctcttccgccactcttacaacaccaagccggagcgttacgcggccatctcccgtctgctgggcggcaaggacgagaccgactgcgcggaggcggtggagcgcttcctcaagtccattgatctgaactgcaagctccgggagctgggggtggaggagtccggaatcgactggatgacggacaactgcatcaacgtctttgccggaagcatgcggaatcataccaaggcgcttacccgggacgaggtaaagcagatctatctggaggcgttttaatccggcggccagagaaggggaccgcccttgctgataaatgattggaatggaggatacggacatgccctgtattgttatgtataccaatgtggaggtgcccaaggagaaggccgaggagctgaaaaaagccctggtggtttcctgggagaagcttccgggcaagagtgagcggtggctcatgaccaccatccgggacaacaccaccatgttcttcggcggcaaagatacccctgcggcctttgtcaacttcaagattctaggcagccttggcagggagaactgcgagatcctgaacgaggagttcctgaccgatgtcagccaggtgctgggtattcagaaggagcggatctttgtggctcacgatgaatgtccctcctggggctgggtcaagaactgaacatgacagaaaggaaggtattgcatatgccctgtatcatcatcaggaccaatgtggagattcccagcgacagagcaaaggagctgaaaactgccctggccgtgtcatgggagaaggtgcccaccaagcgggaacgctggctcatgatcgtcatggaggacaagcagcagatgttcttcagcggcagggatacccccgcggcctttgtgaactttaaaattcatggggactatgacatcggccccaagaactgcaagatgctctccgaggagttcatgaatgatctgagtcaggtgctgggcatccagaaggagcggatcttcgtggcccacgatgtgtgcccctcctggggctgggtggacgacccggatcccagagcctacggccccgcgccggtctgagtgaactgcaacaaacaattacaatagaaagtgagtggatcaatatggggtacaagtacaagtggtatattcccgacgcctaccttcattcccgcggcaccggctacttcaccagccatgagggctgcgccttcatcaacgagaccgaccgggacgcccatgtgcgcttcaccttctacttccaggatcgtgagcccatgaccggctataccagcgtggtgcctgcccgccggaccaagcatgcccggttcgacctgatggagaacgacaagggtgagcccgttcccatgaatgtcggctatgccgtggttgtggagagcgacatggatatgccggtccagttcagccactgtgacacctcccagcctgagctgacctttaccaccaccatggtcccccacatcaccctggaccgggaggactaacccccaaaatacatagaagaagcgcaccggccgccggctggtgcgcttcttctatgcatgctttttgatagaagagggcagagctgatatattgatcattagactgcgataattaaatcatcaatatgggaaagaagtggtaagggcagaccggttcatcggttcccgcattgcccagagtgagaacgagaaattcctgtggtgggcggaggggaggaagttctccaacgttcagtacgactggggggcgcgtgccctggggaatatggacctgctaccgggagtttgtcattgtacgggcaaacagccggggctggagccgcccgctgaggcgtatcataccatgcaaagcgccctaccggagcagtccagcgggggtgctttggagtggtcagtgtacggggaagctgtgccgtgtgagggcgatcatctcgcgcagctttcccttcaggaagtggattcccttgccgctggacagtccaccgaaggtggagctctcccaggtcagagggatggattcgccgctctgggcatcgagctcgagccgcttgggaagatagaaggccgtgccgtcctgctcctgaaggtcgaaaaagcacctgtgaatggcggtaatgaagtcctcccgttccggaagggcgccgggggcgagaatggaggaacgcatgaactccgacagcagtccgtatagatcaaacaggatgtcgattcccattgttttggtcagaacgtgcgcggaactgtcccaggcctgcgggtaacatgccttccaggcggaaaaataagtctcgatggcctccacccgggcggaaaaagtggtgtagttaaagccgttctgcaggttgatctcgagccaatgctccagcagcttctgcattttgctggagttgacataagcccggggcagagagcgggcacgggggccgtcgaacatcttgatccggtcatgaaagaggccggcccggccattgagctcgtccatcaggtcaaaggcggtgttctcccggtcggacatcaggccggagaggttgcggatggcgttggtatgtatggcggagggcttctcctggttgcagttgatctcagcaaaggaggccgccatcttgcgcagatccagatccaagtagacgccggtgaggaaggggtagtccagcttgcccgccgcataagccccttcggtgcggtgatggccgtcgatcatatagcccagcagttcctgctctggggctagaagatagcccgcctcgtctgccgcacaggctgcgatgtgctcacggtaacggtggagagcgacggtcaaaaggacaatgccggaggagtcgctggtgcggctctccagaggggcaacagttatataggggctgtcctggcatctgagggtgataacaatggcgttgggaaagccatacgggccgctggagaggcgctcctcaatttcagagacctttttcatgaccagagcgcgctgaatgccctctgggttttccaggctgcgggggaggcggcagatcatagcctgtaggaagccggtggcgagagcgcaggtgtagagtttgaggtggtcgctctgatccacacggagcatgggaatggacattgcatccccgtgctgcgcaatcatcctgtccagcatggacaggatatctgccttggtcttgctctttgtaaacatccgcttcattttgatcctccactcttgagaataatatattgagaatttttacctcaaaagcattatatcaaagacggaaaaaagaatcaagctaaaaagagaatcgctgcacagattttgaaataagaaaaaatagaggtcataaatttgatgaaaggggttgacaaggtggggagaagatggtaaaatacaacctgttctgaacaaaaggacatgcgcgagtggtggaattggcagactcgctagattcaggttctagtgtgcattacgcacgtgcgggttcaagtcccgcctcgcgcaccaacgaaagagcacctgtgttacacaggtgcttttctttttatgccgagaggagatgtagccggatgacagcaattgtctgcgtggacgaggcttgggggatggcgttccacgggcggcggcagagccgggaccgggcggtgtgcgcccgcatcctggaggatgcggcgggccgccggctgtggatgagtcgggacacgctccggctgtttgaggcgccgtatccggagtatctgaccgcggcggaggatttcctggcccaggccgggccgggggagctctgctttgtggaggagccgcccctgttgccctggctggaccggctggaggggctggtgctctaccgctggaaccggcgctaccccgccgacgcctggctggatgtgcggcccggccctccgggatggactctggcccgccgggaggagttttccggccactcccacgagcgcattacaaaggaggtctacacccgatgagacgcgtctttccgctcctgctgctcctggccctgctgctggccggctgccagggggaggccgccccggcggtcagctacgatctggaccaggtgcccgcctatgcgggcgagccctatgtggtcatcaatgacaaccagcccttctttggggaggaggaatataccaccgaggcctttgagacctacagtgcgctggacgggctgggccgctgcggcacggcctacgcctgtgtgggagaggagctgatgcctgccggggagcgggagagcatcagctcggtgaagccctccggctggatcaacgtggagtacggcggtcagtacctttataaccgctgccacctcatcgggttccagctcaccggcgagaacgccaacgagcgcaacctgatcaccgggacccgctacatgaatgtggagggcatgctgccctttgagaacctggtggccgactatgtgaaggagacctccaaccacgtcctctaccgggtcaccccgctctatgagggggacaatctggtggccagcggagtgctgatggaggccgggagcgtggaggacgagagggagggcatctgcttcaacgtctatgtctacaacgtccagccgggcatcggcatcgactacgccaccggcgcgagctgggcggaaggggaacagggggagatccagtccagcccaacccccgcaggtaccgcctacgtgctgaataccaacacgaagaaattccacctgcccacctgcgccagcgtggaggacatgaagccggagaaccggacggactacaccggaagccgggaggccctgctggacgagggctattccccctgcggccagtgcaagccgtaaagcaaaaccgccgcggagcctcgctccgcggcggtttttcagcgtcccagcaggaagaacagggccagaaacagggcgcaggacaggatggggaagaggacgtccaccggccgcaggcgcaggggctggctgcacgtgcggggggcgcggccgtcgaagcccctggactccatggcgatggacagctcctccgaccagcgcacggacttgaccagcaggggcttgaggagggcgggggagacgggaaaaacccggatgccgcgggcggcaaaggcggcgcgggtgcgcttgtactcctccatcatattgggcaggatgccccaggcggccagcaggccgtaggcgaacaccggggggaggcggagctgctgctggagggagcgcaccaggaggatgcggtcggtggtgaggacaaagagcaggcccagcccggcgaaggccagtacccggctgcccagcaccagcccgttccacaccgccgccccggtgagggcctgggcggcggcgttgatgggcatgcccgccccggcgtgaaagtggtagccggtggagaacatgccaaccgccaccagaagcacggggacaagagtcccggccagcaccttgacgttggcgcgggagaggagcagggcggccagacataccgcaaataccgccaggttgaccgccgggtgatggagtccggccagcaggagggtgggcaccaccagcccgatgagcttacaggcgggattgagcgacttcatacaggctcccctccttcagctcgtagagaatgtcggcgtagtcctgagccagtgcccggtcgtgggtggacaggatgagggtgaggccccgctccaccacctcccgctggagggcgtccatgatggcggcggtgcggccgcggtcctgggcgtaggtgggctcgtcgcacaccagcacccggcagtcgtaggccagcagggcggccacccccagccgccgctgctggccctggctgagcatatagggggacaggcggcggaagcgccagagctggatccggcggagcacctcttcggccccggcggcgggatcgcccgccccggcgctgtggcgcaggctgaccgtcacctcgtccagaacggtgtccgccacgaactggtcctggggactctgggtgacgaagcccatgcggccggtcagccggcggcggtgcctggacagctccatcccctccagccgggcggagccctgatagcggtaaaggccgctgagggcgccgaacagggtgctcttgccgctgccgctggggcccacgatggcgtggatgcgcccccggaagaagtcggcgttcacgtcccgcagcacctcgcgcccatcctgggagacccgcaggccccgcagggagagcaccacctcctccggcccggtcttgaccggccgggcggcctggtaggggcagccggggacgctgacgccccgctccgcccacgcctgaggggagagggcgctgggggcataggcggcgccgtccagcgtgccgtcctgggccatgaggcggatctcgtcggcgatggacagccagtggtccagccggtggtcgatggccagaatgccggtgccgcattcccggtggagccgggcgagctgtccgcagagaagggcggcggtttggtcgtccaaattggcgaagggctcgtccagcaggacccaggccggccgcagtgcggccagacaggccagcgcggcccgctgcttctccccgccggacagggagcggagggggcggcggcgcaggtgggcgatgccgcagaagtccagggcggcgctcagccgctcctccatctccgcccggggcacccgccggttctccagacagaagaacagctcgttctccaccgtgtccatacagaactggagctccgggttctggaacagcatgcccaccagggcgcaccgctcccccggccccagggcggcgggctcctgtccctccacccgcaccgtgcccccctggaggaacccggcgttctggggatagatccccgccgccagatagagcagggtgctcttgccgcagccggaggggccggtgaggacggtgatgcggctccggtcaaaggaggcgctgacctcgtccagcactgggcgcttgctctgctccaggtagcggaaggtgacgcgctccagggtaatgcggcccacctcagacggggaggaagtcattggtgtactcggtggggcggcggcggtcgtaatagccgttggccaccagccagtcggccatccgctcccagcgctccgggcggatggcgccccagtggccccgctgatccagcagcaggggggccaggtgcttctggctgcgcaccagcatggcctcggacacggcgggcaggccgtcctttaccgccaggacggcgccctccggatcgcgggccgcctcctgatagccccggtccagagcggccaggaaggctcgcacctcggcgggccggtcccgcagaacctggtgcgtggcggcgatggcgggggcgcagaagtcgaagagggggtccacgtcggccagattgatgaagtcgatctctttgcccgccgcgataagctcctcgttctcccagttggcgtagacccaggtggcgtcggccacggtgcccagggtggcgacgatgtcgcccacgtccatgggcaccagctccaccttgccgtagtcgccgccgtccaggcgcacggcctcgccgatcacgccgtggaaccagcggggggcccagtgggtaaggcgcttgccctccagatgccggggggaggtgatgccgctctccttcagggagacgatgccggagtcggaacgctgggtgaggacggccacgccggtgagctccaccccgcgggacatgcagtccagcatggaaatctgggggcccagcacgaaatcggcgccgtggagatccataacgccgtgaacctcgccgtcgatgtgcacctccaggcccgcctccgcgaagtagccccgcttctccgccagcagaaagccggtgtgattggtatttgcaaaccagtccagaaccacattcagtttacccattgcttattcctcctcatcgtcgatggataccggggcaagccgggcgcccacggcgtagctgcgcagtacccccgtccgggccaggccgtcgcaggccagcttggcgatgacgccggagaagaccacggcgctggcaaagcggacggccaactgggcggccagcatggtgggggccagcagatagtagctcaggtagtacagctcgtagcagaagatgcacacggcggcaaagacgccggacagggccatggagagcaggttgtacttccggtagcggaatacggcgaaacccagctcgcacccgacgccctggatgaagccggtgagcaccacggtggcgccgccggagttgcccatgagcagctcgatggcggaggccagcacctcggtgatgagggccgcgccgggcttgcggatgatgtaggcggcaatggtggcagccataaaccacacgccgtagatgagttcaaagccgaaggccgacaggcccaggggggtgagggccaccgaaatggcggtgccgccgtaaaacacggccatgtagaccaccgcgaacagcacacccagtatggccatcatgaccacgtccttgagtttccagggttctcgtctcattcttgcagatacctccgttttaggcaaaagtaaaagccgcacagccttcgctgagcgactttgcaaaaaacggcaaaacggcgtgaaccgcgctccctacgatggcattacccaacaggttccatgggtcataggcagaacagcctaactctcagccggattccatccggccccccagcattcagttgtgcagacttttctgtggcaactatagcacgcctttccgcaaattgcaagggcggatttcagacccagtggcggggccagcggtcccagtaggcccggtaggtgggccacgtgccgttcagatccatttggtacatacggaagatgaccagccggtttttcggctgccacagctcctcgtaggagtagcggtaggtcatgccgatgcgctccatgaccgccccgctcttgggattgtccgcgtcgtgggtggccgtgaggaagggcaggccgtcggcgcgcagacgctccaccaccgcagcggcggcctcggtcatgtagccgcggccccaggatggccgggccagggcgtagcccagatcatggctctccccgtcgtccacatggaggtagccgatggggcggtcgttctcccgcaggcagatggcgtagcggcagccggagggacggcggtagtagtccaggtagtgctcctccagatatctggcggcgtccgcctcggtctccagcgggaaccagggcaggaaggtgttgacctcccggtcgcgcatcagggaaaacagcggctccacatccgccggggtaaaccggcggagcaccaggcgttcggtttccagacggggggtgttggcgggcatgggacattcctcctttttacccagtatagcacgccccagaccatgccgcaactgccgcttgactttccgccggggctggggtactctgaacagtacgcacagaaagagaggacacgccatgacctaccccgaattcaaagccagatacgccctcacccccgatccccagcaggaggcggccatcctccgggccgaggggcccaccctgctgctggcggtgccgggcagcggcaagaccaccaccctggtgacccggctgggctatctcatccactgcctgggggtggagccggggcgcatcctcaccgtcacctataccgtggccgccgccggggacatgaagcggcgctttgccgccctctttggggaggagcacgccggcgcgctggccttccgcaccatcaacggcgtctgccagtccatcatctcctactacgcctgggccaagggggcggagcccttcgccctgtggacgaacgagggggagctgaacgccctggtgcgctggctgatgcagtcccacggggccgagtggccgggggagcaggaggtgaaggaggtgcgcacccacatcacctgctgcaagaacggcatgctgcgggatgaggaggtgcgggccattgagatggacggggtggattttcccgcggtctacttcggctaccgggagtacctggagcgcaaccgccgcatggactacgacgatcagatggtctttgccctgcggattctccgccgatatcccgacatcctggcccacttccagagcaaatacccctacctctgcgtggacgaggcccaggacacctccaaaatccagcacgccatcctccgtctgctggccgcccggagccgcaacctgttcatggtgggggacgaggatcagagcatctacggcttccgggccgcctggccccaggcgctgatggagttccggcagatctacccggagggggaggtgctgctgatggagaccaactaccgctccgccggggccatcgtggagaaggcggacgccttcatccagcgcaacggcagccgccaccccaagcacatgcgggccagccgcccccagggggagccggtgcgccacgtgaatctcaacgacttcgggcagcaggcccactatctggcccaggcggcggcggactgcacggtgtccaccgccgtgctctaccgcaacaacgacagcgccctgcccctcatcgacctgctggagcgccggggcatcccctacgcctgccgccagcgggagagcttcttcttcaccagtccggcggtgcgggatctcaccgatgtgctccgctttgccctggacggcacggatcgggagcggtttctgcggatttactacaagctggaggtgcgcgtcaagcggagcgtcctccaggagaagctgcgccgggtgccggagggggcgccggtgctggacgccctcatcgacgggggcggcttcgagccctggcagacggggcggctcaaggccctgcgcacccacctgtccaagctgcctcagctctccagctttgccgccctccagcgcatcgtcaagtacatgggctacggggactacctgtccagccaggggggcgacaagagccgggtggagctgctgctggccctggcccggcaggagccgggggtggagggctttctctgccgcctggaggcgctgcgggacacggtggaggcggggggcggcgacccggcctgcccctttgtgctctccaccatccacgccagcaagggcctggagtatgaccgggtgttcctcatcgacgcggtggacggcattttcccatcggtgaacccccggaagggaaacgacctgtccgacgaggagcgggcggccctggaggaggagcggcggctcttctacgtgggggccacccgggcccggcggcagcttgttctgctcacctgtgacaaccgctttggcgagccgtcacccccggcctccttcgtggggcagttcctgggcacgccggagtgggcgtcccagagacccaggactccgggcaaggccccggcggagcctgacgccgccgcggtggcggcgtgggagaaggactacctgcccggcacggcggtggtgcaccgggccttcgggcccggcatggtggtgagccgctccggcgcggtggcggtgatcgccttcgacgaggttggcaccaaaaaggtggagctgaccgcctgcctgcggaagcggctgctccggctggcctccgccccgggcttctgagggcctgttaccaaattttcaccatttgaaaccgcgtaggggtttcccttcgggctgtgggggtgttatcatgacggcataacggcccgaaggaggaataccgctgtgaaccacacgtccataacggggctggcctgtctgctggccgttgcccttaccgcctgcgcgggaggcggagagccgccggcaccgtccagcagccccgcgtccgcccccctggaagctctgaaagaacccgccaactccatgcctgtttcgcctccgttgtcccccgcgcctgtgtcggccgaggccctggcggactaccgggccctgctggcaggggagccgggggcgctggatcgcccgccggaggggctggagctgcaccaggtcaccctgcccccggcggaggagctggagtatgtgctgctggatctggacggggacggcggggcggagctggtggtgcagatggtggctcagccccaccagttcaacgccgtgttccactatggggacggggagctgagctgctggcagtacgatattatggagatgagctgccgggactacccccttggggacggcgccatggtacggcagtatgacacgggcaccgggcccaatcggtattcccacctctacacggtgttccgctatctgcccgatggggagacggaggagtgcgcctccctggcggtacaccaggatacgcaggaggatggcacggaggtattcacctatctggtggacgacgcggaggtggatcaggacacctttgcggcggagtttgaggaactggtggggagccggcttctgtctctggaggactggactccggctacggagcggcccggctgaaaaacgaacgcggcccgtcggtcattgaccgatgggccgcattttgtctgcttgacttacccgttgagagagtccagaatacggtctctgagctggaagagcggttccagagagctgtccttgagggcggacttgagggagaccacgggctcaagcacctggaaacccttcagctcacccagcatctcacgcatcagcttgccgctgaccggagcccaggagccgttctccaccaaggccaccgtgcggttttgcaggccaagggccttcatgtcatggaggaaggtggccatggcgggatagaccccgttgttataggtgggggcggccagcaccaggtggctgcaccggaagacctcggagataagggtggagacatgggtggaggaaatgtcgtgcatggcgatgttctttaccccgctgtcagccagacccgcagccagaaggttgacagcgttctcggtgtcgccgtacatggaggcgtacagcaccgcaacggcccgctcctccggctcgtagcggctccacttgtcgtacttgtccagaaggtagtccagattgctgcgccagatggggccgtggagggggcagatcatggcaatgtccagtccggagagcttcttcagcgcggcctgcacctggaggccgtacttgcccacgatattgccgtaatagcggcgggcgtcgtccagccagtcccggtcgaagttcagctcgtcgttaaacagattgccgcccgtggcgccgaaggagccgaaagcgtcggcggagaagagaagcttctcgctggactcataggtcatcatgacctccggccagtggaccatgggagtcatatggaattggagggtatgcccgcccagggagagggtatccccttccttgacggtgacggtgcgcccgtccagggggaaatcatagaattgccccataaaggcgaaggtcttggcgttgcccaccagtttgagagtggggaagcggagcagcagcgtctcaatgctggcgcagtggtcgggctccatgtggttgatcaccaggtagtccagcggacggccgtcaagggtgtggagcacgttctccaggaactggcgggagatggaggagtccacggtgtccaccacggcggtctgctcgtccaggattaaataggagttgtaagagacgccgcgggtgatgggaaagaggttctcgaacagggccagccggcggtcgcttccgcccacccaccagacctgctctgtcagcttgcgggtacaatacatatggcattctcctttgaaacggggcctggcgccagtgcgggcaaagcccggcgggaccaggcgaaatctgtcttttccaatccattatcatagcagacctgcgatactccgtcaagggtacagacggagaggaatggccggaaaacacaagatttatggggggtctccacaaaaaaagttagattcctctttccaaacaggaatcaaccgccaccgggacctccagccgtccgaaatagtcccccgtatcctggacggagagctcgtccagcagcagctctccgtaggcgctgccggtggggcgcaggctccggctcgccagaaaggcgtggagtcctgcccaagcccgctcgaaatcgtctggaatgcttcgtccataggcgacggcgtaccgcccagccggcttccatgcgttgccccgccggccgccggttttaaaatagaagcggtaggcccagccgccgccggacggtgtggccagaactccggcggggtagcctgcgtggattcccttcccggcggcgtattcgtaggcgaagctctcgctctcctcgtcgctcatcccctccggcggagggggacagagaaaaatgcgctcccgtgggcgctcctccaccagcacctcgccgtcggcgtgggccaaggcctcccgggccagggaggcccgcagcttcatgatttcgctggtctcccgcaggcgggcgatctcggcctggatgcgctcctcctgccgggcgaagagggcgagcatccgctccggcgtgcggccggcggagtagtgccggatatcctccagccccacctccagcagccggagggagccgatcagataggcggagttgagctggtgccgggcgtaatagcggtagttgttctccccccgctgctccgggcagagcaggccgatgcggtcgtagaagcgcaggttgtcccggctgatgcccgtcaggcgggagaactccaggatggagagctttttcttctgattcatggcggacctccggctctcttaattttttcttgacattgaagtcgctctaaggtttatgatacctcttgccggtaaaaaaagcaagacggcaaaggaggccctcatgaaatacctgcgatccttttacaagcggcaccggggtatggcggcgctggccctgctccttctgctgggccaggtggtgggcacgctgctcatcccggccctgattgccaacgtggtggacctgggcattttgcctgggaatatggatgccattctccgcacaggcgggcagatgctggccgtggccctgctgtcggcggcggtggccgccgccgggagctgggtgaccgccgacctgggcgcccgcttcggttttgaaatgcgctccctgctcctgcgcaagagccaggagctctccctccaccagttcgatgaggtgggcgtttcatctatgatcacccgcaccacctccgacatcaccaacctgcagcagaccatggggatggtgctccagatggtggtgcccgctcccctcattgtaggcgcgtccatcgtgatgacggccatggtcaccccggtcatggccgtcatacaggtgggctttatggcggcgctggcggcggtggccgccgtggtgctccgaaagtccaacgccctctcccgcagcatccaggtgcgcctggaccgcatcaaccgtgtggtgcgggaggcggtcaccggcgtacgggtgatccgggccttcggcaacgaggcctatgaggaggcccgctccggcgacgcctaccgctcctatgccgacaacatgatccgcctgaaccggctctttgccgtggctattccggtggtgtggatgctcatgggcgctctcatggctgtggtgctgtgggcgggcggcgtgctcaccctgggcggcggcatggaggtggggcagatcaccgccgtcaccgagtactccatcctgaccatgggttacctgctcatggcggtgtcggtgttcaccacgctgcccaaggccagggcctgcctggcccgcctcaccgccctgctggacacccggcccgacgtggaggacgggaccgcctccgccgccgcggccgggcccggccgcccggcggtggagtttgaccacgtgagcttctcctaccccggggcggaggaaccggtgctccgggatatctccttcaccctgtatccaggccagaccgccgccgtgatcggcagcaccggctcaggcaagagcaccctggccgatctgctgctgcggctccacgatgtgggggagggggccatccgcgtgggcggcgtcgatgtgcgtaccctcacccagcaggagctgcgggagcgcatcggctgcgtcccccagaaggcgttcctgttcagcggcaccatcgcggagaatctgcgcatgggccggccggacgctacggacgaggcgctgtggcgggccctgggcattgcccaggccgccgactttgtggagcggctccctttggggctggatgccccggtggcccaggggggcaccaacttctccggcggtcagcggcagcggctgtccatcgcccgggcgctggtgaaggatgccggggtgctcctctttgacgacagcttttccgccctggacgtgaagaccgacgccgccctccgccgcgccctgcgggagcaggtggtgcgccccgccaagctcattgtggcccagcgggtgagcaccatcctggacgccgacctgattctggtgctggacgaggggcggctggtgggcgccggcacccacggggagctgctggagacctgcccggtctaccgggccatcgcggacagtcagatgcagagagagggggcgtgagcatggcacgcagaaagaaaaccgaaaagcgggagctctcccatgaggacatcccccgcaacaccagggccaccgcctggcggctgctgggccggatggcccgccagtggtggaagctgctgctggtggccggggcggcgctgctcagctccgcctccttcaccgccattcccctggcggttggaatgggcatcgaccggctggtggacgccatccgggcctttgacggctccgccggcgtggtggagaccgccgccggagccctggggctgcccgtgctgctggtggccgccgcggcgctgttcagcagcctgatgtcctatgtgcagcagtatatcatcgccaccgtgggggaggagctgaccctctccctgcgccaggacgtcagcgccaagctcaaccgcctgcccctgcgctactttgacggacacaagaccggcgacatcatgagccgggtcaccaacgatctggaaaaggtgtcctccgtgatgcaggtgggactgatgcagttggtgtcatcggtgtttaccattgctctggctgcggcggccatggtgatgctcagtcccaggctctttctggtggtgctggtctccctggccctcagcatgacggccaccggctacgtctccgccctggcccagcgggcctacggcggcaatatggcggccatgggggcgctgaccggcaaggtggaggagctgtacgcgggcaaccgggtggtcaaggtgttcaaccggcaggcggccatgctggaggaggcggaggccctcaacgaggcccagttccgcgcccagcgccgggcccagttcgccgactacgccatctatcccgccatccgcgtgctgggccagctcggcttcatcgccaccgccgtcctgggcggcggcatggccctgggcggggctatcaccctgggcactgtgcaggcctttttgcagtatgtcaaccagatcgccgagccggtgaccgaggcctcctacgtcatcacctccctccaggccgccatcgcgggggccgagcgggtgttcgccctgctggacgaggaggaggagcggcccgatgcggcgggggacgcctccgccatcacccgggggcacgtggagtttcgccacgtgcgcttcggctacaccccggagcgtaccctgatccacgatctgaacctggaggtgcgccccaacgagatggtggccatcgtgggccccaccggcggcggcaagaccaccctggtcaacctgctgatgcgcttctatgagctggacggcggctccatctccatcgacggacaggacatcaccgccctgccccggggggagctgcggcggcgcatcggcatggtgctccaggacgcctggctctttgagggcaccatcgcggagaacatcgcctacggccggcgggacgccacccgggaggagatcgtggcggcggccagggcggcctgctgcgaccacttcatccgcaccctgccccaggggtacgacaccccgctttccggggagaccaccggcgtgtcccagggacagatgcagctcctgaccatcgcccgggccatgctcaccgacccggccatcctggtgttggacgaggccacctccagcgtggatacccgaaccgaggtggagatccagaaggccatggcacgtttaatggagggcaagaccagctttgtcatcgcccaccgcctgtccaccatccgcagcgcggatctgatcctggtggtgcgggacggcgacatcgtggagcggggcacccacagggaactgatggcccggaacggcttttacgcctccctctaccgcagccagttcgaggcggcgtgacgggagaaggtggcccgtcacttgccccagggcctgcgttgctgccccttttacccttcctttaaatatttgcccacaactttatagcatttttcattttggtgtgaaaaggagcccgttgcagaaccgttttattctgcaacgggcttcttgttttacgttatatgtgcaagaatttcataatgattttttgctggatcccgctacggttgacccgcagccgggtgtctgcggagggcgccagcttttcatagttatcggaaatcacatccaggattctcccgcccttgctgtcaaagcgcatggccttgtggatcaggaaggagctctccagggggttcaatagctataaactgtctccgtatgaatgaaatcttttccgtgtccaaaagaccacattcatcaggatcacaataagtcccgtcacggttatcgctgcccaaaaccccatattgattccgaacagctccgttcttccgaacaaattcatccatattgtgttccaattgattgtcatatcatgcacactcccttcctgttacagcagctccccaaaatgacgcacataggctttcttaatactggtcgccaacaccatatacaacaaaatgcaggggatcaggtaagcaaaataagctgcggggagggcgacaaatccgagcatttttcccaatgcggtaaaggggatgaccgtcagtaccgcgatgccggtaaaggtcagcaacgtcaccggggccgaggcgcggctctggataaacggcagtttcggggttcggatcatgtggatcaccagcgtctggctccacatggattccacaaaccacccggcatggaacatggccgcataagtagtctgcatttgtgccagttccgctcctctgtaataagcagacaggtcattataaagcacgccgccggaaacgaatatcgggcagaaaacgaagtacagaaaggcgtatgttgtccagtcgaagatagaactcgtaggcccgatccagatcataaaattcccaatgctggatgcttcccacttgcgtggaacagcgataaattcctcatccacgttgtcccaggggatggcggtacagctcagatcatagatcaggttcagcaagattagatggacgctctccatcggcaggaagggaaggagtgccgaggctgccaataccgaaaacatatttccaaagttggaggaggccgtcattttgatatacttaatcatattggcataggttttgcggccctcaatgataccctgctccagtaccatcaggtctttttccagcaggataatatctgccgactcttttgcaatatctactgcagtgtccacggaaatgccaatatccgccgatttcatcgccgcagcgtcattgatgccatcccccataaagcctacggtatggccgccgctccgcagggccgtcacaacacgtgccttctgatccggcgagagcttggcaaatacatccgtagattctgccacctggatcagctcgtcatcgctcatgcgttccacatcggagccgagcagaagattgcttaccttgaggcccacctgcttgcagatacagcgggtcacacggtcgttatctccggtgaggatttttgtggtgacgccatgggctttcaatgcccgaatcgcctccgcggtggattccttgggcggatcaagaaatgcaaggtatcccatcagaaccatatcgcactcgtccttgacgctgtatgtatcagcggcaggaagcgcccgtttttgcgcaatggcgattacgcgcatcccgtcctcattcaaatcggctactgttttcagaatcgcctgccgaatttgatcggtaagtggctgcacctctccctgatattccgcatgagaacagatggagagcatttcttctatggcacccttggtaatcatttgccgtttcccgctggtatcctctaccaccgttgaaaggcggcgcctggtgaagtcaaacggaatctcgtctaccttgtggtaaactgcggagagatcggccaactggggattggccgcttcttcctcctctgtccgctcaataatcgctatatccatcaaatttttatatccggtctggaagtagctattcaggtacgcatgtcttaaaacacgaatatcttcctttccggtcacatccatgtggtactccagaaccactttgtcctgggtcaatgtgccggttttatccgtgcagagtacatccatcgccccaaagttctgaatagaatttaagtttttcacgatggtctttttctttgacatggacatcgcacctttggcaaggcaggtggtgacgatcatcggcagcatttcaggggtgaggcccactgccacggaaatggcgaacagaaacgcttccagccagtcacccttggtcagaccattgatgaagaataccaccggtaccatcaccagcatgaagcgaatcaggacccaggaaactgcgtttacgcctttcgtaaaattggtttccactgcttctcccgcgacagacaccgccatggagccgaaaagggtatcatcacctacggctaccacgaccgccgttgcactcccgctgatgacattgcttcccataaaggcgatgttcgggtaatctgtgatggaatcgtattcctgctcacagacaaccggaatcttttcgatgggatcgctctcccctgtcagggccgactggctgataaacaggtctttggcctccagcacccgtacatccgccggaaccatatcgccagcggagagatgaataatatcaccgactaccaaatcttccagcgggatctcctgcttcccgttgctctttcttgtaaccgtgcaagtggtggtaatcatcgccaacagcttctccgcggcattccccgaccgggattcctgaacaaaccgaagtgtaccggaaataaataccatcgtaaaaattataatgatggtaagcggagccacatcctccggtgcatgctgaaggatcggtacaacaatatcggtaaaaatagatacgactgccaggcagaacaaaattgcggtaaatggattgataaacgcccctgccaatcttgcaacaagcgattttttcttttcatgcgttactttattccgcccaaaagcgatccgatgggaaatcaccgccttatcacccagtccggtcagcgcagtatcaagctgcttcaaaaccggtttgattttattgcctgctgcaaaggccagctttttgttggcctcatccctgcgaaccatatccgcagccgttttatgagccgtgatttggttcttttccttttgatacattggggtcgatacctcctttactttttaaatgagcatcagccacccccaaaatctatccatagtcttacgggtgcggttgctcgatctacttcgagaagggccagcatccataaaaccacctcctttaccgtaaggaacgctgccggctattttcctgaactctggtaccggccggattttccgatccagtacacatccgcgccggataggaccatccagccgaccatacaccataaaaacccgcttttacgaaacgcgtaccatgctccgctgagtaaaaaaatgataccgcttgtggcgatcatcatccccacatttcggcaaaggggacgaatgtggatttttcttttttcttcctccggcattgtcttccatgctgcaatatgattaaccgccttaccggaatagaagtaaatacccgcagcgagaaaaagaatgccaaggaaaaggcaagcgccattcataggtccttctccttccttttttcatttctccacccatttctaatcctgttcaactgggctattttagagagcagtataaaaagcaggataatgaggaaaagctgaaacacatcagttacaaccagccagctttgaaagagaatcctgcggaattctggaaaggcaagaactgccgctaaaacaccggaggacagcgccgcataaataatatttgtcactctaagccaatgcgataagagcaattcaaacttcatatctgtccctcctataccaattcccatccggcgctgactacgctggagagcgtcaaaagtcggtttacaatcgcctccgccatctgagcctttggtttcccaacggaaagaaaatccgcctgaatctctaccttgccgccaattacatcgctgctctccaaattcgtaagatacaatgttttacacgaattgctgttgatcagaagcgcgcgtatttctgtttccgcattttcctgacaggtaacagaaatgcggtaggttcgttccgtttcttcaccgcaggtaatgggcttgatctttaccgccagcggccggaacagcagatttgaaagaatcagaataaccgctgcggcaaccgcaaaaagacagctgccggaactggacagtacaccgacagcggccgtacaccaaagagttgctgctgtatttagcccacggacggttccgccctccttaaaaatcaccccgctgcacaggaatccaacgccggacacaatgtaactggcaatccggtacacctcatccgagccggacatgagcggaaacatcaggaacaggcaggcccccattgaaatcagaacattgatacggattccggcgggatggccggtaatctggcgctctaatccgatcaagaatcccaatagaaccgaaagaccgatccggcccataaacttcaataccccatagggtcgcccccattctcaaaattttttacagggcaaagtataactgttttttactgttaagcctatggctaaatccttgcgattcccttgcttttcggcaagaaaataagcagtcaccatctggtgactgcttacatattttaacgatgacttttaaaccctttttcatacgattgctctgtttacatctaaatttctgattgtcagagcttatcattaaatttatatccaattccccaaatggtaagtatatattccggcgcatccggatttggctctatcttttttctcagtttgcgtataaaggccataatattactgtccgcagtatagtattcctccgcccaaaccgcctgatagatctgctcttttgtaaacacctctccacgattccgggccaagaaatagaggatgtcaaactctttgggagtaagctggatctctgcgccgtcccggataacacggcggcttttggaatcaatcagaagatttccgcaaaccaaagaggtgctggccgcttctgggattgcctctcccaactccagcatgagagagtcggattttcctgcatacaacgcctccaaggcgtcatacagttccttcgctgcctgtgtctgtggatgctgggtttggagcgtattgcaaaaccactgtaaggtaagggaatccaatgatacaaagtttactctcttcatcaagtcccctcccctacaacaatgtatggtatttctgaatataccaccgtttggcggccgttaccagcagcatataggccagaatggtgaccgccagaaatccaaaataccaaagcgggaggggagccaggccgagcaggtgggccgctggggtatagacaatcgcagtaaggatcaaaagcccggcagaggtgaccagccatacaaccccggatgccctgctccttagaatagaaagctgctttgtgcggagcaggtgcagaataagcacttgcgtccacatagactctaaaaaccatcctgtatggaatagaattgcaaattgactctgcatcgcagaggacaattctgtaaaattgtctcccagtaaagctggacacaggataaagtatagaaaagcaaaagtcgccagatcaaacagggagcttaacgggccgaaaaagcgcatgaagcgccccaatgtttttcctgaccactcgcttggtttttcatagacatccgcatcgacgcgatcccacggcaaagtcatgcacagaatatcgtaaaggaggttcagcaaaagaagttgaagtgccgtcatcggcaggaagggtaaaaaggcgctggcaagtacaatcgaaaagatattgccgaaattggaggacgcggtaatccgtatgtactttaacatattggcaaatgctttccgcccctctaaaataccctgttccagcacattcaaatctttcttcagcaaaatcacatccgcagattcttttgcggcttgtgtggccgtgtctacggaaatccccacatctgccgctgtcatggcggctagatcattcattccatcacccaaaaagccgactgcatgaccattctcgcgcagcatacggatgatctgagatttctgtccgggggaaagctgggaaaaaacggttgtcttttctacggcaagaagctgttcatcctcagacagctcctccatttcttctccggttaagatatgttctgtctcgattcccagcctccggcagatggaaagggttacacttttttgatcgccagtcagtacctttacctggacatggagctgctccaatttctgcaaagcactggcggcagagcttttgggcgcgtcaaaaaacacgacatatcccagcaagataagctccgcttcatcctccatctgaagcctgctctggcttgatacaggtttgtaggccacagccaggactttcattccatcttcggtcatttcgtcaacgatagcatggatgccgccagagtcagcggtatctatctttagtgtctgtcccttgtgttggacatactggcagcgggaatatacgctgtcgacatcgccttttgtaataatatagttttccttttctggaacagataagaggacactaacgcacttacgttcataatcaaaagggagctcgtctaatttttggatcgtttcgcccaacgagaaaaaatggttttcccttccaggcatactggaacatttcaggattgcctggtctaaatggtttgcaacgcctgtatgataaaagctgtttaagtaggcgcagtccaatacctccctgctttcctcccccaaaatatcaagatagtattccagtatcacttcatctccggttagggtacccgtcttatctacacacaggacatccatgctgccaaagctctgcatcgcatttatgttttttacaatcgtttgtttttcccccatggcagagcttccttttgcaaggcaagcattgatcaccatgggaaggagctccggggtcaggccgacagccacagaaagagaaaatagaaacgaggtcagccagtcgcctttggtgatgccggaaacgacaaatacaaccggaaccaaggccaccataaagcgaatcaaaacccaggcaatcgaatttgctcctgtatcaaagctgtgcttgttccgttggagttcggagagatagcctccatatacggtgctgccgcccacagccaagacgataccctttccctctccgctgattacgctgctccccatgaaggctatattggaaaagcgatccagtgaaatttgagtagcagaggccagacgatttgtatttttctctaatacattactctctccggttaaaagggcctgcgaaacaaacaggtcttgcgcttcaatcaatctcaggtccgcggggacccgctcaccggctgaaagcgacacagtgtctcctactaccaattcctccgacgaaatttcaagctgctgtccctgtcggtagacggaaacggtcgttttaatttgctgaatgagagtatccgcggcatggctggcttttcgttcctggatcagccgtaccatcccactgattataagcatagacaaaatgatgaccacactggtcccgtttctgccggagttggatttcaaacagacatcggtgatgaaagagacaatagccaatacaaacaatatcacactgaagggattgataaacgcccgttttatacgctgaaaaaaagaatggacttgtaaagaatagccgacatgattgctgccatgctgttttcgcatctgctctatttgttcttgggttaagccgccttcctttatatgaaaatcattataaagctggtctatatcttttaatgcgtattttttcaaacgctcgtgaggagaaatatgtatagtgcccacagaggtttcctccattttgcagagtatatttaaatatagtttagcacattatccatgggttttctccaaacaaattcttgcttttttcttgcgcttttaattgtcaacaatatcgctatccgggacattaccttttctcacgaaaacgatcttgtccttgacccggctttttcctgctaatttggaagaatggattccactgctccaatgatgttgtcaaatcatttcagcacgttttttacttagactatataaaccattacattaggcactcgtttttttcatacatttgatttattcaaaatgacatttttgctatacttaatttgtgcaatatgcgcaatactttttagggagtaatttaaaatgaacaggatgaaacgattgcttgccgcagcactgacgtttgccgcgacgctgtctcttgcaagttgcggtacttccaacagcgaggattctgtcggtcagacgcccgctccgacatctcaaacggcggaatcgcagtctgctggacgggagttgaatatggcgctctcagtagatccagatggcttggatccgcagcgcacaacagctgccagtacatttcagattaccaataatctatacgatacgcttcttcgggtcaatacagatggttctctgagggaagggctggcccagaagtgggaggtatcggaggatggtctgacactgacgtttcacttgcggccggatgttcgcttccataacggcgacatctgtgacgcacaggccgtagtagcctcattccagcgtctgaaggaagaggaaagcccccgcgctgcggactatgccaattatacgttttctgttcaggatgcggatactgtggtagtaacctgtgaagcactagatgtggcagcactctccaattttgcctatccatggtccgccgttgtggatgtcaaggccgcagatacgttgaaaaatcaaccggtaggcaccggcccgtatcgtttgcaagagtgggtgcctcagcaatccctgacgcttgcaaaaaatccggactattatgacacggtcaatctggatacgatcaacttcaagatgatgccggatgcaacggcgcagattgcatctttgcgtaatggagaactggacattatctcggtcagcggcgatcaggtggctgcctttgaaaatgacccgcagttcaatgtaatcaccacgccgtccaatggtcttcagctgatggcgatgaatttgcagaacgaggcgctgtcggatgtacgggtgcgtcaggctatcaactatgcggtggacaagcaggcgctgatcgacacggtatggtggggctatggtcagaagatcggttcgcattaccccacagttctgaaagaatatgtggatatgaatgaccgatacccttacgatccggaaaaggccaaagaactgctgtctcaagcgggatatcaggacggtctcacgctagaaatgtatctgcccaagagttatccagcatatgtcagcgccgggcaggtcatcgctgactcgctgaaagaagtgggaatcacctgtaatatcactatcgtggaatgggcggcgtggctgtcggacgtgtacaacggaagaaactatgatctgactgtggtaggacacacggggcgtctggacccgtatgtgctcttggcacgttatcagtctgacagcagtgagaactacttcaattattccaatgaagaagtggatcagctgcttgcagattataagagcgaaaccgatgaggacaagcgtacagaaatcgtgcagcgggtccaagagatcctggctcaggatgtgcctgcctattatattcaggaccctattaccatttacgtgacagacagcgcagtaaccggttttcagttgtatcccatcgatatttatgaattgaaagatatatctctcggacaataagaacagggggcgggtcctgccggatgcagggcccgcctgctttgaaggattttgatgttgcacgcacttcttagataagggagagtaacctcaggaaggacggatagttctctatgctgaaactggtggtcagacgtctactcagcgccattgccgtgctgtttgttgtatcgcttattacatttgtggttctattatgtatccccggtgaccccgcgcagttgattcttggggttgaggccacgccggaaaaggttgaggccctgcgtgcctcgatggggctggaccggccttggtacgtccagtatatgcattggattcagggggtacttaccgggaattggggcacttcatatctgtacggtgaaaatgtttggacgctaatttgtcagcggcttcccgttactttctccgttgcgctgctgtccatggcagccgcacttgttgtatccgctattctgggaatcttggctgcgctgaaaaagggttcacctgtggatctactgtcgcgtaccgtgatgcagattggcggtgcggtgccctctttctggctggctatgctgtttatgctgctgttttcctcctatttgggatggttcccggtcacggggtataccgctcccggtgaaaatttcggtgcgtttttgaaatgcatcgcattaccttctctggtgctggctatcggggaactgggaattctgatccgcattgtgcggtcatccatgctgacggccctgcaacaggattttatgatgagcgcaaatgtgaaaggcctgcctcccgctagggccattgtgcattatgctctgcgctcggcgattattgcccccatcaccatctcaggtatgcagctggcaaaactattgggaggaacggtcattgtagagacaatttttgctctgccgggcattggccgtctgatgctgactgccgtggagcagcgggacatcattcttttgcagggaatcgtgctctttattacctccatggtggttttggtatcgctggtcacggatctggcggttatggccgccaaccccactatccgtaccggagaggagaccgtacagggatgaagaaaaaacagagcgtatctttctgggcaggtgctatcatggcggccagcatcgcagctatatgcatcatttcgtttttctggatgcctgcagatccagaaaagatggatacactgaaccggtttgcgctgcccagtgcggcacaccttttagggaccgaccaatttgggcgcgatgtcctgagccgaatcatggaggcgtctcgctgggctctgctggtaggcgtgtgctcggtcaccgtgggcgcgctggcgggcagcattattggcgcatcggcggccatgctcaaaggcgcggtgcgcgcagttattatgcggtttattgacggcatgatgtcctttcctggtattttgcttgcgatgatgctggtcacggttttgggcaaggggattttgggcgctgtgttggccatagggctttttatggttcctacattttccaggctggtatactccatggtgctggagaataaacagcgcctatatatcaaggccgcgcacagctatggatgcagtggaggatatattgtgttgtttcatatgctgccggatatgcttcccagactgattacccaattcagctccagcatcggcggtgctgtgcttctggagtcctctctttcctttttaggattggggatccagcctccgacgcccagttggggcatgatgctgaacgaggcacggcagtttgttctgaactatccgtatattgctattgccccgggtgtggtgctcctgattacggtgttggggtttaatcttttgggggatgggctgaacgaccggctggtgaaaaggagatcgaaaacatgaatgatgcggttttggaaattgagggacttacggtgcgcagcgctgagggagacgctctggtgaaaaatgtgggcctctgtctgaaacggcaggaatgtctgggaattgcaggcgagtccggctcaggaaaaacaatcacagcaaaagcgatcctccatctactgccgcaggatctgacagcctctgtgacacatctgcgggttttgggggaggatctgctgaacctgccggaaaaggagcggcgtatatttctgggcaagaaaatcggttttgtaccgcagaacacggtggcttatttgcatcccttgatcaaaatcaagaatcaactgacggatgggtaccgcatccatttccagacgtccaaaaaggctgcgcaggaacgggcgaaaacgcttttggaccgggtgggtatccgcgacgtaaaccgcgtgatggagagctatcccgcacaaatctccggcgggatgcgccaaagggtaaacatagccatggcgctgatgtgcgagcctcaggtcatcattgcggatgagcccaccaccgcgctggactgcgttgtaaagcagcaggtcattgaactattccactcgatcaacgaacagcagcatgtggcgatcattatgatttctcatgatctgaacctgattcggcggtattgcgacaaggtggcggtaatgtatgcgggacagatagtggagtcgggcggaagcaacgaagtattttcacagccgcagcacccctatacacaggcgctgctgtctgtgatcccccggctggaccaggaccgcaacgtccggctcaatgagattccaggctatgtcccggagcatggaagggataccagccactgcctgttccagccccgctgcagtgcatgccggcaggagtgcggcggctcggttaagagctcccggagagatggacattttgtgcggtgcagcaaagcatgggaggagtgcagggcatgacggcagtattggaggcaatcggcatggaaaagcggtttcccgtcaagcaacagatgctgctgagacgcagggacacgtttcaggcgcttcaggggatcgatctggcactgtactcaggacagactctgggcgtggtaggagaaagcggaagcggaaaatccactttgggagagatatttggcgatctgcagcagcctacatcgggaatcgtgcgatacaaagggcaggatatccgctcactgggagaaaaggagtaccggcgctttcgccgcaatgtgcaatatattttccaaaatcccaaagaatccatgaacccttattatactgtggagagaatccttgtagagcctatgaagatcctggtggacggctttaaaccgcataaagcccgggaaacggtgcgggagatgctcaaccgtgtgggactgccggattccaccctgggcaaatatccctcggaactcagcggcgggcaatgccagcgcattgccattgcccgcgcattgctgctctcgcccgaggtcattatctgcgatgaatgtgtgtccgcgctggatgtgtccattcaggcgcagatcctgaatctgctgaaggatcttcaaaaggaattttctacagcatatctctttatctctcacgatattggcgtgatccactatatgtcggattttatcgttgtgattaaccgtggccgcattgtggagcagggagaggggagccagttgatccgtacgccgaaagacgactatacaaaacggctgattgcaagctcatgttcaacgggggagggctgtgtatgcggtgtacggtaatcggctgctggggggggtgctgtcgggtaaacgaagcctgtagtgcttatctgttgagttgccaaggagaacatctacttctggactgcggcagcggggcggcgtctatgctgcagaacgcattgcctcttcaggagttacaccatgtgctgctgtcccactatcattacgaccactgcagcgacgcgggggcactgagctatggcaggctgatccaaatgcagactggggctgcacagcaaccactgcatttttatgggttgccggtcgaaccgtattttgaacgtttgaccatggagccgtatacctatgcgcagactattggggcagatgataagctgcagatcgggccattttgctgcacctttcacaaaacagcacatccggtggagtgccttgcggtaaaagtaaaatgtgggcagtccactctggtgtatacggcagatggcgcctatacgcccaaactggcagagtttgcagagggtgccgatcttctgatcgcagagtgcagcctgtatgccggggcggatggagcccgtgctggccacatgaccagtacggacgtggcccaactggggtgtaaggctgcgccaggcatgctgctactcagtcatctgccgctgtatggggaccctcatctgctggtggaccaggtgaaggcccagtggaacggagaagtgcgcctggcacagacactgatgacggtggaactgccagccctgaaacgggaggagagtgtgccctgatggaatttcaactggttctggtgcgccatggctactcgctgggcaacgaaaaaagcctgttcagcgggtggagcgacgtaccgctcacagaaagggggcgccgggaactgagggagctgcggcaggtaatccgctaccctaggacaggacgctacttcagctccgacctttcccgttgcagggagacgtttcaggaactgtacggaccgcacatcgtactggacggcctgcgcccggagttccgcgagatctgttttggctcattggaaaaccgtcctggtacacaggaggactttatgcattttttccgggcttggctggcagggcaccccatccttgatgtagagacatataaggcgtttcgccggagggttctggaggcagtagcaggcttgatgagggattgcctggctcagggaagtcaaagcgctacggtggtgacacattccggactgattaaaacagcggtcacagcgctgaaccactggggaccagagcaatggccacagatcgaggctcccaacggactgggatatattttgacactttccgcagagaacggtctgaggctttcctcgcagcggcctctatcaacctgttctcaaaaagatgctgtgggcgcaatatactaatagtacttctaaaagtgggccacccgcactacgaaagccctttcctgagtcatggacgtgaaacgctctgagggaggccttacccggtttacatgacagcggttccaataagttcctgcatatttattacggcagagtaaaaaatctgctggaaaagtatacctttcagaaaaagcaaattgctgttttacgccctgaatagtaccatccaagtcaggtgataccggaggaaacactggaggcaatggctattccagaaatacagccggtgtcgctccggcctgcggtccaaccggtggtgaaccaccgccgccaggcgtggccccccccttggaaaagatccccctggcccccggggggagaatccagagaccagtaaaatggaaaagcagtccgttacaaaatacagtgtttaggacaaaatagaaaggtacaataagaaagtgggggaaaaccgtctgaacagtggttttggcccgcttttcttcgaccaaaccagcagacgaaagactccaatgttcctctccggagggccttccagaagtagatatatgaccggatgatggctccgctcacatcatatcctgtgttataccctttcccataaaggataggaccctcttgccgagttgccgtgcgcaacttcaactattcaatatgtactgtacccctacaacgcataagaggactccgtggacgtgccctcttgaaaatattgggacaatgtgatacagtaagaatgccaagtgtgccggcacacttctgtcttttgcatgcaaaagacaataacaactgacagcagtggagccggggcgcaatttaaaaaaggaggaacaacatgaaacgggcaaaaaagggattggcggcattactgtctatatgtatgttagtaacctttcttcctgcaagtgccttagctattgggccggaagtaggagcagaaggattagacgaggaagcggtcgccccagtggaagaggaaacggagccggtaggagaacctgccgagccagataacggagcctacagcgctctgaagcaggcgattgaagctgcatcagatggtaaagaaactacggttacactggcaggtgatatcgccgggatgacgacggagcagatcatcaccattccggaaaacaagaatattatcttggacatggagggccacagtattaccgtggcgtcggactttacgggcaggccgattgtgaacaaaggtaccctgacggtaacggggaacggcacaatcgatgcgtctgcatctaagacaggcggatatggcgcgattgacaattatggtacactgactatcgaaaacggtacatatactggctcagttgatgcaagtggcgcttccattaaaaatcgccctgatagtgttttgaagattcaggatggaacgtttaacggagcagtgacagcggtttataacgcaggcaagacttatatatacgatggtacttttgattgccgttcctgctcaagctgtaatagtagcagttggggatataccattcaaagccatcaggattctgaagagagtgccaaaccggaattgtatttctataatggtactgttattggtgtacaaggggctttttccacatcggcaggctattcggaagtgcgggacggcgagtttaaaaccgtggcatgcgataagcactccaatggtagttctgcgttctatgcactgtacgttgcgggagaatccggtgaggtagagtgtaatgtttatggtggtgaatttacttctataagtaaagttgcagcatttgttggaaatagtaacgatggcggagataaggaggaggcgctagtccatatctatggcggtagctttatctctcaatctgacgataaagaggcagttcatgtagacgaggcacttggcggattagagattgctggcggcaccttctccagcgatgtgagcgagtatgtggtggagggaacggagatcaccgaaggccccgacggcaccttcatcgtgggtgagctggacgagagcaacagcgttgcagagaccggcggccggcactatgccaccctccaggcggcgattgatgccgctgagagtgaaggacaggtcgtgacactgaacagggataccacggagaacgttaaggtatctgctggtaaaacgctcattctggatttgaatggtcacaatctgacgggaaaggcggatagctgggcgcttgttgtggagggcgatcttacgatccgggacagcaaggcgtctgctgagggccccgtggtcagcgcggactatgaaaccgtgacctatgcttccggcaagattgagagcgcatcgagcggctatgcagttcaggtgcagaacggcggtaatctggtgctggagagcggtacggttatcgccacaaaaggcaacggaatcaatgtgcttgcccagcagactccgaatggggaggtggttagctccagcctcaccgtgaagggcggatatgtgaattcggaggagtatggtctcggcgcctatgggaacaaggctgtattgaacgtaagcggcggcgtgatcgtggcagataacaatgccgtggtggccggaaacggtacggtaaatgaaacaacaaatgccggcggcaccgagatcaacctgaccggcggcacactgatcgggcatattacctccagcggctacattgcctgcggcgtgtaccatccccagagcggcaagctgaccatctccggcgatgtggatatttacgccgacggcggcgtgggcgtgctgatgcgtgcgggcaccgccgagattaccggcggaacgattaccggaacaggtacggcggccggctgggtaggcgacaataagaacgcaattccttgcagcggcgtggtatatgatgaggccgcaaaatatccagcccttgcttcgggagacaaggcttccatcagcggaagcgccgtgatcaaggctaccggcgcgggtgtggactctgtggtggtgcggacatccgatgaaacgaaggagagccgtatggagatctccggcggcacgttctccagcgatgtgagcgactacctggcgaagggcttcagcctgatcgccaacagcgacggaacctttggcgtggacaggctgaatgagagtaacgccgcggctgtcgtgaatggaacctattatggcactctggctgaggccgtcggcgcagcccaggacggccagaccgtgacggtgctcaaggatctggccaccgctccggtgaccaccagcgcaggcatcacgctcgacctggacggccataccctgcggattgtcagcgatacgtctggggttgcatatggtctccaattcacagcaggaaccggcgtggtgaaaaatggtacagtcattgacatgcgcggtgagggaaagaccgcgcagaatatgatcgcactcaacgtaaccggcgcaacgaaggtaacgacttcgtcggtagagttccagacctatcagccgcgcactctggcatctccttattacaacaaggtcgttgaggtgtcggacggcggtacactgaccctggatgcgggcacagtgctccgtgatctgcccaatggcgacgacaacgacgaaacatacggtgcaatcggcgtttccatcatgggagccggcgaggagagtgctcccaccaccctcacggtcaatgaggggacgcgcatcgagacaggcagcgccgccatcatgggcaatggcacaaaacacaacacggtgatcaacatcaacggcggcgagctgaccggtaccgacggctatgccatctaccacccccagtccggcgagctgaatattacgggcggaaggctgaccggcggggagaccggcattgagatccgcgcgggtaaactgaacctctccggggatgcagttatcaccgccaaagggataccgacaaccactacccccaacggcagcggcacaaccacggtgggcgctggcattgccgtgacgcagcatactaccaagctccctcttaaggtcaatatctccggcggaaccatttccggctataccgcgctgtaccaaagcaaccccgagaaaaatgatgacgatgctctgaagaaggtcgagctgaacgtgactggcggtacatttgtggcgacaaacagcggtacgctggccgtatacagcgaaaataagaccagcttcatctccggcggccggttctccttcgatccctccgactatgtgactgaggggaagatcgccgtggcggaggacggcatgtacggcatccaggacaagaatacgactgcggctgaggttgtggctggcgagcctgaggtgaaggccgctgatggtattggagagagtgtgacccaggcagttgctaagactgaggccaccggactgaccggcgaggccaatggcgaggcaaacaccaatactgtgaccgtggaagcgggcacggaagccttgaagaaagaggatattaccgtcacggataagaacgtcactatcgtggtgcagccgtatctggacattacagtagagagttatggcaccaaggaaatgaagctggacattacccccatggtgcgtaccgtggcgacaacggcggacgtagataaaaacggaaccattatccttgaaggcggcgagaaaaatgcggtcgttatggaagatcccaagccgatgaacgtgactaccaacgtcactctgcgcgtgcccctgcccagcgggtttaggacagacaacctctatgtggagcacgccaaggacaacggacgcacttatctctacaaggcgacagtgacggagagtagtggaagcaataccgccacctttaccacccgtcacgggttcagcaccttcactttgaaggcggaggtcagcccagcggctgagattgacggtacctactatgagacacttcgggatgccgtggacgacgtgcaggacggccagaccatcaggctggagaaggatgtcgacagcaaggtcaccgtaagccgcgaggtcacctttagcattgacatcaacggaaaaaagttcgactcggacaatattaccgccggctccggctacagcctgagccgcgacggcaatacctttaccgtggaggaggagagccacggcggcagctcctcctccggctcaacccggtacacggtgagcgtggaggacacggacaacggcagcgtgaaggtgagccccacccgcgcctccaaggggagcacggtgactgtcaccgtgaagcccgacgaggggtatgagctggacgagctgaccgtcaccgacaagaacggcgattccgtcaagctcaccgacaagggcgacggcaagtacaccttccagatgcccgcctccaaggtcacggtggaggccgtgttcacggcggtggagccggagccggagggcctgcccttcaccgatgtaacgagcggcgactggttctatgacgccgtggcgtatgtgtacgacaagggaatgatggaggggaccacggacaccaccttcgcccccgccatgaacctgacccggagcatgatcgcccaggtgctctacaacctggaggagcggccggaggcgcccggcgcggcgggcttccccgacgtggcggcgggcgcgtggtacgccgacgcggtgaactgggcggcggcccgcggcatcgtgaaggggtacgacaccggcgcgtttgggccggaggacagcgtgacccgggagcagcttgcggcgattctgtaccgctacgcgcaggcgaagggctatgacaccacccagggcgggatggccgtgcgggagttcagcgactctgccagcatctccgactgggcgcaggaggccatggcgtgggcggtcaacgcgcaggtgctctccggcaaggggaacggcgtcctggatccccagggcaccgcgacccgcgccgaggtggcccagatgctgatgaacttcgtcgagcacgtgggctgaacacagttccattcaaagagcaataaaagagccccccggaatcccattgggattccggggggcttagtctgtccgcaaactctccggctaaagcgttcagatagactgataaaaattgtctattatgactaaggatatgaagaggggctttccgttgtactgcaagtgtttggggacgaaagagaaggaagtgcgtcaaaaaaagggcaaaatattcagcggactgctgaaaatggaattctctgttgttggatattgacaaataaacgatatgacattatcatttaatcaaaaataaacgttttataaaaatgattagtaaatggaggcgcggctatgatgactgaattgaagagggcaggtggaaacgagctgcgggactttaaggagctctcactggaagaactgcgccgcggatacgtcatccatagagatggtacttacacctgcattttctgcggcgcgtcttttgagacaggcgtcatctatcacagccgcgggcgtgatgtgacggcagagcgggcgatacgggagcatatgcaggaagtccactccggcacattctggcccatgctggagctggataagacgctcaacggtctgaccgaggtgcagaagacgctgctatcctgcatctatgaggggaaaagtacggacgagatcggtgagatcatggggatcagcactgccacagtacgcgcccacaaattcaacctacagaaagccaaaagggaggccaagatcctgctggctctgttggagattctggaaggcgaggagccgcctgttccccgcccggtgcacggagagagcggagcggagtcttccgggatagaacagacagatgacctgttttcactcaatatgctgcacccattttttacacagttccggtataaataggggggacgatatggaacggccgagcccagggcggagaaagatctggaacataaccatgtttatcatcagctatgcgctgaacaatctggtcagcggcatcatctatgatacctatgtcaattacatgcaggagatggcgcgttcggtagcgacatccttttgggcgttttatgggtatgcgacctttatcagtgctctgatgctgctgctgattccgaagacgggctataaaaaacttttggtgttctgttcggcctcctgtgcggcggccctgttgagcgcggtattcatgcagactgagtctgtattctttctgaccactctgcttgcactggtaggcattcagctccattatattatgctggcgccttatgtggcggtgtttaccgaccagagcaacaatattgactggtatacgcgggcctactatctgggttacctggggtattttcttactacttatctgggcggcgtgctgacggtcaagatgttttccctgcgggcgggcgtgacctatcaggcggcaaaaacactgacggaacacgtcgacaccatggcgcccgggctgcgggaacactacctacaggggaaccgggatgtgctgctgcttgttgcagtgctcgcgctggttggactgattcccgtgcttcttatccgggaagagcgggaagaccactgcatcgccatatcagagcaggttccctggcggcagcggctacgggagatgcggcaggctctgctccaacgggatgcggtgatctatctgatctactgggtgctgatttcttttggtatgggactgttcacttcctattattcgattttcctcaaccgaaatctgcacattgaccgggcgacatcttcactgctggtctccctgtcctatctggccatcgttctcttcctgctattcaccccggcggtggtcagacggtttgggcagattgtgacgctgggcggtgtggcgatgctctccgttccgtttatgcttcttatcgccaacggcgaccggtttggccaatttatggttccagtcgtgggcatcgccctgtttatgcgttctggcttgatcaacctcagttcgccggtggacagtgctttgtccatggagctggtaccacgccaactccgcccggcctttgcctctatgatcaatctggcggcggggctcgccagtattctcagcggttggtttaccgggaatgtgctgtttgtggaacaggagggctaccgcacggcctattatattgcctccggtatttatgtggtggcttgcatgctgttgatggccggtctgtggaaatacaaccgggcggcaccgaacaaggaggaggggagatcgtgagacgttgcgcttccgatgcacaaaagctggagcagcttcggcggctgatccgtgagatcgaatatctgaaatatacacttaactccacgctttactgggacaagatgacctacatgccggagaaggggctgacctatcgcagtgaggtgatgtcctttctaggcgcgcagctctatgagcggtttcgctcgccggagctgcggagcctggtcgatcatttttcccggcagaaggacgctccaccccaagtttccgcaatggttcgaagggtagagagcaactacatttatatcaataagatcccgcaggaggaatatcaggcatacattgccctcattgcaaaggctgagcaggtatgggaacaggcacgggaagccaatgactttcagcggtttgctccctatctggagcggattgtggataccttccgggctttcgccggatattgggggtacgaagcggagccttacgacgccctcatgagcttctatgagccagggactaccgtacagcagatggatcgtctggcggatgagctgaaacactttgtgatcgacctgtttcagacactgcaggcccgtggaatgccatgtggggaaccggcggaagggcggtttcgcctcccgctggaggaacagcgggccctctcgcaatatgtattggagacaatcggatttgattttgcatcaggccgtctggacgagggacctcatccaacaaccctggcagcttcaccgggcgatgtccgagtgatcacatcctatcaggcggaggatttccgctccggtctgttcaacaccctgcacgaaggcggtatgggcctttatgaacaggatattgatccggctctgctggggatgcttctgggcgaagtggcatcctttgccaccgagctggcggaggcccgtctttatgagaacatcattggacggagcgccggattctgggagtatctgttcccaagaatgcagcagctctgcccctcactggctgtgggcgagcgggagacgctctttcagtcggtcaatcaggtccgtcccacgttgatccggaacaatgccgatgagctgacctatattctccatatcctcatacgctatgaggtggagaaggatctgatccgcggaacgctgtctgtggcggagctgccacaggtgtggagacagaaatataccgattatctgggaatcacaccccggaatgaccgggagggcgtccttcaggatatccaatgggctgcgggctatatgggctatttccccggttaccttacctccaatttgatggccgcacaatttgccgccgcactggagcgggagctggggccccttcgccatttgttggctgccgggcgcttccgggagatccatcagtggctggcaacgcggatccaccgcttcggagcgatctatccgccgggcgagctggtgaaacgggccacaggggaacccctccgctccacctacttcatcaactatcttcgggagaagtatactgaggtataccagttgaaaaaacaataaggagagaatgaaaaatgtccaaactgttttcgaagcttgggatgggcgaaaagaccgcgcggaatttcattaccatcctgctcatcgccgcaggcggtgccatcatctacggcctgccctacttccggtatgactactatgacgcctatttggaggtttatcatctgaccaacacccagatgggcgtcttcggaagcatcttcggcgtctttggtatgatctcctacttgttcggaggttacctggcagaccgggtcagcatccgcctgctgctgacggtgtcgctggtaggaaccggactgggcggcttcctccacctgctccccctgaccttccccatgctggtgggcctgtatgccttttggggcttcacctccctgtttgcgttctggcccgcctgtgtgaaagccgtccgcgtcttgtcaagcccggaagacaagggcaagtccttcggctggttcgagggcggccgcggcgtgaccgccgccgtcatggcgcctctggctgtcgtggccttccggatcggtctgagcgccagtaatatggatgacaagatgggcatgcgctatgtgattatcttctactctgttcttacagtgctgagcggactgctggtgttctggaagatgcgggacgagtccaccattgagaagagtgagcgtattaccttccgggatctgggcaaggtgcttaaaatgcctgccatctggatcatcggcctggtgaccttctgcaactatgtctttacgctgtccctgtactacttcaccccctacggcacctcgattctgggcatgagcgtcaccttcggggcgattctggcggcctgtaagcgtttcctgtgtcctgtttccaacgtgggcggcggctacctggccgacaaggtgggtaccagctccctgctgttcacctcattcatcgccatggcggtgggcactgtggccatcctgtttctgccacaggccacggcctcggttctgccgtttgtgatcctgttcctggtaatctatttcttctacaatgtcaactatgccctgacctgggccatgatggacgagggtaagatcccggagcggtattccggaacggcggccggcattatctccaccgtaggttatctgccggagatcttctgttccctgctggcgggcgtgctgatcgacggctatccgggcgtcaccggctaccgctactatttttccttcctcatcgtaatgttgcttctgggcgcaggcatggtgttggtttggaagcgcttcctgaagaaaagtcaggataagtaagcctctcttcggaaaggagaacgttcttgtggaacaacatatacctggtattgtgctgaaggacggcctgacgcagccggtttttgattataaaaggtgtctgtttgagaaggtctatgtggagacgccggtagatacagacggggacggccgactggatctgatcgcagtctacatccgccgcccactggaaaccactcaggggatgagggtgcccgcgatctatgtggccaacccctacatgctggagtgtaatgaggattggtatgtcccccacgatgtggaccgggatgtgagtccctatccccagcagcacatcaccgagtcggacatcacctttgacccgtccacagtatccttcccccagcccagataccccagggccaccgtcggctatgcggataccgcgccaacggaggagatcccgttggactgcatcagcgactggtacagctacttcaactcccgtggctacgcctccgtgttctgcggcggcctgggtacccggggatcccagggattcaactgctgcggttccccggaggagacggcggcattcaaggcggtcatcgactggctcaacggccgctgccgggcctttaccaacctgacggacaacattgagatccgggcggactggtgcaccggcaaggtggccatgtccggcaagagctacctggggacgatgtgtatcgcggtcgcctccaccggtgtggagggattggaaaccatcattcccgaagccgccatttccaactggtatgactactaccgctgcaacggtttgaacctgcccgccatcggctggcagggcgacgacctggacattttggccaaatactgcttcagccgtgccaaggacccggaggactatgcgtccgttcgggaggcgtatgccgcctggctggagggaattgcggcagatgaggaccgggacagcggcaactacagccgctggtgggacatgcgcaattacctgaaggcggccgaccgattcaaggcatcggtgtttctggtacatggtctggcggattggaatgtcaagccgacacattgcgtcaatctctttgccgccatggaatccagagggatcccctgtaagatgatgcttcatcagggcgggcatatctacatccatgatttgcagggcagccggttcaatgagatgctccacctttggctggatcactggctctacggtattgagaacggtgcggcggagcgtatccccaatgttctggtgcagagcaatctggatcaggatctctggctggcgtcgccttccttcccggcggtcaaagggtataccgagccggtgctcatgcccgcccaggagagcggccgcctggtggacgacctgtcagccactgtgtatgacagaacccgggacaacgccgccgagtggttggccgagctggtgttgagcgaacgacatgcccactgcctgcgttatatcaccgccccgcttaaaacggatacccggatcagcggcacggttcaggtttcgtttcgtgccgcctgccgggcctctaccgccattctcagtgccatgctggtggaactgggagaggaatgccggctcacaccggaacaggaggtagtacaggccggcgggattccatggggaaacaacacaccgttgggggactggaagcgcttccggtcggaagagaagccctctgccttcaaggtgatctcccgcggctggatgaatgcccagaaccgccgcagccattactgtaaggataccattgagccaggcgttatttacgattaccagttctccatggtacccatggatcatacggttcgggcgggacggaggctctgcctggttttgtacggaacagatgtggaggccacccagcggcctttcgcggtcaccgagttgagtgtggagcaggattccgtccgggttgcagttcccatggctccggtacataccctgcgttcggacaaaggaaatcaataaaacaaaaacgggcgcgttacaaaacaaacccataaaaagatagactggatagcccgaaaagggaggccggtctatctttttactttaagcctaattagaaatgaaacgctaaggcaagatggcgttctttcattttggcgtgataaagagcccgtttcagacgtactcgcccggagagccgcccacgtagaggtccgtgcccctccttttttccagaaaataacgtgccgaagcacggggcgctttggggaggtgttgccctcgtcatcgtaacaggcatagaacgccgggatcacaccttgatatttttaatatccatacagttttcccttatgtcagcagggaattttcaagaccagcttgtcaatattcatcggaacgctatcggagagctttggcaggtgcccttcaccgggaaagaccagcaggaatctgttctggtccaacgtaaccgaatattccggcgtaccccggtacatggtagaatcctcatctgcacgaacttccgcctcatctagggattctactggggccagggctacctgttcgcagccggaaaggacgatgtggaggtccagataacgttcatgggcctcaaaaagagaggcctgggatatgagagccgtggtgtaggtaaagtggttgtagtatatgtctccgcccgggatctcagtccgccccattggcagggcggtgaggtcagtggtttgaaggaaacggatggccgcgtccaaatttggggacagcccgaaataccgggcgagctcagcgcgtttgtcataaatcatgtgaattttctccttacctagtctgtagtgcctgatatgccgcaccatacagaccggccatatttccaggctgggcgccgacggcctggatgccgtggaatccgggaatcaaaagagccctcgtttgggcctggacaccccggggggcatagggctgctccatggcgccgcctgaccggggcattgatgtgcggctccttcaaatgccggaagagggcccgtccgctttccagagccgggttcacccggctggcagccaagcggagcgcggccacagtgtatgatctcccgctttctcatattgcactttagcatcagagcaacatgggagcagtggcgttcagggtacgttctctgttttccagggcggttttagcgtcttttgagcagtattcgtgaaacaggacatctatgataaacaactgcccgagtttaacggcgacggaaccctgctggtttggggcttcgtccgcaccgcagatcaggagcaggtcggaaaatttggcgccgggggaattgggaaaccgggtgaccagaatcagcttggcctccgtcttctggacgaggccgcccagctcggacagctcccgcatggcgccggaaaaagagaaatagagaatgacgtccttggcgcctagggtagcggcggtgatcgcctgcatgtggaagtcattgatccaatgaaatttggaggtgatggaggaaaaacgcccccaggcgtccatggctatgatggaagtgttgccctggccgaagcagtacacattatccgcctcatagaggcagtccaccaccttgcggaccgcgccgtaatccagcaagtccagcgtctgttgcagggcctgagtgccgacgcggtatagcttttggcatttttgctccagggagtcctccaactggatgtcaccatagaggtcgtatccgctggccgggccggaggtgctgtcggaggagatggcctgagccgcccgtaccttaaaatcgttaaagctggcgcagcccacagagcggcagaacctggtgatagttgcctcgcttacctggcaagcatccgccagagtcttgctcataatatagggcagctcgggcttgtgcttgaggatatagtcggccaccctgatctcggaacgggtcagtgagctgtagccttggataatgacatcgaaaatcgattcgccattcatggatggtttcagtcctttctgtgtaaacgcggcagcagggttcaatatcaggggcacgccgcatctccaagaagcattttatgctcattttctaactctgacaattccttgtttgagaaaataagtatttttgtgtgattgcacaagaaaagaaactgattttcgtgtattattagttgttgaaaatgactttcatatggaataaaatagaaccagcatcagagcaacagtcacccagcggcgcatttgtcccagtggcccgtctactatgcaacgcttaggaaggagaaatgaatcaatgaaatacctctggaaacgcgcaacaggtctcttgctcacttccgcactggtcctcggcctcgccgcctgtggcgggacgcccacaggcaacacgaatccgccggaagatcccggtacgcagcagaccacccaacctgtggcccctgacagcggagccgccggcgaaaagctggtctactccaacggcggcccggaggagttcttcgagacgccctggctcaatccaggtacttacgtctataacaaggcggtctatgggcacctgattgtggccgacgaaaacctcaatcccatccccaaccacccagacgcgctggctacctatgagtacagcgcggacggcaagacacttaccttcactcttcgggacgacgcttactggcacaacggagaaaaggtcacccctgaggacatcaagtggagcattgagtttgtcgccaaaactccggtggccaacgccgtatttatctcaaccttctccgccatcgccggcagcaagaccggcgacactttcaatgacaccttcagcggtatcgctatcgacgggcagaagatcatcattacctttgataagatcgcccccgacgctctgctgaccttcacccagttcgcccccgtgcccaagagcgagttcgagggaattgaccccctccaggtccagcaggcccccttcttccaacaccccatcggctgcggacctttcatggtggaagaggtcaatatgaagaactacaccatcctggcacccttcgacaaatactataacggcgtggccgacttcaagatccagcttctgcccagcgccggcgactccgatcccaatgtggtcacccgcgccaagtccggcaatctggactacggctacaccaagatggttgcagacgtgcaggccctggagggtacccccggcatcaccgttacgcctatcgacgtgcgctatacccgcctgttctacctcaacaagttcgacaagaaggacggctcccccgcccccttggctgatgtccgggtccgtcaggccctccgctacgccattgacatggagaccatctgtgagactcttttccagggctcggctgtccccgccaacgccctcgcacccgacgccaacctcaagggcggcgacctgaacgactacaactacaacccggagaaggccaaggagctgctggccgaggccaattgggaccccaacaccgtcatcaaggctgtctattactacaccgaccaggccactgtggacctgatgaccgccgttcaggcgtatttggctgacgttggcatcaagatggagtttgagctggtggagggcgatctggccaccatcctgtggaccgctcccgccgaccagaccaacggcccccgcgctgtggattgggacatctgctacgccgccaacgccgccctctcccttcatgagtattacgaccgctaccgtaccggctctcccaccaactctcacacgccagaggacgccgagcttaaccgcctgctcgacgccaccaacgcctccgccgatgtgaatgcgcaaaacgaggcgttcaaggagctgattaagtacgagaatgagaatctgttcaccatggctctctactatcagcccatcttcctgattaccagcgacaagatcggcgacatccaaaagggcaccccgcagttttgcatcaactgggacatccagaactggaacgtacagtgattaccggccgagcccgaaaaatacataagggccgggccctctccgttcagccctgagagactattgatgggaaggggcggcgccagccgccccttcctcttttaaatccgggagggagcttcatgagaaataccgctcaatatattctgaaacgactgctgtatatgatccccatggttctggtcatcactttcctcatttacggtgggctggaactgacgccaggagacgccatctcccatatgattccgccggaccagcttgcgaatgtgaatccggaacaactggaggcgctgcgggagtcctacggcctcaacgatcccttcctcctgcgctacgtgcgctggctgggggaactgctccacggtaatttcggctattccattaccagcggcgtgcccatcaaggacatcctgctccagctcttcccggccacgctggagctgtccctggcggccctggccatctcctcggtgctgggcagcatcctgggcatcctcagtgcgctgaagaaggggtctattggagacaacgtgctgacggtgttcggcatgatcggcgtctccatcccccagttcttcttcggtatgctgtgtatcctcgtctttgcgctggactgggcgatcttgccgattggaggccgcatggcgccgggagagacggggatatggaaccacttcaaatatctgattttgcccgccagcgtgctgggaatctccctcaccgccggcgtcatgcgctattcccgttccagtatgctggatacaatgaacaaggactacatcaagacagcacgggccaagggtctgccggagtggcgggtcaacctggtccacgggttccgggtggccctcacccctgtagtggtgttaattggtttccgtctgcccaccctgatcggcggctctgtcgtcatcgagaccatcttccagtggccgggaattggtaacgcctttaagacggcggtaacggggcagaactacccgctggttatgatgatcgccctcttttcggttcttgccgtgctcatggccagcttcctggtagatattctgacggcggtccttgacccgcgggtcaaactggagtaagggggaaacgacatgaacgctgaactgaccaacaccagaaagcgtacccggctggaccggaagtttgacaggctccgggacgccgaggaagcgggcaagctgggcaagagcaagaccagccgtgcggtgcgcaaaatgctggagaaccggctggccgtcattggactggttgttttcgccattatcctgatctcctgcttgctggcgccgcttatttctccctatgaccctttgaccaccgacctgcgggccatgacccagccgccgtcgctccagcacctgtttggcacggataagctgggccgtgatgtgttctcccgtaccctgtacggcggacgcctgtctatcctgatcggactgggttccgccctgggcgccgccgtcatcggcgtactgctgggctgctacggcggctataagggcggactatttgataagatcgtgctgcgcctgtccgagatttttatgtccttcccgcaactgatcctggtgatgatgctgggcaccatctttggccggggcctttggaacctgatcttcatctttattcttaccggctggggcggcgtctaccgacaggcacgagcgaaaatgctctccttgcgggaggaggagtatgtgcagtccatgcgggcctttggcctaagtgattttgtcatcgcgtacaagcacatgctgcccaacgccatcggccccgtggtggtaaacctgacactctccaccgccatgttcattctggatgaggcggccatgagctttttagggctgggcgttccgcctgagatcgccacctggggcaatatcctcaacgccgcccaggacctctacgtcatgcagaactactggtggctgtggctgccggtgggaattgtcgtgtccctgttcgtcatcagcatcaactgcatcggcgacggactgcgcgattccaccgaccccacccagcagggataagggagggagcgatatggaacagcaagccatcatcaccgtcaaggatctgcgaacctatttttactccgacaagcggtgcaacaaggttctcaacggcgtctccttcgaactttataagggacggaccctctgtgtggtgggggagtcgggctgcggcaagagcgtgacggcctcttccatcatgcagcttctgcccaagctctcccgcattgagagcggggccatcacctaccacagcgagaagggtgacattcggatcgatcaactgccccgcaacggcaaggaaatgcgcgccctccgcggccgggacatagccatgatctttcaggacccgatgaccgccctcaacccggtctacaccatcggattccagatcggggaggatctgaagtaccatacggacctggacaaaagatcccgccgtgcccggacgctggagctgctgacacagatggggatctccaccccggagaagcgcattgaccagtacccccatgagttctccggcggtatgcgccagcgggccatgatcgccatggccatgagctgcagccccaaggtgctcattgccgacgagcccaccactgccctggatgtgacaatccaggcccagatttttgaactgatggaaaaattgaagcgggagcacgacacggccatcatgctcattacccatgatatgggcgtggtcagtgagctggcggacgacgtggcagtgatgtatatgggttccatcgtggaacggggcagtgtacgggaggtgctcaagtatcccgcccatccctacaccgccgccctgctgcgctccatcccgatccttcacaagggcaggggacagaggttggagccgatccgcggctccacacccgacccatatgaccggcccaagggatgccaatttgccccccggtgcgatttctgctgtgaaaagtgcaggcaggaaatgcctccagaggtcccggtgtgtgatggacatgcggtacgctgctggaacgccgaacaggtctacgccggacacagagaggaggtcgaagccgtatgagcgagaaaaaagtgctgctggagctgcggggggtgaagacctttttcccagttcggggcggttttttcaacaaggtccgggaccatgtgcaggcggtcaacgacgtggacctggacatctacaagggggagactctggggctggtaggggagtccggctgcggtaagaccacactgggcaaatccatcatccaactggtcaaggctactgatggaacgatgatgtacgatttcggcccccagcacggcggtaaaaaggacctgcggcacttgaacagggaggacgaacaggtcctgcatcgccgcatccagatcgtttttcaggacccctattcctccctgaacccctcttttacaatttatcaatctttggccgaccctctcaggcatttcggggtagtcaacaagacgaatcagcgtgcactcattgccgacatcctggaggcggtgaacatgcgcccggagtacatggatcgctatccccatgagttttcggggggccagcggcagcggatcgggatcgcccgcgccctgctggtccacccggagatggtgatctgcgacgaggcggtctcggcgctggatgtgtccatccaggcccaggttctcaatctgctgatgaggctcaaggaagagctgaaactgacctacatcttcattacccataacctgtccgtggtggagtacatttctgaccgcatcgcggtcatgtacctgggacggatcgtggagctggcctccacggagcagatcttcgaaaacaccatgcacccctacaccgaagccctcctctccgccatccctgtggtggacccggataacaagcgcagccgcattgtgctggagggcgatgtgcccaacccggtccatccgcccgaggggtgccacttccatccacgctgcaagaattgtatggatatctgcatgcacaaaaagccggaactgaagcgccatatgattaacggtgaggagcatttctgcgcctgccacctctatgaccagaccccggccgggggttctgacgattgaggggtggatatatggagctgaatttggcctcgacctgtgatgtgctggtattggggtctggtatcgcgggaatctctgcggcgttgaccgctgcggagtccggtgcctcggtgattctggtgtgcaagggcaggctgttttccggctccagcttctaccccgggacctggggcctgggtctggtgggacccgcagacgaagcggatgaggccgacctgatctccaccatcgaggacgtgggctgcggcatggcggacgatgccttggtaagagcacttgtgaagggcattcacccggccatcgaaaaagtccgcagcatgggtgtcaggctccgcaaggcggacaagggcggacagcaggagtacatcccttgcttcgaccataagcaccgggactggaacgggatcgagtttgacagcgcccgggagatcttttcccaaagactggaagagctgggtgtgaccattctttccggccgggagacgctggaactggtccgtgcggacggtcgggtatgcggcgctgtgattacggacggggcggaactgcactacctgggctgcaaggcccttgtgctggcgacgggcggttacggaagcctgtttcgtcaccacctttgcacctccgacgtggaggggctggggcaggcattggctctggaggccggctgccggctggtcaatatggagtttatgcagatcatgcctggctatctgtcgccggcgtatcagaccatttttaacgaaaagacatttcgattcaccgatctgcgccgtccggacggggccccactgctggagggggaaacggcttcgttgctggaactgcgcgctacccacggccccttcacagcgcgtctgccctccaaggcggtagacttggccatctaccgcgcctgtctggaggataaacggggtgtgagggttacctattcagatgaaatgcgccatagccccccggagtttgtgaaaacctattttgattggctccgggaggcaagaggcctaactatggaagacccgatccaaattgggatgttcgctcacgcggccaatggcggggtttggatcgcccccgatacctctaccggtgtacccggcctgtttgcggccggagaggtcacagggggcatgcacggggccgaccgcattggcggcctttcaacggccaacggcctggtgttcggtggtaaagccggcagttcagcggctgctgcatgcaccgcaatagaggaaccgcccaagacctgcctctttaaagctgtagcggcggctgactgtcggaaggtatttgccgacttgcaggacaccatgttccatcatgccatggtagagcgggacgaggccggactgtctgccgccctggagcgggtgaagggactgagaagcgctttgatcttaacgcccacagacaatgtggacgagattgtaagaacacgtagacgggctggacagctttgcaccgcccaatgcatcctgaaggccgccctgatgcgccgggagagccggggcgcccattatcgggcggaccatccgcgcgagaagccggcgatggcaagacccatctgtgtgacgcgccagggaggagcaatccaagcccggtttatcgaggaggagacgaccccatgcctgtgacagaacaagagattcggcggctgggagattatgtgggtgcaacacccgccccggctgactttgatgccttttggagcaagcggatggccgaggcggatcaagtgccgctggattttgccgtgactccatccgaaattccgcccttccatacctgcgagtacctggacttgtggtttcgcgggatgggcggtgcccagctctatgccaagtatgtgaaacccagagcggcccgcccggttccattggtcctccagttccatggctacccaggggccagccgaagctggctggagcagtcctcctttgcgggcatgggctgtgcgctgctggccatggactgccccggccagggggggaacggccaggatttgggcgggttcgcgggcaccaccgtcaccggccatatcgtggcggggctggatgggcctgtggaaaagatgtactatgtccgcctgcatcagaatatccgcatcctctgccggatcgtgcgggagctggggggcatcgaccaaagcaaggtctttgtcaacggcgcgtcccaggggggcggcttaggcctggcctgcgccgccctcaacccgggcctggtgaaccgggcggctatcctataccccttcctgagcgactatcggctggtgtgggagctgggggcagacctgattgcctatgagggcctgcgctactactcccgctggtttgacccggacgggacgcggcaggacgagtggtttgccaagctgggttacattgatagcaaaaactttgcccatctggttcgctgtcccgtcctcttcggcacagggctggccgacgaagtgtgcccacccgcgacccagtgcgccgtctataataacttgaactgccccaaacgcaggtatctgtttgaggggtatggacatgaggagattcaggactttgacgacctgatcctggacttcttcggaagggaggcggcggagctgtgacgattgcggagcaaaaggcagcctgtgagacatatcagggcatgactgaaatacccacagattttgaggccgtatggcgcggccgatgggccaaagccgccccggcgggggaggtcctggtggagcgcctgcctttccaaaatgctcaagcggcctatcaacagtggtccgtccctgcccccaacggccgggagatccgggccagatacatccgcccggcgcgggagggggccttccccacggtgctcatgttccatgacctgggccggggggttcgaggctggcaccacatgacccgctttgtggccctgggatacgccgtagcagccctggaaaaccaaacctccgtggccgattggcggcgtgattgggcggcattatctctggaggaccgatatttggacgccctgacgctggcccacgcggccatcggcctgtcgtccaccgaccccgcccgtttgatgacttggggcgaagggttcggcggtgggctggcgatagttgcggcgtctctggtacccggcgtgatccgctgtgcggccctgaacccattgccgggtgatctgagggccatgtgcgatggagcagtcgggacggatagggctgtgctggacggcctcgaccctgtcagttttgccgcattgctgacctgccccctgctgttgggcacgggacttctggaccagacggcgtcgcccaaatgccaatatgccatcttcaatcgggcacggggacccaagacgcacttggtctaccctaagtatgaacacgaacgaatcaatttttttgagaatgaactgctgaaattcttccacatttgaggtgacgcatgctcagattaggaattgcgggaatcggcgccattgccggcgattatatcggcttgattgtgggcggaaaggtccgggatgtggcgcttacggcgctgtgcagccgaaatgaggcgcacatccgagaggcagcacagcgacatggccttcaggccgccgcatttacggattatggcgctatgctcaggtctggccaggtagacgcgatactcatttgtactccccacgcacagcaccccgaaatgacccggcaggccctagaggcggggctgcatgtgctggtggagaagccggttggtattttcgccgacgaggtggcggaaatccttcccgtgctggcggaacggccggaactggtctgcggcgtcatgtataatcggcgggcggctcaggcctaccgtcatgtaaaaaatttggtccagagcggtgaactgggggagctggtgcgctgtagctggattatcaccaacctctaccgaacggaggcatactatacctccggggcctggcgcggtacttggcagggagaagggggcggactgctgatgacccaagcctcccaccaactagaccttatgcaatggatctgcggtatgccggtttccgtactggcccgctgctccaccatagggcggcccatccaggttgaaaatgaggctgaactttttctgacctacctcaacggcgcccatgggcattttattgcttcagcccatgagtgccctggcaccaatttgctggagatttgtgggacgaggggccggatttccgtccgggacgatagcgaggtggaaatcatccgcctggaggaggacgagcgcaccttcgcaaggtcctgcccgtccccctttgaacaggtctccgggacggtggagcgcttgactttcgacgacagaaacaacaaggcgcagcaggcggccaccatacaaaattttgttgccgctgctcagggggccgggccaatccaatgcagcttggaggaaggtctgcgatccctccagatcatccacggcgcgtatctctctcactggatgggccgcacggtcacactgccgggggatgaacgggtgttttgccgcatccttaatcgtacaggagcatcaatggccatagggcacggccctctataaacaagaaaagagggggccggcggtattcttttttataacgacatcattaaactggatgtgattccaatgggctgataggcggcatcatacatattatcgacagttgcagtgccctaaacttgaaaaggagattgccatgaaacaacataagagactgccgctagcacttttgctggtgtttgcactttgcatccagactctgtcgttcaccagcgcggctgctgccttggctgaccctgagccggtgttctcggccagcgatatgacgttttccagtggcacggatgccgtcgctctcccccagagcgctgtcacgcaactctctgggttgtcgagcggcacaatcatcgtggacttcacccccacggcgatgtccacggccaactgcctgttcagcttgagcaacagcagcgtgactgacgcctactttaacctttacattgacaaccggggcttcctgggcctggaggtcaggaatcatggggagacccgctatgtgaatctccagggtccggcagaggtcacgcgcaatacccggcatatcatggcgctcagtgcggacccacaggaaggctacaagttctattttgatggcgacatggttttccaaatgcctgtggccctttatgagctatgggagtacgactaccggttcatgtccacagtgaattccgccgatgtgggctatatgggtgcaacctatcggaacgggtcattcggatatccctactacggcaccatcgacagcgtgcgtgtctatgatacggctctggcgcaggatgttctcgaggcagaaacctacatagagaaggactctggaatcatcaggcaggagaatgtgttctcttttgaggattggaacacagagggcatccgaatcccctccattctgcggaccgacaaggggacgatcattgccacgggcgatatccggttcggcgacgccgccggagcgagcaacgatcctcccaacaactgcgacatcggcatccgggtcagtagcgatgacggcgcaacctggagccaacccaaaatgctgctcaactttcttgactaccccaacgaaccccaggtccccatgaaaacggacagcgcatcttactgcgattcgctcctcgtcaaaggtcaaaacgggcgggtcttcttcttctgtgacgcgatgaccggaaacgtccgtgcgccctatgcagcggcctctaccggctatacttctgacggctatctgatcctaaaggactcggctggcacccaatatgagctgcacgaagatgacgggacggtgtatctaaatggggcggcaaccgactacacagtcggacctgatttcaccctttataaaaatggacaggaagctggaaacattttttacaccaactacggaacctacgacgcatccgcagtaccgcgcaaaacggaactgcgggtcatcaatacggtcttcctgatcatgtgctacagcgatgacggcggctatacctggtcagatcccaaactgatgaactacggctttaagaccagtgatatgaagcactttggcacagcccccggcattgggatcgtcatccagaccggcaaataccaaggccgcatccttgtgcccctttactataacagcaattctttcagcggtatgagcggcgcagttctttacagcgatgacaatggggcaacctggcacctgggtgaatctccaaacgacgctagagcggctgcgggcctttcaaaaatcggtatgggtgaaattcaaatcgtagaaatgccaccggagggtgatgatgtttctacccagctaaagatgttcgtgcgccagtcaggcggcgtattaatcgctaccagctatgatggtggccagacctgggcgcccgatatgccgagggacccgacgctggtggcgcccacaccctatggaggctgccagcagtctgttatcaactatagtcatccaattgatggaaagcccgccgttatcttcgccaatgcggcagccaatagccgctccaacggcacgataagaatcggcctgatcaatgagaacgggaccaattcagaggggcgaatcaactacacgtttgattggaagtacaaaaaagtaattcggtcgggtgaatttggctattcctgcttgatggagcagcccaatgggaatattgtttgcttctatgaacaagagagtcggcctgacaatatccattccttggtcttcggtgaatacacactcgactacatcaaggacatcaaacctacgcctgatacccctaatttggtatattcctcctcagaaaaggtgttgccgctgtctgacggcacctacaccccaatcgggccggaactgcccagtattgctggcctgcatgagggtacaattttggtgcgctttacgcccacaagcaccgacagcatctactcattgattggggtcagcaatggtcagacggggaaccagaactcctatttccacctctactactccaacgcgaggctcggatttgagatccgcaggcaggagggaggagactttgaaaaaaactcggctcctgtgacgattgaagccggaaaggagtattgtgccgcctttacggctgacccggactacggctaccaactcttcctcaacggggagatggttctggacctgccgctgtcagaactgacggcctcctctggctatggcttcatggctgacattcccggtattgacagcggataccttggcatgacgcgcaggcaggcgccctccgggcagccagcagcctttgaatatccgttcacaggaaccattcataatgtccaaatatttgacggcgtgttctctgcggaacacatgaaacaggtaacctatgtggcgtccagtggttcgaatgtctactccaacagcggtgtaacgattacaccatcccaaccggtccaaattgacgacgacagtgtgaccgatattgccgccatgcattcgggcgccattgtcgtggagtttaccccgcagatctcgtcgatacactccttgatcggtatcagcaactctacgacagccaattctcattttcatctttatgttggtggaggggtgctggggtatgagatccggcggcagaacggcggagattttgtaaagtcctctgctgccgtggatatgacctctggtgagaaacacatcgcagcctttactgccgatcccgatacggggtacaagctctttttcgacggggaactggtacaggtgattccgcccgcagaactacccagcacaggatatggctttatctccgatattccgggtatcaatgccggttatctcgggaagacagctcgaagcggaaaccagtatccctataatggctccattgaaaatattaaagtatttaacacggatatcccggatgatacactcactgcctggactttaagcggtggcttctaattgatgaagtcgcattgcaaaacagctccccaataattttagaccatagattccgaacgaggagtatcatacaacttgaaccgtgatatgcacatcaattttatggattacagggggaagtacagtgatggagctggccatggcgtaccacgagtgccgtccggtaatcacgggagagaatgatggtgaaaacctgtcaatgattgactgacagacaagttaattatcgtcaaactcacatgttccagcggcgtttgcttcaagtgtggctgcacgaaagggtgattgggccgacaaacgcgtggatgtaggaaaatagaacagagtgcaggtcaagaattggcctgcactctgttttatattgtatattagattcattttgcgcaagatttgtggcgaagccatccaacgcatgaagtcattctcggtgccttcatggcaaaccagtgcgtgatgagaggcggaatgtttcccacctgaactgaaagtgagtggtaatgacaatgaaaactggaaatccacctgccgaaaccagtaacctccgtcccaatcggttaaagatcagctgtatgggaagatgtatccctcaatcggcttagccggaacaacagatgtcaccctgagccgcggttcctcctgccccttatactgctccccgtatagaataccggtcaccgtgacccaggaatcgctctccagttctgacacgttgccgtaggtgcagaacaggccgcagggggacaggtccgccacgcagcaggccatgaccagccgtgcgggaacaaactcgttgtccgccataaccggcgtgtttttgtagacctggccggtcatcgttacctgaaagccctcaagctgctctatgtccgtataaaatacgcacagccagtcgtagaactcctcattgctgactgtgatggtttgctgcctggagttatatccgtggatctcaaggggggcgccataggcatccagggtcgtatagccgtctgcggatgcctctgcctgggcgggcccctccgcctcagcatcctcctgattggacggtatggggcttccggtggccggtatgccgccgcccccgcctgcggcgccgctgaccatgcttccattcagcagtccggcagaatcggagatatctctgaggcccacggtatcgtgtggcagcagcaacagcagaagcgggatcgccagcacaaagcagtgggcgatgtgttttcggtattgaatacgaaacacgcgtcctagggaagaaagggcccacaccaccatcaccgccgcactgaagcagagatagggcgccagctttggcgtcacataggagaggtaccgccctgaacgcaccagatacagcatagcccccgcaaaggccaggtagcagctgatctcagccagggcctggctgttccagcagttctttgtcatagcaggctcctttccagcccggtggaaaatgccaggaaaacgaccattccgcagatacaaaaggaggtcaggcacaggcgcaggacgaacttacgcgaaaagccgccggagagcaggatcagattcttgatatccatcatagggccaaataccataaatcccatcagggcccccatggggaactgtccggcaaagctcctggcaaccaccgcgtcggcggaggagcaaagagagagaaaaaatgccattcccatcagcaccaggagaggaaggaacagcccatccccgccgttcccccacggaaatgacctgtccagggtctggaacagggcggataccagggcgcccagcacaaggtacttcccaacactgaaaaactccgtttgcgtatggcggagatagagggagagctttccgccctctgctgcctgacccacagaacagccgcaggcgcaggaaaaccagccggagccggacgggctcaagccgttctttcctgctctggaaaaggtaagtccgatcagcaccgcacacagcaagccgagccccacccggcacaggacgattctgacatccccgctgaaagcataccaggtgctgagaatgaccaccggattgatgaccggcgcggccatcagaaaggtaacggcggcagcaggggggacgcccttccgaaccaggcttcggaacaccggaactgaggcgcagtcgcacacgggcagacaaaagccggccaaggctgcgaacaaaaggcctcccgccagatgctttgggaagtgctcgtggagccactgttgtgaaacgaatatctggatggcagaggacagaagcacgccgatcagaagaaacgggaacgcctgcaacagaataccgagaaatacattgaccacggcatcagccaagttccccccggcacctatcaccatgcgcagggtcagatatgccgctgtgaaataggcaatccccagcaaaaaccaaaaggctggctgccgccccggacgcagcatggcccgctccaccgtaccgaccgagttcagcggcagtaccttgacgccgggattcagttcccgcagcatccgtttccggttcttaaactgcgatacaggtccccaattccgtaggacgatgacatcactggcggatatctgttccagcgccattcctccggtctgctggagcagggcatccagtttggtggaatcggccaggtacagcatgcgctgaagttggcagaagtcccctggtgtacccccgtcctgtttctttgccgggggaaacagtgtctgaaggacagagatcggcagcgtcccgttccactctatccacagttcttccggatcattgcgaagcagataatcgtagatctgtttggagacctgctgcatccccgcgccgctttgcagcttccgaacaggaaagtggaggagatccaaattccctctgtcgattaaatcctgttccagtgcctgctctccctgttcaaactggatgcagcagagcgagtgtccgctctccaggcggcgggagaggagctgattcaacagtgaagtttttccgctgtcgagaaagccggtgaccacatagaccggagtatattccggcatcctcaatcagcacaccccctcaaaaaccgccgtgatctgcgcccggttcaggtcgtgcccgatcacacacagctcgtgctcctggaggtttgtcttttcaaaacgatgctcccccggcagaaactgcacattgagaaaccccgtctccgtctccacaatgccttttgcccgcaggacctgtccgcagcactccgatcccaggagccggaggcagcgccccaggccttccggtgaaaacacttggggcagatggagcgtcatggtatcaaaggtgtcatccgcgccgcccctggcatgggggtgacagcagcaggcatggccgtggtggtggtgatgatgcccacaggaacaggtgtgcttctcatggggctgcgcatccgtcggctccgtttctttggggaggctcagaatttccgcagcggtcaagagcttccatggctctgccagaacctgagcggatgggttcaactgctccaccaactccacagccttcgtaacagcctcgggaaacagctcggtccggttgagcaggatggtgccagcgcttctcacctggtcctcaaaaaacgccccgaaattctccaggtagctggcgcaccgctttacgtccactaccgtaattttttgtgtaatgcgggcagaggttgcgaaacgccggtcccggcaggcccgttccacatcagagagtttgccgactccggaaggttcgatcagcaccacatcggggcgataggttttcagcagcgaggccaacgccgccgtaaaatcccctgtgagggagcagcagatacacccggcgttcagcgccaggacctgataaccgccctcccgcagaagcgcggcatccacgctgaagtctccaaagtcgttctcgatcagggcgacttttttgcttttaaatgcttccgtcaacagcttttggatcagggtggtcttgcccgctcccaaaaagccggaaatcaaatacatatcagtcatcatgttctcctttgagctccttgcgccccgcccggcccagccgggcaaacaatggttttagaatcaaaagcagcagcaaacaggccactcccagcaggacgatggtgccgccgggcttcagccctacgtaataggacaggaacagaccccccacggtgaaaccctccgcaaaggcgatggaccagagtaccgtctgcttataactccggcccagctgcatcccgcaggccaccggtaccaccatcatggaagagacaatcagggcccctaccgtccgggcggcaattgacactgtgacagcgatcagcacggtgaacacactgtttatgatgcctacggggattccagacatccgggcggcgcgttcatccagcgccagataaaacagttctttgtacaggaacaaaaaggccagtacaatgattccgctgacaacagccaccgtatagagttccccgtcgctgatggccacaatgctgccgaaaagaaagctgttgaagctggccgcgctgcgcacaaaaccggataagacaccggccagtcccaccccggcggacaggatgatggcaatggacatctcggcgtaccggggcagtttcttccgaatggcctcaatcccgaaggccgcggctacacaggctgccgtggcccccagcaccggattgatattgaaaagcaacccggccgccacaccggccagagaggtgtgggacaaagcgtccccaatcatggataaccgcttgagcacaatgacgatcccgacacaggggatgatcagtgccagaaggacgcccaccaaaaaggcccgctgcatgaagggatattcaaagatggacattgcgttccccccgtctctcccgcgtcatatctgaatggcggtgaagccccgcccgctcccggcgcacctgtccgggcgttagttccgccagggtaccttcttccaggcagtacaaggtggaaacatagctgcagatccgatccacatcgtggctcaccatcaggatggtgagcccatggtcccggttcagcccggccagcaggcggtaaaagttctccccgctttgcaggtccatgccggaggtgggctcgtccagcagcatgacctccgggcgggagatcagagccctggccagcaacacccgctggcgctgcccgccggacagggctccaatcagccggcgcccatagccggccattcccaccaattccagggcctgccgcacccgctcccggtgctccggcctcgggaagcggaacaggccgatctccccggacaggttggccagaacgacctcctccacggaggcgggaaaatctgtatggcgggccagcccgtcctggggcacataacccagccttctccaattccgaaaccgggccgtatcctggcccagcagccgcacggcgccgctgctgggggagagctcccccagcagcagttttaacagcgtgcttttccctgcgccgtttgggccaatcagggcggcaaatccgccctggggcagcccaaaggaggcgcaggagagtaccggcgcctctccgtaggaaaaggagagccggtctgcttccaatgccatcatgggaccgctccttctacgacagagcgtccttcaaagaggccaggctttgctccataactgagaagtagtcctctcccgcggtcaactgctcgtcggtcagtccctccagggggctgagtgtttccacgcgggccccggtggcgtccgcgatggcctgggccaccttggggctgaccaactcctcagagaagatcaccttcacctggtgctccgtcacaaagtcctggatctgcgccatccgggcggggtccggctcagagtcaggcgaaattccctcgatccccacctggttgagcccgtaggcgtcgcacaaatagccgaaggcttcgtgggacaccacgatgtcctgaatcgccagattgctcagtccgtctttgaacgcctggtccagttggtcacaccgggcgctccacgcagcatagttggcctcgtagtactccgcattcgccgggtccgcttccgctatggcgttcttgatgttctccatctcccgcttggcattcagcggagagagccagacgtggggatcatagccgcccccctcttcatgctcgtgctcatcctcatgttcgtgctccgcttcttcctcgtcctcgtgatgatggtggtgcccctccagcagcgcaatgccataggatgcctccaccgtcaccaggctctggttatccagagaggccagcacgtcctccacccagtgctccataccggcgccgctgtatacaaacacatccgcctgctccaaagccacgatgtcagagggggatggctcccagtcatggggctcggtgccggcagggaccatgttggtcaccgtgaccttatccccaccgattttctgagcaaagtcatacatggggtagaagcttgccatgaccctcagagatccctccgatgcggcagatgaaggctctgcgggtgtttccgcaccggccatggggatctgcggcttcccgcaggcggccagcagagaaagcgacagggcggtggacaagcaaaatacaaggaactcttttaattttttcatgctatagtaacctccaaatcagcgtattttccggtttttgggcgcaaaaaagcaaggcaaaagcgcccatttaaaaatgggcagactttccccttgcttggaggtcgctttaattgttcagacgaattttcagtgcagtcaaggtacaggaacgccggtccgacagggaaacaggcagcaaagcgcagagcagcaggagcatcgcgcccagtccataatgggcagagggccccagcccctctgagatatgccgcagggcggacaggcaggaatgaatctcatggcagacggcgcagtcggtgccggtgcagtcgtggtcggcatgactgacaacgaacagggcggacagagagaacacggcaattaggcacagcgccaaaagcaaggccgccgccctgcttttttgaatatccgctttcatctctgccgcctcctctctgcttatcactttccacagtcgcagcaatgtccatataaaacggtatgccgggtatctacttcaaattggtggtcgctctgaatatgccgggtcagttcctctagatgggagcactccagaggaaatgcccgtccgcagtccaggcagaccatccgcccgctggaggggagggctgcttcccccatatagcggtagagtgcccggttgccatccccagagggaattttgagaatcgtgcccgcctccaccaagcggtccaacgcacggtagacagtggctcggccaactttttcctccacccccaacaatccgcgccagaccgactctgcggtaaatgcggtatcctttttcaaggccaggtattcgagtataagagtttgctgtttggtgtggtatcggcccacagagctacgccctctctcttttaaattgagaatgtttttcatattataaaacgagttaataaaaaatgtcaacatcatttttaggggatatgtttgttttatattgctctaaatacaaaatatagcctaatatataacatataaaattgcgtaaaaaccaaagagttggataaaaagcctttctgagcgaaatgcttcaaagaaataaaattgagaccaatacaatatggtttggcctacaatcgtccccggtatctgtgtgattaagaagccgtctgctctgaatccagggcagacggcttctcaattacagactgaaaagtatccttttcattggattgtttactactccaagccgtagaaaaggtatcatattacattataatttagttttattgaaagagcaagccagaccatctgcttgctactggtgaattccttctataatttcttgcaagccgagggttttaaacgattgaaccaaaagaagacgaacttgggaaactattaaggagacgcaaatatgaggggacatagaatcattgccgtcgctaatcggaaaggcggtgttggaaaacagccgcctgttaaaatctggcctataccctcatggaaagaggggcacatgtttttgcggtcgatcttgatccgcaaatgaacctgaccacattctatgttgtcaatggaggcgaccttcctgtcaataatatcaatgaccttctgcctgtccatgacgattccatccacagcgatgggccaggcatccctgttgggagtaaggtactggctcagcagagaaaggttctgttgaccgaaatggggaccgaaggctttctgcgaattatccttacgccgctcaaaccgctgtacgattatatcatcatcgacacgaactgagcgaccagtccgctgatgatcaatgctcgtaccgctgtggacggtgacggcgcgcatctcttttgcttccgcttgacattctgcatacaccctgatataatcaaaataacaagtgaatatagttggtacacaggtgcctatccgattgtgatgggtgaaaagggaagccgggtgagaatcccgcacaaagccgttgctgtgttggcggagtgcctctctgctatgtcactgggatgtttgttccgggaagacggagaggtgcgtttgaacgtctgagtcagaagacctgcctgtgtataacgcacaaaaaagcctccccggacctgggagggtgcagtttcaaccacagtaggaacctgtggaatttgttgctgtatccttcaggatacagtttttttgttgccgaattcacttgtccctcctatttcgtgctgctccgcacgagacacgggacccttctgcatgtcctgcgtcattttggagcaaccggctggaagaaaagggcgcataatatcgtgggtaatattatgtgttcttccagccggaacaagagaagcacatggcctgaacccgatgcaggggtgggccatgtgcttttttgaagctcgggaccgtttgaaagcaaatattgtttaaagccggtgagctgggtggtacaggatgtgaagctgtccgctctcatcggaaaaaaccttggcctccacctcgtatacacgccggataaagtcctcggtgagaacctcctggggcctgccgcagcccacgatttccccgcctttgaccgcatagagacggtcgcagtacatggcggcaatattcaggtcgtggatggccgagatcacggtccggtccagggatttgacaatgtccatcagttccagctggtacttgatatccagatgattggtgggctcgtccaggatcagacagggggtctgctgggccagggcgcgggccagaatgacccgctgctgctccccaccggagagggtggaaaaggaccgcctggcgaagccggacatgcccaccagctccagcgcctcggccaccagccggaaatcgtcggcgttgtcccggtccagggcccgcttgtggggggcacggcccatcatgaccacatcctggacggaaaactcaaagttataataattgtgttgagctaccacggcaatgcgccgggcggactcccgatagctgtactggtccagatcccttccatccagcagcaccgcgccgccggtgggcttcaacacccggtagatgcatttgagcagagtactctttccgctgccgttggggccgatgatccccaccagctcccgctggcccacttggatgtccacgccctttaaaatggcgcttccccccagaacggcctgcacaccctcggtgcggatatccatcagtcgccacctccaaagccgtatttcttccgggccatcaggtagatgaaaaccggcgcgcccaccaaggcggtcagcaccccaatggggatctccttgcccgggagcaccacccggcagagtacatcggaccacagaaggaagattgcccccagcagggcgctgatgggaatcagctttttgtggtccgttccaaagagaatgcgtaccatatggggaataaccagccccacaaagccgatgatgcccgccgtatagaccgcaaagcccaccagcagggacgccgccaggagatagacaatccgccagcggtgaagatcggttcccagggtgacggcggcctcgtcccccagcagcatcaggttcagggtgcggtactgggtccagaaaaagagcgccccgagtaccgacaccgccagcatccagagattggtgtcccagcttgcggcggccaagctgcccatggtccagcggaccaccgcctccagcgcgccgctgctggtattgatgacgtacaggaaaaagtttgagacagcggcacagatggcggagagggccgtgccggccagaatcagctttaccgaggtggccctgcctccgatgttggccagggcgatcacccccatggagaccaggaacgccccggcgaaggccaccaggcccacatagccgctgcccaggaaggagcccacccccaccaggatcgccagggtggcgcccagggaggcgccggaggagacgcccaggacatagggatccgccagcgggtttttgacaatggcctgcatgaccacgccggcgagggccagggccatccccacgccgatggccagtaccagacggggcaaccggacaaaccacacgatgtcgctcatactgccggagccgtacacctctgagtcccctaccgggaaatggagggcctcggttactttatagagaatgacccggtatacatcccccattttgagatccaccgagccgaaagtgaccgcccacagcagggaaaggagcagaccggccagcagaaccagaatggcaagccagtatgccggcctgccatggaacacaccatttttcaaatccatggatacaccgcctcaatcagcggcgcgcccgcccatcccgggcgggcgcgccgtgcattactgatacagttcggggtagagatgctgcgcgaagtccagaacgccgtccagggtacgcatgccgctgcagtagacattgttcaggttgatggcgaacacccggccgttcttcactgcatccagactagcaaatgcagggttctcggtgatcagctccaccacctgctctccggcataatcggtatcattcacggtatagccgttgtaccagaccatgaagatggcgtcagggttggcggcaatcagatcctcggcgctgatgttgccgttgtcaccatgcttgcccacggccagctcagcgccgccggaggtggccacgtttccgcccagagtgtcctctccatagacgcggtaggtgccgccctcgtcttccagaactgctacggtcaggcgatccttgtccgccagataggtagaaatattgtccagctctccctggatctcggccaccagcgcctcggcccggtcctgcacgtcgaagatcatgcccagggtcagaatgtcctgacactcgtcggccacggtctgctggtaggtaccggaaccgccgcggcagccgctgttcagcgccatataggtgcccacgctgcgctcgtgccagaagtccacatcgcccaggcgtttgtcggagaaggtggagtaccaggcggcgatgaagtcgggctccagggccagcagatcctccttgctcagcacgcctgtgtcctcgtggtaatcaatttttgcaaactcgtcggccagctcgggggcaatctcaccgtccattccgctggcggccacgatgcggtcggccagccccagagacagcagaatctcaatattgtcctgggcgtaggcgtatacccgctcaggggccttttcaaaggtatactctaccggctctttgttgtagttataggtggtgatggtgaggggatactcggtgcgcttggccccctcttcatcgacagagggtgtgctgctggtctgtaccaggttttcagagggggtggcggcgtgggtggtgtccgccggggtactggcggagcaggccgccagggacgcggtcagcgtcagggccatcagggccgacagggttttctttccaacatgcataattgggctctcctttccgtttttcgagtgcgctatgtacttgccgctttagaacacaaacagcctgctttccatcgaaagcaggctgctgaagctgcccacggtatgtgagcagcttcagacagggttctttctgcggaagatacccgtctgtctcctgatcaagcaggtttcctggcttacggctcgacgcgcgctgcaccttctcaccgcgcattgtctgcacggcaatggtatctgcagcttgctccccgtttacagtgaccggatcgctcgggagtttcacccgattcccttttaccccaacagcagttgggcacttgacaggttattccattgtcttataagcgatttattttactgcaagtctctttttttgtcaataccagtcagttgatatgttccccatagagcagacaagcagagaaaaatctggacggcagcctataggaccgctgagctttgccgtttgaacctcagaggcagccgatgcagttcatctctccgggtacacccactgcgtccgccctgcactgtctgcagtgggtgaactgggggatgtggacacgggccctggcgcgcagcgcctccaggagcgcccggctggggggctcacagccccgaaaatcggcctggggaatgagcggcatgaggttcatgacggcggctcccgcacgggcggcccaacaggcgattccctcaatctccccggtgttgacgccggggatgacgacggtgttgattttcaccgtaagtccggcttctgcggccttggccacgccctcctgctgagcggagagaaaggctgccatggctccggcatccgcgctgccgcccaccgtccggtagacgtgcccggcacagacgacggagcgggtattgacagtgaccgtcagggtggaaaccccgcagtccagcagttcgggcaaagcatcagacagaaccagcccgttggtgctcaggcagagcaggagtccgggaaagcgggcgtgaatcaggcggagggtctccagggtggcggggttggccaggggctcaccaggccctgccacgcccaccacccgcagacggctgtccaggcgcagggcgcgctccacgcggtccagggcagcttcgggggagatgacctccgaagtgacgccgggccgggactcgttggcgcagtcatagcggcggtcgcagtagccgcaccggatgttgcacctgggggccacgggcagatgaatccggccatagcggaagtgggcctgggcggagaggcaggggtgctcagccggaatcaaagcggggccgccttccggcagagcgcttccagcccgtcgtcggtcatcggctccgggatgcagccgccgcggttgtccaggaggacggacgccagggcgcggaacgcctgggcgggtccgctttccggtgcgcagtccacaaccgtccggcgctccagctcggcctggccgatcagaggactcatgggaattttccccgccaccgtggttcccagctccgcggcaaaggcccggagcaggctgtcgttgtccacgctgctgcggccgttgtgtataattccggccagtcggattctaccgctctgggcgtatttgcggataccccggcagatgttgtttgcggcgtagagggccatgaagtcgctggtggtgacgagatacacctcgtcggccacctgctcccgcagcggcatgctgaacccgccgcagaccacgtcccccagcacgtcgtagagcaccacatcccggtcatccagcaggccgcggctgcggatctcctccatggccacgataatgccccgcccggcgcagccggtgcccggctccggcccgccggcctcaatgcagcggacgccccggctgtccgtgaaggcgatctccccggaggcgccggtcttgagctggtcgagaacggtggggatgcgccgccccatcaggctccgggtggagtccgccttggggtcacagcccactaccgccactcgtttcccggcctgggccatggccgccgccaggttggacacggcggtggacttcccgatgcccccttttccatagacgcagatgcgtttcactgatagagcgcccctttcaagatgcggccgttcatgatgccgcggaagatgtcctccagaagatggagggttccctgcccgcccaggtgggggcggggggtcagacagacctcatcaaacaccgggtaatccatgcggatcagcggaatttccagctcgtcggcaccgtcctgctcaaaggaggagccgaacagaagcgccgcctcggagccgcgcagctcccggtagaagtcctcctggtcggagagctcctcccggcgggcaaagcacaccacctccatccccagctcctgctccagaaagcgccgcagaccgtcggcccgcggccccgaggcgaggatcgcagctggcatgccgtagagggcctgtaaatagcggtaggcttttccggctccctctgcaatctgacggtccagctccgcccgggcctgatgataatccagaccgaagcggcgctccagccgactccagagatcgtccgcgccggcggcgccataggggtaatcaagttcctcccacggtatgccgaagtactccttcatggcttgcgccagctcacgcccctttccacggagcaccaggttcacatcggcatagggggcgcggcgcacttcctccagcgtacagcgggagagcacggcgcccagtgcggcctggggggcgagcatagcccggagggcctcaacatcgtcggcggcgtgggggtcatccatccctagcccgatcagattaaccaggggacggggatcagaacggggatagggccggggataaggccgggggaccgggggcttcatcagcgggagcagtgccagccatccagcctccagcccgcgagccgcatccccacggaagcctgccgcctccacatggagcagcggcgcctcatgggggatgcgggctaagacggcggggatatcgtccccaatcatctcactcacacagccgctgaccacgaacaggacggacggttggaagagctccagcgcggagcggacggcccgctccagggaggcctcgccgctgaacaccacgtcgctgtcgctgatgacggtgcaggtctgccggatatcccgcatatcctgggcaacgtggagggacatggagccaaaattgcagcccaccacggagtggagcagaacaacgccgtcctgaattccacccaaagcctgataagctccaaagagcttgcagccgctggccggcctcatacggaatccccctttcgattgagccacattctggaccacatttccttggcggccagattagactgattacagtacagtgggtaatggcggctttggaagggcattttccccagcagaagactgctgcgctccgtcccgtgctccaggcggcggcacatcctacgcaccgtgcggacataggagggaaaggagagggaggtggtttcgttgaccgcggggatcagcggcgcgcccatcccctccaaggtgaagtcgccggtgcccaccaccacatccgcctctgcgaagattccgcgcagcgtctcctctgccgggttcaggaggagctgtgtctccgggctgtagagggcggcggcctcccgtacccgggccagcaggctgtcctccagcgcgggggtgacattcaggtttttacggctctccggggtcaggatgacacagagatgggagaccgacaggccatagtcccgcacataggatttgagctcgaagggagcctgctggatgctgcggctgacgagaaccgcccgggcctgccccaggcggcggcgggcctccgccgtctcctccagggcctgggcccgcgccgccaggacgacgggctccaccgcctcctccatgcggagggcctgtccaatgtcccggtaaaaggtgcagattccatccagtccggcgtagcgtcccgcgccgccgatgtgaaggtatgcggttccgaatttctcccgcatgcgtctggcccagcgaacccgcttgaccagattcagctccgcggccggggcgtgtaccagagaggagaggggggcgctggggatccacgtgttcacctggatcccgcagccgttcaaaaagacctccagctcccgcagggcggcctttccctcgctcccccagcccaccgtctcgatgttgacgctgtgcgggatctgagcggacggctccatcacctgctccaccagggcgtagagcgcctcggtgaagccgcagcccttcagctccatctccagccggttgtcgccggtgatggtctggcgggccagctccttcaggcggttccgggtgtagttcttgtcccggtgggagaagagctccgactggacgcccactaccgaaataccctcccgccgcagctcggcgcatacggagcgcacatcttcgttcagaatgtcgctgatcggggaggggatcaccatgatgagcccggggcggtaacggctccaggcgtcccgtatggcctggcggagcttctcctccccgccgcagatgatgtcccgctcctccagattggaggtcagcacgctgtaaaagggctggtgccgacgccgggcggaatagcggtagtgaaacccacagccccgcgggctgtggaggagcggaagcacttcctgcatctcccccaccgcccccacgctcccggagattttcccgtttacgccaaaggtatgcagcaggccggaggggtacattgcggtcatcagatcttcaaaaaaaggctgtcgcatgcgcatttctcctctctgcccggaaaaagcaaaatcgccggccccgcgtattctgacgcggagccggcttgcagacaggcgcaccggcagggccggcggcctgtggagcagctttcaccggaagcgtccccacaaattcagcaagcaggtttcctggcttgcggctcgtcacgtgctgcgccttctcacatgtgaaacatgcaatggcgatctgcagcacgctccccgcttacagtgaccggatcgctcgggagttgcacccgattccctctaaccagacggagtctggccacttgctgaaaacgtatatgaaggaattatagcacagcccggccggaaagaaaaggggggtgatctcctgtgactgctctcaacgcgagatttcttatacttgattggttcgcccgttacaggcggcgaagagcagatgcggcggtgagccggtgggaatggaatgtgcctgttgccgctaggctccgtaagtagagagcattcggcgccgttagacacatattgacaggccttggacggcggtgtatactgaatccataatttcatatagcaggatatggtgatacgtttgtattgaaaagggaacgcagtgcaagtctgcgacagctcccgctgctgtaacagggacggcccgcttaataccactgggaaaccgggaaggtgagcgaagccggatgatctggagtcagaagacctgccatgtctatcggattctattctttcggcgagggagaattggatgctgccgcggtggatatcgcggtcattggggcattaactgggcatcgctggggacggcggtgccctttttgcatatccaggacaaagagcattcctgttttctaacgacaaaacaggaatgctctttcattataagaccaaagcaggggaccgtccctgttttgcatagaaatttaagagaaggaaagaaggaacatgtatgaaacgactggcatcccttctgctggccagcgctcttgcgctgaccgcagccggctgcgcgggacagaacccggcggcttccacccaaagcggcccgccggaagcggtggagagcggcaagtcctccgttgcctatgtggaggaactgcgcatcggtaccaccgccgccattgacggcgccaacgttatgacggaaaacggtatcttcggcaagctcaactacaacgcggtggtcaccgctccctttgtagtcaccgatgagaatggcaaggttcagccctttttcatgacgggctgggagctgagcggcgacttaaataccattaccgccacctttgccacagatcagggcctcacctggcacgacggtgaacctgtgaccatggatgacgtggtgtttaccttccaatatctgatcgaccgcaagtccagctattgcagcggcctgacagaggtggaggcggtgaatgagaccacggccaccctgacgctgaccgacggcaaggccttcaccatgctcaacagcatggctaacttcgtcacccttcggccggagcatgtgtggtccaaggtggagggcgaatacgccgagtacaccggcgaggacgccgctatcggctgcggcccctacaagctcacaggcgtggacgaggaggcccagagcatgaccctagaggcggtgtcggatacctacatgggacaggagctgaccgtgcgcaagctgaccgtgcgcacctacgacagccacgacgccctggtgatggccctgcgcagcggggaggtggacgccatgtacgactactccaactccctgaacgccaccatggtggactccatcaccggagtggaggggctggatcccggcatgagcgacaaccccggcaactatcaactggtgttcggcttcaacgagcagcccaccgacgacctgatcttccgcaaggccgtgcgggccgcgttggactacgagctgctccgcgtcaccatcggaggggaggacggccagatcccccacgccggtatcgtggcgccccccaataagggctttgacggctcgctgcccgagctggctcaggacgtggacgaagccaacgccctgctggatgagggcggttatgtggatgctgacggcgacggctggcgggatatgcccgacggcagcgagctgaatgtcctcattactccccagtacaacaagacccgtcaggccctctatctgcgcatcgccgaagtgctcaagaccaatctggaggccgtgggcgtgcagactaccatggacgaggagagcgtgcgcaactccgaccacgccaccgaggtccgcaagcagggcacctatgagctctacatcggctatacctctcccggcgtggccatgtatgacaccgccttcatgtacatgatcgggaacaacgggaacaacccttggggcacctgcctgctcccggagtttgtcgccgcctatgaggccaagaagaccgccggcagctacgaggcgtacaacgccgccatgaaggagctgcaagcgcttgccgatgaacaggtggtgggactggctctgtgctgggataaggcctacttcccctaccgtaccgaccactatgagggctggaccaatttccccggctggggcgtgatcaactacaagacctggttctccacccggcccgcagtctaatagacgcggtatgaaaggagcggttttcaaatgaaaaagcaagccctttccctgtttttagccggcgcgctggcgctgagcctgttcggctgctctgcgcagccggcggcggagagcgcacctcagagctctcctgccgaaacggcgggcagctcctccgccggcgtggtggaggagctgcacctcgggaccaccgccgcaaacgacacctttaccacctttgtggagagcggcgcatttggaaagatgtgctataactcctttgtgacagcgcccttctggcagacggggcccaacggcgaggtagagccattccttgttacagattggacggtcagtgaagactctactaccatcacctgtgacttggcgctgaaccaggacatcacctggcatgatggggagcccctgaccatggacgatgtgctgtttaccttcgattataacatcaatgtgcgcaaatccagttacagctcctatgtggaccatgctgagcaggtggatgaggacaccatcaaggtggttttgaaggagcccggcgcctatcagtggctcaaactggtggccggctatttctacgtccagccgaaacacatttgggagaacattgacgccccgaaggactaccgtggggaggatgctgtcatcggctgcggcccctaccgctttgtcagcttggacgaggatgctcagaccagctactacgaggccgtaagcgacacctatctgggccgcgaggtgacggtaaagaaggtttcactccggtcctttgacagcaatgatgctttggtcatggctctgcgcaatggcgaaattgacgccatgtatagctatgccagtcccatcccggccactatggcatcctccatcacgggtgtggagcacgtggagcccggtatgagtgacaatacgggcagctatatgatcatgttcggtttccggaaagggcctacggacgacctgaacttccgaaaagcagtcacgctttccctggactacgagctgctggccgacgccatcggcggtgaggatgcccaggtacccggggtgggggtcattgcgccgccgaatctcggctatgatgagacgctgcccaagctggaacagaatctggaggcagcgaaggccgctctggatgaaggcggctacctggatgtggacggagacggctaccgggagatgccggacggcagccccatggatattctggtttccccccagaacagtagcacacgccgcgagatctacctgcggattgcagaggtcatggttcaaaacctggatgccattggggttaaggcccatgtggacgagcagagcattaccaatgaggaatatgaggatcagctctgcaaggagggaacctaccagatctttatctgctactgcacttccggaatggcgtctcagacctcgtgctattattactttattgacaataccctggatggcaattggggcacctgtgatctgccggagtttgtagaggcgtatgagaccaggcggcaggcgtctgatgagaaggcctacattgagggaaccaagctccttcagcagatcaatgcggagcagtacatcggggaagccctctgctgggacaaggcgtactttccctaccgcaccgacaaatacgaggggtggacgaactatcccggctggggcgtgatcaactgcgagacctggtatagcctgcgccccgttcgttaagcggcatctgaatatgaaaggagtattttccgcatgaaaaaacaagtgctttccctgctcctggccggggccttgacgctggggctatttggctgctccgcgcagacgccggaggagagcggagtaccccagagcgctccggcgcagacggaggggacggactccgccggcgtggtggaggagctgaagatcggtatctgcaaggaggtcaccccccggacgctggcctcggagagcggctccttcggccgcatgaactacaatgccttctgcgccggaacctggctggtgcgggatgagaataacgagatgcagcccaacctgatgacctcctggaagattctcgacgggggcagaaccatccgggctacctttgccacggatcagggaattacttggcatgatggagagccatttacgattgacgatgtcatctttacggtcgatttgatgaacaacaaactcaagtctggctatctctccaagatcaccggcgtggagaaggtagacgataccaccgtggacttccaggtggccgatggggcggcctatttcaccctggggaactccgccgtctttgtgcgtatgtatcccaagcacatctgggagggaatcgaggatccctccggctacaccggcgaggacgctgtcatcggctgcggcccctatcagcttgttcaggtggatgaggaggcgcagaccatgcactatgaggcggttggggagacctacatgggccgcgccctgacggtacgcagcgtgacggtgcgcagctacgactcccaggatgccctggtgatggccctgcgcaccggggaagtggacgccatgtacgactactccaacccgatttcgcccaccatgctgccctccatctcgggtgtggatggggtagaccccggaaaggggatgaacatgggcctgttcgaaatcctcttcggctttcagaaacagcccaccgatgatttggagttccgcagagcggtgcgctatgccctgaactatgagctgctggccaccaccatcggcggtgaggacgggcaggtacccggcgagggcatcatttcccccgcgggtattggctacgacgacagcctgcccaagctggtgcaggatcaggagcaggccaaggcgattctggaggcggcggggtatatagacaccgacggtgacggctggcgggagcggcccgacggaacccctatggatgtattggtcacaccccagtacaatgccaccaaggcggcgctataccagcgcattgctgagattatcgttaccaatctgggggaggttggcgtcaagtgcaccctggatgaggagagtatccgcaattccgaccacgagcagcagctccgggatgacggggcctatgagatctacatctgttatgctacccagggcgtatccttctataagacgccattcctgtatatgttcaatgacgatctgagcatgtggggcacctgcgatctggaggacttcgaccaggcctacaacgatatgctcaacgcccagggggatgaggactatgtggccaaggtaaaagagctgcagaggattgcctcggaggaggtcatcggcattgccctgtgctgggataccgcctactacccctaccgcaccgacaaatacgagggatggacgaacttccccggctggggcgtcatcaactgcgagacctggtataatctgcatccgatcggctgagcaagggccgggagcaggggcggcggagacgtgcgcccctgctctgtatataaaaaggaaggggatacgctatttgtgctttgcgagtctgggaaaacgcctggtggaggctgtttttatcatcttctgtatcataaccatcaatttcatcctcatccggtttatgcctggcgacccggtggtacacattatcggtgaggacgagtatctccgtctggaggcggaggcgccggaggtgattgaggaggttcggcgggagtatggactggacaagcccctgccggtccagtacataacctatctcaacaagacgctgcacctggacttcgggaattcctaccgtaccaagctgccggtgctggagacggttttgttccgcatgcgctggacgctgctgctcaccatacctgccattgtgctctcctccgtactgggcggagggctgggcctgcgggcggggtggaaaaagggcggcctgctggacaccatcgcctcacccattatgctctttctgaataccattccaaccaactgcatggcgattctgtttctgatggtatttgcgttccagatggggctgtttcccatcagcggcattacctccggcggcctgtcggggctggaaaaggcagtggatatcctgtggcacatggccctgcccctgatgatcctggtgatcctgcgcacggcctcctattacatgctgatgaagagtacagtgcagaccattcgggatgaggagtacatcacggtggcccggggaaaggggttctctcagggacaggtgctccgccgccacgtactgaaaaacgccctttgcccttacctgacctccgtatgcatgcagttcggccatattctgggcggctccatgctggtggaagtggtgttctcctggaaggggatgggcaccctcatttacgacgcggtcaacaccaaggattttccaatcctgcagacctgctttttgttcatcgggatctgtgtggtggccttcaatctgctggcggacgtgctgaatatgctcattgatccccggctgagggaggaggaccgccatgcgtaagaaattaaacggccgggtgctggcgggattggccattctgagcgtggtgctgctggtggccctgctggcgccggtgctcgcccctcacgatccctacgagctgggcgtgccctacctgcatccctctgcggagcaccccctggggaccaacgacattgggcaggatatcctcagcgagctgatttacggtacccgcatctccctgctcattggcgtagtctcggctttggcggtgacagtagtgggcacagccctggggatcctctccggctatttaggcggatggacggaccggatcatcatgcaggtgaccaacgtggccatggcgctgccctctctgcctctgaccatcattctggtggcctttctggatgccagcgtgtggaacatcatcctggccatctgcatcaccgcctggacctctacggcccgcatcatccgcagccgggtgcagcagctcaaggccctgccttttatacagattgagcgcaccatgggagccagcggcccctatatcatgatacggcatattctgcccaatctgggagaaatcgtattcatccgtgccgtcctgtcggtgggcagcgccatgcttaccgaggccagcctcagctttctgggtctgggtgtaatcggccagaagagctggggcggcatcctgcattatgcctttttccgcaacggaatcatcaacggctcctattggtggtatgtgccgcccatcctgtgcatctcggtctccgtgcttgggtttatgctgctgagctattacggtgagggctctgcgcggggaagaggcagaaaggagaaagccaatgctggaaattgagggggtttccatccgcttcggcgacaaccctgaggcggtgagcgatacgacatttacggtaggcgacggcgaccgtctggcggtggtgggggaaacgggcagcggaaagagcgtcctgctgttggccgcactggggctgctgcccgcctcagcccgggtcaccggctctatccgcctcaacggccgcgagttgttgggctgccgggagcgggagttcaaccggatccgggggaaagagatcgcctatattccgcagggaagcgggaatgggctcaatccactctataccgtgggccgccagctttgcgaggccattcgaaagcatcagccctgtacccggagagaagcgctggttcaggcggccgcgctgttggagtcctttgggctggagcatggcgcggctctgtgccgcagctatccttttcagctctccggcggtatgcgccagcgggtactgatcgccatggggatcgccgccggggcggatctggttctggcggatgaacctaccaaggggctggaccgccggcgcatcgccttggtggaggatgccttccaacggctgggggagcgtaccctgctctgcgtcacccacgatctccgttttgcacacgccatctcctcccgggtggtggttatgtacgcctcccagcagatcgagagcggcgacagcccctccttttttgccgagcccctgcacccctactccagggccatgctggaggctttgccggagaacggcctgcgcgccaatatgggctttgcgccgccccggcaggacgttgacgcccagagcgtctgccacttttacggccggtgcccatggcgctcggagcgctgccggaaggcgccgccgctgatgacggtggggaagcggaaggtgaggtgctggaagtatgctgattgaggtgcagggcctgtccaagcgataccgcccccgcggccccatggtggtggaggaggtctccttttccatcgaccggggagagacgctggccattttcggtgacagcggcagcggcaagtccaccatcggccagatcctggcaggaatctatccagccaccgccggagaggtgaggatggacgggcagagattgtcctatcccctccgggggcccgcccgaaggcggattcaaatcctgtttcagcatccggaggtggcgttcaatcccaagctgcggctgatcgacagtatgcgggagccttatcgcctgttccatctgccttatacccggcagggactgtgcgattatctggagcgctacggaatttatgaggaacacctggaccgctttccggcggagctcagcggaggggagctccaacggcttgccttggcccgtgcgatgctgatggacccctcttttctggttctggatgagccgacctccatgctggatgtgatttctcaggcgcagatgatccacttgctgcaggaaattcagcaggagcgggaggtgggctacctgtttatctctcacgaccgcgctctatgtgagcgcttctgtacggcgatccgccctctggagggcggaagactgggagaacccgtatgaaaaatgcgccgtccggcctgagccggacggcgtacatctcttttggttagtgtaatgtttttcgcggactggaaagctaatgaaatgcgtgtggactctagatattatccggttttacaatgatttctaagccctctgcctcccagtttatctctttgcttgttactcttagccaattacagaataaaccctttttgttcataacaccagcctgaagtactgttgtatgacgcttacgctatatgggcaccataaaagcaattttctattcatcctcctcgaccggacgccatgcctgtccaaattttacatctcgaaacagcgcggccaagccggtgatctgtttgagtcgtaggacttcatccttgtccatccccaaatgcttggcgatccaggcgtcggaccgcccaagctcatgcagttccttgattatattgctcatcagatccacattatgggatcctctggcacggttgtgccgtatggtacttgccatacggttggagagaggcttgtcgatcactgccactggaagcattccctgctcccgttcatagatatcccggtgttccttcattacgcgccagcggtggaagccatctacaatggcatatagatcctgtttggcagagtaatagcaaacgattggctgggtatatccgtcctccagaatactgaggtagagtagtttcatctccggaggcgctacactgtttggattatatgtattggggatgatcttttcaaacggcacagcaataatacgataggccggactgcgaaacggttcacttgtcatttatgatccccctatacttccgcttaaatagatcgacccgcttctgctcttgccgggtcaggccgaagcccataaagcgacaggtgtggtcatttttcaaaatacaatagcacatccgtttccagcttggaatgtctttggtactcttaatatcatccgtatgatccggaatcggtccaagaaagaccacgcgggattttttatctagtgtatagttggatacaccgttttgttgaatctgatatccatgttcctctaactcacgaatgacttcctcagagagcccgccgcccgtttcgtgccagaactgaatcgaggtcttgaatttttttacataattgttttgaagccgcttgggcagcgtatccagcaggaactttgtgtaggactgccaggtatgcccctctggcagagtgatgctgcgatagcccatggctttggtccgaccatagatcgcaccaaagttggccccccgcacccggccaaccagcctggtccaaatctccggatcaatcacccggtataaattcagcgcatccttggagtaatcattgaacggagaggccacccgcatctggtcgatcttgagccccgcctgataatacagatcatagagtcgattatattcatagccaaaccgggaaatcgcgacccacacatccctgttagaccagtcataaaggggagaagcgcaccacacatccttgaactgcttggagatccaacattctcccttatagccatgtttcttattgacaaatccgctgtacctctgcaacgattcatctgcccgcaatcccaacagacaaacagtgcgtcccccgccatggcgttccttataaaaacgcccaaactgcttagcaaggtcctcctggtgcatccggtagcggtaatgatcgaacggcttatccatattgatgacataggaatagctgggcatgggacgcacccacagttcaggatgcctgtcatcccagggataccaaaacatctcatagctggacagggcagttcgggtagccataggcagacatacccagtagggatcgacctcagactccaaacgctcaaatgtttttgtgacatattccgtcgtcactgtatattgcgcctcaaaatcctgatgaaagacgccgaccgtccgctgtgggtaataagtgcgcttaaaatccagcaggaggttcagaagaagcccactgtccttaccgccgctgaacgaaacgtagatgttctcaaactcgcggaacaaaaaatcaaagcgctcctgtactgcttcatatacgtttttctgaatgtattctcgtttcatatctctctatctcaaaacgatgcaatgttcggtatgattactcttttgaaaatattgtaaaaaatcccccccccttaaatgcacggacaggaaaccgtggtcatgtgtgcgacgaccaaaccagcagatgtttagaagcccgctattcaagacctgctcctattacggtgtccgtgattgcatgattaggagtttgattcggcgcccccaaaagcgagctgcaagtttacagatgaaaatattaccaaaattataacacttttcgacaaaaatcgcaataggaacaggcgccatctctatttgtaagtaagtccacgaaaaggagccaactccatgacggccacaggccgaatttatttttgcctccttggtcgagatgagttaaatagcgtttggaaaatttttgtgtttgccccttgcatttcaagagaaaagttgtataatgaactcaaaagaaagtcctttgtaaagtacaagttttacaaaagatagttctttgaagggaatggttcctgagtcctgcatgggcagagcggcatgcaccttcccgtaaaatttaatatgaatccggcttttgtggcaaatgcgcgacccggttcccgtcagggaccggacacgcatccttgtttctgaacaagggaatcaggtgaaattcctggacatgttttgcagcaggagccgcggcgaaagctgcggggacgtgcaattcaatagctgtgattgtggagtgtatccgttttctgcgaaagcaggtcactggcggtcgtaatggcttagctgggaaggcggcggatatgcgcaggcgggctttaggcccgtcgggacacatcagtcagaagacctactaggagcttacccccaattccttggggctgctctgagaaaaatgccaaatagaaagatgggcacgggatgagtgccctcttctgcccgaaatgggaacaaaagcggacgcatattttgcgtccgctttttattcgcacgctcgggggaaagacggacgtatcggtatgcgtccgtctttttgtttctattgccccaagaggtctgcggggcagccggattgtgccacaagtcaggaggctgttttgtgagcggcaagtatttcaccggtgatcagaagctcagcaaaaaactcattgggcgcaccaaggaagcgcttcgtcagcgaaatgttcagtttgcccagacgcacggtgacgccagcgacgaagagctgctggactatgtccggggtgaggcggcacggcttggaatgacgcccaacgccggggagatcatcggaggccactttatcgcggttcgatttggctgctggaagaatgtggtcacggcggcggggctggtcccgccgaagaagcagaagcccctccccaagcggcagatcttcaaggaggagctccgctgtcaggcgagagagcgggcatacacagagcaacagaacagcagcgagtaatcctgatgaagaaggggatccccttcttccgtcatagggggctacccctatgacgagcctcctttaggaatccagcgggccttcgcccgtttcaaatggccgaagcgcggccgacaactgaatagcggcatcggaaggggataccggcctggggaagcgcgcggggagaggagcgcgccaagggccgaacaacgcggtctgcgtcggggcggacgggagcgcaggaacggggtccggtgcttgcgcaagggcgcgttcacaggccggacaggccgtgacgataagtaacatgggaattttatgcgaactggaaaggtcgggtggttgggaaatgtcttttgattgcggccatgggagcatgcacgcctatggctgctgagtccgtgtgcatgccgcacggggaatcctgctcatgcggcggtcgagcaaaggaagtttaattttgaaggagaaaaagccatgcaaaagatgaaaaacggcaaaaaggttctgtccgtgtgcctgtctctggcgatggccgcgggcatgctgtccaccagcgcgttcgcgtcctggaacgtctacggcggcagcaacaatcacaacgcggtggtgacggaggctcctaccacgccggataaatccggcctggacagctacatccaactgcattgtaccggctccggctgggacggcgtggacaacgtgcccgtattgcagacggtgaacgggactacctatgcttacgttctctacgatggctatggagccagcggcgcgctggtagccaagatcaggtgcgcggaaaacggcggcagcagcatcgtctggactaccgatccctacggcacggagggaacctctctgaacgccaagagcggcttccaactgtctaccccctatctggacgacaatggcacccccaacgacgcgtcggacgataccctctatgtgggtaccatcagccagtatgacgactacgagggcggtgagtggcttaccggtaccggcagcaaggttatggctcttaccggcctggatcagaacaaacccactgtgacgaatgtcctgaccggcatcaatggccagatcaacacccccatcaccaccgacgggacctacctgtacttcggcacctggcccggcggcagcaacgcgggaacctactatcaggtcaagctctccgactactcggtgaagaccttcacccccgacagctacggcttctactgggccggcgcggtgagcgacggcaccaacgtctacttcggcagcgacaatggcctgctgtactggcggagcatcgcggattttgacacaaccggcggcgtactggatctgaccgatgtggccagcgacgcgggcaacgtgcgctccaccatcatgatggacgaagacggcttgctgtacttcaccacccagggtggctacctgtggtgctgctcctatgatgacgggctgacggtcaagtggcccatcaagctggatgccacctccacctccacccccaccaaggtgggcgaccgcatctatgtgggctactactccggctttagtgaaggcggcgtccagtgcctggatctgggaactgggagtttgagtactgtggcctccggcttcccggttcagagctctatcgtggtgatgggcgacggcaccggcaccgactacctgtacttcaacaccaacgcttctgacggtgctggctactgctacagctatgacggtggcaagaccggcagcgaggtctgggccacgaagggcgacaactacgccctgggcggcatggctattgacaacggctacgccgtcttcggcaacgataaaaatcacctgtatgtcgttcacgattgaagtaaacacaaagagctcatgggccgccaacacggcggcccatgagctctttattgtagagagggcccctggctgtaccggggggggcctattgaaaacatggaaggaggagagcctggtggggaaaaaagtgctttctcttgttttagcgctcaccctgcttttgtcgctctgcgcgccgggcgcattggctgtggaaccaacggacacgcagcttaaagtggtgatcgatctgtctgcttatataggtagtgttaatggaaaattcaaatatggaggcggattcaaaacaaatgagctaacaattgatgctaatgagtcaaatgaaataattttagatgaaaaaataaaaaacggcgttataactgcttcgaatgaaattgcgaaatgcaccatcgaattggaaaataccgcttgcgattgggagatctccggaattccgaaagcgtgcatagaatatgataccaagcagaaaacctataaggtctatacaaccgaagaaaagaaaaaacttgttttaacatgtgagtccggaaaattgtcttttagcaaagctcagataagcaccttgctgaaagaaacggcttggggccctgcctgcacattgagcatcaaacctgtttttaccgttgaatctacctgcacagcgaatgttgtttcgtcagagccggctaagggatcggcaaaggcaacaggcacaaataatgcgaaccaatatattttgaccgccgccggggcggagggctatgcgttcgactactggaaggtggaaggatctgatacccccatctatgagaatccctataccgtgaatctggaggcggacaccacctttaccgcctactttcgggcgctccgtgttcccaaggtggatgcaggggagggcggaacggccgcatttacttatgaaaattcttccggcggcgcggatcagtacaccctgacggccacgccggatgaactctatgtatttgactactggagctgggagggcgttccaaccggcgcggaaaacagcgcaccggaggagcaggcgcttccggatgaggatatgccggaggatggcggcgaggcggagcccgccccctccgagccggagacaactgcgccgccggaggaagctgccgacgggacggagaccccgccggatgagaccggcgcacccacggaagagcctgcgccagccgagcctgccccggacggggcggaggatgccaccggggcggaagcggctgcaccctccccggtggctctgctgcgcctgaacgcggaggagacccccgatgtagaggagacccccgatgtagaggagacccccgatgtagaggagacccccgatgtagaggagacccccgatgtagaggagacccccgatgtagaggagacccccgatgtagaggagacccccggtgtagaggagacccccggtgtggaggagacccccggtgtggaggagacccccggtgtggaggagacccccgctcccgtggagaataatggcctccagacgataaacctggaggaactgacccaggagtgggacaagacggccaatcccatgacggtggccctggccgagggcatggagaatgtgacctttaccgcccacttcaagctggcggaggtcaccctgggcgagggcgcgtatctggaggggagcggatcttgggagagcatagtcaatccgtccttcgcagagaaggagggggacacgcttccggcgggcagccgggcccggctctacctccctctcagcgtatccgccgcgatcccggacggacagctcaccgtcacgatctacgagggcggttcggcagagggaacgcttctcagcagcaacgtcaagacacgggattgggaggccggcaaaacctattgcatctggctccccatcgacccgctgccctacacagacaagctgacggtgacggcgtcgatccgaaccactgtgggcagcacggagacggtggagaagacctacgatatctcgacggaggccaacgagaagaatagcgcgtttacctatgtgaccagccccaacgtacccgccggcaccgaaggctccaccacagaggcggggcccgacatccgcggggtgtccggctggaccgatccggagaccggagaggccgaactgtacttctacggtaaggacggcgtctacacctgggcggacagcggggaccgggatctgatgagcatcagcgacggcctgcccgccgcggaaggagacgcggctggcgtcctcgccgtggggccggatggacaaggcggcctgctggccgctgtcagcgaggtggggaaggagatcgataaggtcacctcgccgggctatgtctccgcccccgagggcacgcaggttagaggcggccatttcctctaccgctacaacgggacgtcctggagccaggtggaggactcctgcttctccgattatcagaaaaactcttctggccccgattatagcatacccagactctacaacgaagcgttggtcatcctctcggacggcaccgtctggcagtaccggggtcactgggacgggatgcagtggattgagaatgatgtggagttcaactccttctaccgggtgagcgacacggagatctacgccggctcggacgagggcctgtaccaatacaatggtacagcctggagcaaggtagaaaccgcaggcatctccggctcgctcgaggtggccagcggcaacgccgacggcgacctgctcctcatggcagggaaaaataattatgacccgtacctgtgggatggcagctccgcaacgaagctgtcgctggaagggttgcaccttaataatgcaaatagtgcccggagcagattcttcgggctggaccaggacgggaccccctatgcgcttgtcaacggttcgggcgaaggacggaactatctcgcggtcaacggttataacggcagctacgtctacaagtgggatgggaagaagtgggtctatcaggttatggccgacttcaacgaccccaatgaggatcccaacgacctgagcacgaaaatccgccccgacggtgtgaccgctatgagcggcgtcatagacggcgtcagcgccatgtatggcgaagacggcgcgggcgcgatctacctctcggtggatgacgcaaccattacctttgacgcccagggcggcacgtttaaagatgactcgctgaaaaccatgaccgcccccatcctcagcgaggtggattcgtccaaggtgcccagtgttgccaagagcggcaatgccttcggcggctggtactatgatgcggcctgtaccgagggcaagaagtgggacgccaataccgcccggatgccggggaaaggcatcatgctctacgccaagtggacggagcgcaccggccccgtggcccccgacgacccggagatgcagtatcaccgggaatctgccctggacaacctggaaaaagcatttaacaagtataagaaaagcgactacagcgaagcaaactggaaaaagctggtggccgcatatgagcagggaattgcggatatcaacgccgctctgcccgccgaggacttcatcgaaaataacatcatcgcggccctgaacaaggcgctggccgctatgcaggccatccctgctgaccacgccggacggatcgaggtggcggtgtctatggacgcaaacaccttgagtctgggctatctgattaagccgaccctggtcactgtggatgaccgtacccccgccagcgtggtcattaccgacctgctcagagagaacggctacgactgggagaacaccggaagcattaccaacagcttctacctggccggtgtgaagcctgtgaaccagaccaaagccaaaatcccacagtacatcttggaccatgccggctccgtcaacatgggtgacagcagcgataagacattgagcgagtttgattaccacaacatgtccggctggatgtacagcgtggacaacgacttccccggcgtgggcgcttcgaactggcagatgtcggacggcgaggtcatgcgctggcagttcaccgtctggggatatggcgcagacttgaacgcagacaataccgcctggggcagttccagtatcgtgaacgtgggtgacaagggctcccttacctgggccgtggccgagctgcggagcgagtacgacgacgaggttctggaggccaacgaggtctatatggacgccatggaggttctgacggaccctgaggccagccaaagtaaaattaacagcgcgaaaaccgcgctggccaaggaggactttgacaagcagcctgaaaagccggacgttccaaccgtggatgtgaagccgggggccaatgtggataaggacggcaacgccaaggtggagcttaccgaaaaagagatcgaaacgatgatcgagaatgcagtggaaggcgaggcggagatcattgccatctctcccgagatggacagtgaggccaccagcctggaggtcacattccccaagggcgccgtggatgctattttggaagagacaaaggcgagtgtatccatacagagcgatctgggccgggtgcttctgtcccgagatgtcctgacctccatttccaaaacgacggagggtggcgcggtcaccgtgacggtggccgccggtaaagctgagaacgccggtgggctgctgaagggacagaaggatgtgaccgaggaggccctgaaggactgctctgtgaccgaggtgaccatccgctccggcaaggagaaggtaaccgctttcggcggcaagtccatcaccctctatctgccggtggagaacaaggcgtttgaggtgggcaagagctatgtcgtctatcagatcagcgacgacggttctgtggaacaattggtgggcaagtgtgtcaagactggcggaaagcgctttcttgaggtgaccaccacccacttgagcaccttcgtggcgctgcctgtcgaggtggtggatatgccctttacggatgtgaaggaggaggactggttctacggcgcggtggtgtatgcctaccagaacagtatcctgaccggaacgggtgaaaccaccttctctcccaacggccccatgacccgctcgatgctggttacggcgctgtggcggctggagggcgagcctgaggcgtctggcgcatccggcttcccggatgtgaagccggatgcgtggtacgccgaggctgtggattgggccagccagactggtatcgtcagcggcacaggtgcgggctttgacccggagggcagcgtgacccgtgagcagattgcctccatcctgtaccgctatgcaaagctcaaaggctgggatgtgagcaaaacggccagtctacaagattttgccgacggtgcggatacctccgcttgggcaacccgggctatggagtgggcctatgcggagaagctgattaccggaaaggatggaaatcgtctggacccgcagggccaggccacccgcgctgaggttgccgccattctgatgcggcttctggagagcaaggcggagaaggcctgagattctggaagaaccataaaggccccgtttggctccggtctgcaaaaccaggccgggctgtatgggggctcccccggtaaggatagagggagcacctccttactcgagcaggagcccggcagaccgaattcgacctgccgggcggccctgcccacaatcaaacagaaaacacagttgggtgaaactccgggaaaccggtacgggcctgcccccgccgtccagtcggcaagacctgattgtggaaaaatgggtgggatgtaccgatacaaggcacgttcacccaatgggagagcgtgcctttacttgttgaggtgagcggtataatgctcaaagagcaaaagctgacggaaaaagagctgctgggataccgccagtggctctcagagctggacgaggaaagccggggagagcagggaacttccagacaggcgatggatccggacctgtggagaatttttgaccccaaagggaatattggccggcagatttatgagagctatacggatgaggcgcttttggaggctgtggtggtgacaatggaccatccggggcataagcctcggacatatcagctcagccccattcgccaggtttatttgaagcagcggtttggaaacatcaataaagcctgctgggcggccagaggatttcggaagaggctggaagagcaaaagcggtggccgccagactggccggagcgggtatccgctgacggattcagggcgtattgtgaacggattggttctcccctgacggagcaggatgcagaactggcggaacatatgtgcagatctgtcagagagagctggcgcccaccggaggaagaagaaatcccgccggagctcaagatgctgtttcaaaaaaagcgatgcagcaataaaaaggccatggagctgatgggcatacccgtccttagcaagctggccatgaagcatttgtggagctattggctcagtgcctgggggaaacctgcagggccttccgaagaaaaagcagaaggagactcggtcatatgaagaaatggaaacagcgcggattcgcatttgtgcttgccctgtccctgaccacaggcctgttgacgggagcacaggcggccgtatccaaagagaccttgaacgatgcggtgcaggataccgcagaatatatgtaccgcaccgtacaggatccgcaggtagggtctatcggcggtgaatgggctgtgctggggctggcccggagcgggtacgatgtaccggacagctattatcaggactactatgccactgtggagacatatgtgaaggcctgcgacggcaagctgcacgataagaaatatacggagtattcccgggtgattgtcgccctcagctcgattgggaaggacgccagaaatgtggggggatatgacctgactaaaccgctgggcgactatgacaagaccatctggcagggccttaacggccccatctgggcgttgattgcgctcgactccagagattaccccatgccggaaaacccaggggcagagacacaggcgacccggcagatgtacatagaccgcatattggagtgccagctgcctgacggagggtggagccttttcggaggaacctctgcggcatcctccggagacggcgtatccgacccggacatcacagggatggcgctgcaggcgctggccaagtatcaggatcagccagcagtggcaaaggcgacggaggaagcgctggcgtgcatgtccaagaagcagaacagcgaaggcggtttttcctcttgggggactaagaattccgagagctgtgtccagattatcgtagctttgtgcgagctgggaattccgctggacgacccccgttttgtcaaaaacggaaacacgctcctggacaatctgatgaccttttatctgcccggaaacgggttcctgcacacggcagacggctccggctccaatcagatggcatcggagcaggcgttctatggccttattgccgcccagcggcttcaggacggcagaaacagcctctaccggatgagcgatgcccgaaccatcccagacggaccggcgacaggtcctgccaaaggagcgggattggaggggaaagatccggcagtccattccagccctatcactcagatgggcaaaacattcgatgacattaccggggtcaatgcccataaaaatcagcctgccattgaggcgctggccgcccgcggcattattgacggcaagtccgatggaagctttgacccggagggaagcatgacgcgtgccgaatttgctgcaatcgtggtgcgggcactcgggctcacaccggaggggaagaacagcttttctgacgttgccgcagaggcctggtatgcgccctatgtggggacagcctattcctgcggcattattaccggagttggagacggccggttcaaccccagcggcacgatcacccgccaggaggccgcggtaatggtttcccgtgcagccaagctgtgcggactggagacagaaatggacaatgcagcaacccgaaatatgctggcgcagttccctgattatatgggtaccgccgaatgggcccgcgctccactggcattctgctatcaggagaaaattttggaccaggctgagctgaacatcaggcccctggaggctgtaacccgggctgaagtggcccagatgctgttcaaccttttaagcagtgccaatctgctgtaaatttattgtataggagtgaaaagaaccatgctgaatcagggctggttcaggaaccagaataatgtggtgtgctgtcggaaagaagaggttctgcccaaacttgcacgggagctggcaattccggatttgtcccaacgagtggaggaattccagaagacacccacagcggaaggtgtgaacataagtgggcgcaaacggactacactgaagctcctgattccgaatctgacgttctctgaacctattgatatgggcgaaaacgtgtggatctatatgggagaactgtgtccggcttactgcctgtatatgccgcaggaggacggtgaagaaaagaaatgaagctgacgaaggggaaggtaatcggggcgctggctatcctggtgatcctggcggcggccttttggtatggtggcaatgcaccgggactccagggatggacagtaggcgtccgcgagagcagcccggtgctggagagcatacagcccagccaaacaccagaggaaacagggaaagatggcaatagcccagagccgacggagacggcaggggctttggaaacccctgcgtctccgggaaccccgaagccctcggaaactcctgcacccacggagtctgcggctccagagacaccaacgccttcgccggaggggctggcatcccggcccggcgggctggaaggcggaatgacggcggaggaaaaaattgcggcggcagaagccattgcgggcggctcctccgccggtgtggaaaagggagacaaggaatactcagaggccaacggcatggagatcaatccggagaccggaaaggacaagtatcttacggatccagtgccggaaggaaagcccctgccggtggagccgcaggatgtagagttctccgatgtgacccatacctgtacgctctctgtccgctgcaatactattttggacaacatcgactggctggacccggaaaaagtggagctggtgccggaagacggagtcatattccctgcgacgaccgttacgttctacgagggtgaaagtgtgttcaatgtgctccaacgtgagatgcggaaggccggcatccacatggagtttgaggatacaccgatgtacaactccgcctatattgaggggattaacaacctctatgaatttgactgcggagagctgtccggctggatgtataaggtgaacggctggttccccaattatggctgttcccgctatcagctcaaagagggcgatacgatagagtgggtctacacctgtgacctgggtgtggatgtgggcggcttctattccaccggcggttgagtacagacggaagcgagcttgactttatgccatatgtggtggaaacaggaaaggcgaaggtttctgtaaaagagtataccgaacgctgtgtagatgtagagcggtttctgggattttgcagggagtgcagcagctataacacgcggtggtcctgcccgcccttttcctttcagccgctgcagctctgacatcaatttaaccatctgacgctgtttgcgcgtatactgcacccatccccggatgaaacgcttccggtgctgatacggggaatgcgggaagagaaggcggggatgatggcggagctgttgaacagggaaaaagtctccccatacgtcggcacattccgcaggcggatgcagcttgtgtgagacaactgcatcaggacatgcgggagcccctggccggaggagacgcgctattccttcaacgtccttgggggagacagcgggaaaaccatggagctgtattttggacgccccatagtttggagtcataacggcgaagtgccggagtacctgactctcatgggcggacttctggtgaactgacacgctattttcgtgaaaaactaataaaaaatttacgtggggcgcggtgcctcaccgcgccccacgtctggaagggatgccttattcaatacagggatacattttccagctatcaccctattataaactttttgtattttggattggtaattgcttttaccatgtttctgatgcacccggtttcgctggcgatttctctggcttccgctttggtctatgccgtatacctgaacggacggcgagcagtgcgcttcagtctgttgtatatgctccccatgatggtggttgccgccctggttaacccggcgttcaaccatgagggagccacgattttgacctatctgccctccgggaatcccctgacgctggagagtatcctgtatggagcggcggcagcggccatgctggcggcggttgtcacatggttttcctgctatacggcggtcatgacctcggacaagttcgtgtacctattcgggcgcgttattccggccctctctctcgtcctgagtatgacgctgcgctttgtaccaaaattccaagcgcagcttcaggtcgtatcagaggcccaacggtgtattggccgggatgtctctaatggtggggtgctccggcggcttcgcaatgcaattacgatcctctccattatggtgacatggagcttggagagtgcgattgaaacagcggacagcatgaaaagccgtgggtatgggctgcctggacggacagcattttccatctaccggtttgacagccgggatcaatcggcactttcatggttgctctactgcggatttttcctctgctgcggcgcggcggcaaagggcttttactggcgttattatcctacggcgagaggagtgccgctgacaccgatgaccgtctgccttcaagcagtgtatctggctttgtgcctgatgccggttatcctgaatatacgcgcggaccgggagtggggagtgctgcgcaaagaaaacgaggtgcagccatgtaccaaacaatgagcctcccgctgtattcggggagctttgaagaataccacggctggggcgacctgcgggcggagctggcagctctgggatgcgacggcatggagggtatctggagcggtgaggaatttcctgaggatttgccggcagacctggttatcggctatcacctcaccttctatccggactggctggacttctaccgggatgaccggagggcgctgaagcgaaaattcggttcactggatgctgcggcacgcttttacggcggtccagggccggagacactgctggagcagtaccgggcggatctgcggcgcgcggcagggctgaatccccactatgtggtctttcatgtatcggatgtctcaattgaggaagggtatacctaccactggctgcacaccaatcaagaggtcattgatgcggcggtggaggtgataaacctcattctgggcacggaaacatggccctttgaattccttgtggaaaaccagtggtggcccggctttacgtttacggagccggaggaaaccgtccgcctgctggagggaatccgttttgcagggaaagggatcctgctggataccggacacctgatgaatgcctgcaccgggctgaagagtgaggcagagggagcggactatatccggcgcatgctgaaccggcatggcagcctggcaacgtgggtgcggggcgttcatctgcaccagtccctgagcggggcctatgtgaagactcacaccggttcactaccggcgggactgccgcaggactatatggagcggtttggagtgagctatcaacatatcctccagattgatcagcaccgcccctggacagaccccgccattctgccggttctggagcagattggcccgcgctacctgacccatgagctgtcctcccgcgggcgcgtagcccgggcggaggccgtgggcgcacagacaagactattacggcggggagggcggatgtgtgtctgagcagaagcagccaagtattgaaattgaacatttttccttctattacccggagaggacggagaagacgctggacgatttgacgctgaccgtggagcagggggaattcctggtgctgtgcggcccgtcggggtgtggcaagtccacgcttctgcgacagctcaagacggtgctggcgccccacggccgaaggctgggaagcatccgtttcgaggggcgccttttggaagaactggatcagagggagcagagcgccggaatcggctttgtgcagcaggaccccgaaaaccagattgtcaccgacaaggtgtggcacgaactcgcctttggcctggagagcctggggtatgacacgcctaccatccggcgccgggtggctgagatggcctcctttttcggcattcagacctggttctacaagaacgtcacggagctgtccggcgggcagaagcagctcctgaatttggcgtctatcatggcgatgcagcccagtgtgctcattctggacgaaccgaccagtcagcttgatcccattgcagcggcagactttttggcgacgctggggaaaatcaaccgggagctggggacgacggtcgtgttgacggagcaccggctggaggacgccttcccgttggccagccgtgtggcggtcatggaccgcgggcggctgctctgcacagggagtcccgcggaggtgggggcgatcctgcgcggggcgggacactcaatgttcctggccatgccgaccccgatgcggatctgggcatccgcgccggatgcgggcggacactgcccggtcacggtgcgggagggccgggattggctgaccgggtttgctgacggccatccgctgggagaactgcccgccgagtcccggcatgtgtatccggatgagccggccatcacggcggaagggctgtggttcaagtacgaaaaagagctgccggatgtggtaaaagggttgagccttacggtgaggcgaggagagttcctggccttactgggcggcaacggcaccggaaagaccaccagtctgaagctgctgtccggacttcagaagccttaccggggggaggtaaagctggttgggagggtaggtgtgctgccgcagaatccccaggcgctttttgtgaagaaaaccgtccgggaggacctcattgagattctcaagggccgggctttctccagaaaggcgcaggaggagcggatcgcttgggcggtgcggttgtgccgtctggaggaactgctggaccggcacccttacgacctgtccggcggcgaacagcagcgggcggctctggcaaaggtgctcctgctgggaccggaaatcctgctgctggacgagcccaccaaggggctggacgcggaatttaagcagacattcgctgagattttgcagacactcctgcgacaggaggttgccctgctcatggtcagccacgacattgagttctgcgcccggtatgcccaccgctgcgccctgtttttcgacggctccatcgtcacggaggccccgccgcgggcttttttctccggcaacagcttctacacgacctcggccaaccgcatggcccgtggcctgctcccggaggcagtgacggcggaggacgtcatactgacctgcggcgggacgctcccgcctgtgccggaactcccggatcgcagggagccgctcccggagccggaggaggccggcgcgtactccaaaccaaaaccgctgacctggtggcgcaagctgggcgcggcgctgacaggagctatggccttcctcctgttcctgtccttcatgaacatcacagatttgaccaaattgatcaccgcaggcggtatgacagagctggcaaaccatcaaatgtttctgtatgcgctctttattctctcgttgttcctgtttgctgcctgcattacgcgccggtcccaccggaaggattatgtcctccaggtgcccagggccaagcggaagctggctaagcggaccattgtggcagccgtgctgattttactgctaatcccgctgaccctatatatcggagtgttctatttggggaataaaaaatactatttcatctctctgatggtgctgttggagtgtatgctgccgtttttcctgatctttgaggggagaaagccgcaggccagggaactggtgatcatagcggtcctgtgtgccattggcattgcaggacgggcggcgtttttcatgctgccgcaatttaagccggtgatggcgttaacgattgtcgctggtgttgccttcgggggagagacggggtttctagtgggcgcaatgaccatgctggcctccaatgtgctctttggacagggcccgctgactccctggcaaatgttcgccatgggcattattggcttcctggcaggcctcctgttccgaaagggactcctgcgcagaaaccggggcgcgctatgcgtgtttggcgcgctggccgccatactgatctacggcggaatcatgaatccggcatccgccctcacctgggtgggagagctcaacggaacgatcctgctgacctactacatctccggactccccttcgactgtatccaggcggctgccacttggatttttctctggtttggggcagagcccatgctggagaagctggaccgcattaaggtcaagtatggaatggtagaggtataatacttgcttggaatcgactttgctgccttttgtcaaaggtaggatgatatgcctggatggagaaatagaacataggcggagaaaaggctgaaaacatgcggcgctcaaccgagcgccgcatgttttttcttgccgctttgatttgtccttactttttaaacgtcaaaccgcaatagggcccgcctgtatctcaggcgggtcctattggccaaaagtgttttcggcaaaatgaaaattgtagcaaaggctacccaaaatgtgagcgccctaatggcgaattaaaatgagccattgtcagcatctgaaataaacgctacctcttaggtgggataaccataagggggggtagcagaaaggcgttacgaatggctcaaatccagtatatcaaatttccccagatctaactacggagtatcgtaagcattccagccccaaaaccaagagtgcctgcggataggcatgaagcggatttttgagtacattgggggtattcccatcagactgcgctttgacaatatgaccacggctgttgctcaggtattgaaagacggtgagcgtgttctgacagagggctttacccgatttatgctccactgcattttccgggctgatttttgcaatccggcttccggcaacgaagagggcaatgtagagaagaaggttggttacagccgccgcaatgcctctgcttcggttccgtcattacctcgtttgaggaatttaataaatggttttgggagtggtacgaaaaggacgccgaccggctccactacaaatacaaggtccgcgcggttgttgagccaggagctggccgtgatctgcgccctggagacatacggcccggacccggcagggcaggtacagtcaacacttgcccagcaaaagggagtgacaacgcccgggtatgggacacatctaaacgggcgatccagattgtcctcaacaacctgaagggcatcttcttccgggacgatgatttggagcaaatgaccttttcggggacggggcggcgggggggaaacaggtatcacgatcctccgcatctcagcttttcaagaagtcggcgactacgacttggcaccagcctttccgccagcgattttgctatacataaagatagtgtcattgatttttatatgttaccttgctacaataatattattttagcgggaccctgggatatggggccgtggggacatcaagaaaggagtttacgatcttgacgagtcaacgattaatccaagaggcaaagaatttcctgcgcagcggtactcctatcccggacgaggcggtacggccggagatcctacggtcgtggaaacgttgctgggggtcccatgtgcccatggagcacgggaataaggagatcctgccactggatgccgtggaggagcggatcgcccggcggaacagtctgtgtcaggtggctttcccctatctggatgggctgtacgatttcatacggggctcggagtttctgctgctattcagtgacgaggagggctatattctctacgcccggggggacgaggacatctcccggaccgcccgggagaacgggctggtcaagggggcctgccgcagcgaatcccggctgggcaccaacgggatcggcacggtcttggtggaccggatccccctccaagtctttggggcggagcactactacgaggtacatgccaactgggcctgctccggcgcatcggtctttctgcccgatggagacatcggcggcgtggtctgcctgtccggcatggcggagcatgtgaacgatcacactctgggcatggtggtggccgcagcagatgccatttctcggcagctgaagctgaaagatgcctacgaccagctgtccaagagctaccgcaacttgtccgctatcatcgagacggtgcccacggccatgtgtctgctggacgagtccctccatgtggtagcctttaatacacaggccactcggcagctggccctcgctccggctgagctaagcggagctgactttctggaggtgctgggatgtggggcggtcacggcggaggatatcaagacctccctatccaaccgcaccatctccttcgagcggggagagggcaagcacaccatctccctgtcggtggagagcaccggccaccaggagtatgtggcgcagattgagcagttgtccagccttcacaagcgggtcaacaacattatgggcaacgaagcccatttcagattccaggacatcatcggcatctctccggccatgggggaggcagtgcgcatggccaagatcgccgcccagaacgacgcctcggttttcctgtccggagagagcggcacgggcaaggagctctttgcccaggccatacataacgccagctcccgtcgccgggggcccttcatcgcagtcaactgcggtgcactgcccaagagcctgatcgaggccgagctgttcggctatgagggcgggagtttcactggggcccggcgggacggctgtgcgggcaagttcgaactggccaacggcgggacgatcttcctggacgagatcggggatatgccggtggatgttcagatcaccctgctgcgggtgctccaaaaccgagaagtccgccggatcggggcctccaaggcgctgagaatcgacgtgcgggtgataactgccaccaaccgggatctggagcagctggtggacagcaaagtcttccgggaggatttgttttaccggatcaatgtctttcggatcaatatcccgtctctgcgggagaggacgggagacgtgaggcagttggcgggcttcttcctggccaagtacagtgacatccgtcctggcggaagggtggagggcttcacggccgaggccctggccatgatggaggcatacccctggccggggaacgtgcgccaactggagaacagcgtggagcgggcggtctacctggccgagggggaactggtcaccgccgccgagctcccgccggaggtccgggccttccagggatcggcgccctcgccggctgtgcccgcggcggagggagagtccccctctgggggcgagggggaggacgaggcggcgcggatccaggacatgctccaccgcacccacgggaacgtcatggaggcggcccgcttgctgggcatcagccgaagaactttatatcgaaagctccaacggtatcacatcgactacagctcgcatcggatctgatataccgtatgacacaaatgaaactgtgacacaactgtgcgccatgtgcggctgtgtcacagtttttgtcacatatgtggcacactcccgtggcgcactggggcagagaagtcccggtttgccttggtttttcaagggtttgcggaggggaagagttggcatggcatttgcgtgtttatcaaaacaagaccgggtgcggtacgcagatgaccgtccccgtttgctggcggagcaggacccacggggacaaatcgaaagaatgggaggcgatcacgatgaagtatgccgttttgagcggcaacgagcggttcgagatccgggaaggagagctgaaaagcaatggatgcgcggtgctccaggtgacccatgttggcgtctgtggcacggatacctcttactggcacgagggcgagcgataccgtggggtggtcatcggacacgagtactcaggcgtcgtagtggccccaggcaccaaccgggccctcaagccgggcgaccgggtggccgggtacacccaaaacgtatttcaggagccctgcggccactgtgaggcatgcctggctggcgactgggaccactgcaccaaccgcagggtcttcacctggaagggcggcgagctgggccatcccggcgcttacagccagtacaccacctggttcccccacagtctggtcaagcttccggataatgtgaccaacgaggagggagccatggccgagcccttcgcggtgggccttcatgccatccaggtcagtcaggtgaagcccaacgacagggtgctcatcctgggcggcgggatcattggcatgagctgcgcggagtgggccagaaccttcggcgccagtgagatcaccgtctcagagctcaacccccagaagcgggagatcatccggggctatcaggtggctgaccatgtggtggctgccgacgcccccgacctggagcagcagctgctggatatctcggggggcggctatgacctgctgattgactgcgtgggggtgcccagcgccttcaacaccggcttgcgcgccctcaagccggagttctatatgcgggccaccgccgtgggcctgccccatgctcagttccctctggactatgagcggctggtgctcaagcaggtgctcctccgtggcagcaagggccacaacttcgatgaattcaagaccgtcatcaacgccatggcctctggccggatctccgtgaagaaatacatctctcgccgcatcaaactggaggaggtccaggcgggttttgaggccatgaaggccgcccgcggcctggacaccaaggtaatcatcgagacgcagtgaccccgaaacagatcaaaacaagtctgcaaataaagagggaggagaatcatggacattatctccatactgggcctggtcctggggctggcagtcctgatcatgatgggctttaaaggctggggcatgatccccacgtccatcgtgggcgcgctggttgtcgtcatcaccaaccgcatggacctttgggaggcgctgagcacccactacgggacctttatgaagaactatgcgggcgactacttcctgatgtttttcctgggcacgctgttcggcgcactgatggggagcagcggtgcggccaaatccatcgcctgtaaaatcgtggatctgatgggcagcaagcgggccctgctgattgtggttatcacctctgccgtcctctcctatggcggcgtcagctttgccgtggtggtgttcaccctgtacccgatcgccctggttctgttcaaggagggcaacgtctccaagcggctgttccctgcggcgctgttcgccggctgtgcctccttcaccatggtgggcctgccgggcagcccacagatccagaatatcatgcccactgaggtactgggaaccacggcctacgctgctcccctcaacggtatcgttgtttcctgcatcatcttcgctctgagcatggtatggctggagtggaacgacaagcggttgaaggcggccggcatcggcttcgtccccggacgaaaagacgatctggaggccatcgatatctccgaccgcaccgggatgctgcccttcggtctggctgtcattcctatcttattcgtggtgctgtatatctttgtgatgcagcaggtgctgaaggacgctgtcacctggagcaccaactacatcgtcattcagtccctggccctgggctgcctgctggcctttgccctgttccacaagcggatccacgccttccgcgattcggtcaatgatgcggccaccaacagcctgatcgccctgatgaacaccgccgtggtcaccggcttcggcggcgtagtccagggatcccatggcttcgagctggtcaaggaattcgcactgagcctggatatgaacccactgatctctgcctgcgtggccaccgccatcgtggctgcggcctgcggctcctgctccggcggcctgtccgtgttcctggcggcccttggtccccagtatgtgcagctgtgtcaggcccagggaatcgatccgcagatcctccaccgctccatcacctgggcgggcgccggcctggactccctaccccactccggcggctatgtgacggccaacatctacaccgaccagacccccaaggagacctatccctatttcttcgtcactaacatcggcctgacgacgctgggctgtgtgctgacggtggccctgtatatgctcttcggcctggtgtgaccaggcggagaggctggagaaatccgatcacgctctgaaatcgagaaaggaacattgctatgctggaaatgatctggaagccgactctgtacggcttcgacacctgcaaagagtttgccgaggcgttccgcctcaacagagacgacctgatcctcagcaacgcctatatctatgagccctacttcggctgtatggagaacctgaactgctatgtgatcttccaggagaagtatggcgccggggagcccaccgacgtgatggtggatgcgatcctggccgacgcggccaagaccagctgtaagcgggtgatcgccatcggcggcggcacggtgatcgacatcgccaaggtgctggccgtctctgacggcgagggggtggacgacctttatgacaaggcccccgatctggaaaagaagcgggagctgatcatcatccccaccacctgcggcacgggcagcgaggtgaccaatatctccatcatggcccgcacccgcataggaaccaagcttggcctggtcagccccgccatgtacgccgactacgcggtgctgatcccccagctgctggagggcctgccgttcaaggtgttcgccgccagctccatcgacgccctggtccacgcggtggagtccgccctgtcccccaaggccaccccctacaccaagctctttggctataaggccattgagatgatcatccggggctatcagaccatcgccaagaaggggccggagagccgcttctctctgctcaacgacttcctgctggcctccaactatgcgggcctggcctttggcaccgccggctgcgccgccgtccacgccaccagctatcccctgggcggcaagtatcatgtggcccacggcgagagcaactacgccatgtttacaggggtgctcaagaactacatggagctccgccgggacggggagattgcagtcctcaaccagtatttggccgacttgttgggctgtatgaccaatgtggtctatgacgagctggagaagctgctggaccagatcctgcccaagcggcccctccgcgagtacggcgtgaccagggaggatctgcccgtcttcgcccacagcgtggtcaccgagcagggccgcctgatggccaacaacttcgtccctctggacgaggcgcgggtgctgaagatctatcaggagctgttttaagaccgctccagtcccggttgcctgtccccgccttagagggcggggatcgccgggggaatccctctggccgggggagcgggactgggcgcaatgataaaaggaggagattctcatggcgcttatgagcaaggcagcgatcgtgaccggggcagcccagggcatcggcaaggccatcgccgcacggctggtgaaggatggaatgcgggtggccatcgtggacatcaaccaggaggccgccgtcgcagccgccgaggagctggccgggcagtatggcgcggacaccatggccgtgcagtgcgacgtctcccaggaggaacaggtcaacatcgccgtgcaaaaggtgctggaacggttcggtacggtggacgtgctggtcaacaacgccggcatcctgtccctgaaaaagccctttgtggagtacaccaaggccgactgggacaaaatcttcggcatcaacttcatgggcgatgtgttcttctgcaaggcggtgatccccaccatgaaggagaaaaaggccgggcggatcatcaatatggcctcccagtccgccgagacgggcggtctggccgcctcgccgatttacgccgccagcaaagctgcagtctggtgcatgacaaagtcactggccggggagatggggccctatcaggtgaccatcaatgcggtggcccccggctacatcatgaccgagatgacccgcaacgccggttatcgggacgacatggtccccatgaagcgcctgggtacccctgaagacgtggccgacgtggtgggcttcctggcgagcgaggacagccgctatgtcactggcatgatcgtggatatcaacggcggcacggtgatgcgctgactttgtctgaacgagaacgggtcatcaactgacattgggaggtaaaatatatgagcacgaaaaaggaaccgaaggagctggcaaagcagttctataccgtaatgtaccggatgcgccgcttcgaggaggaggtctttgagttctataagcggggcctgatgccaggcctggcgcacctgtatctgggggaggaggcggtggccgccggggcgtgtgtcgctctgcgtgaggacgactatatcggctccacccaccgcggccacggccacctggtggccagaggcgccgatctggaccggatgatggccgagatcctgggaaaaaagaccggctactccaagggcaagggcggctccatgcacattatggccatggacaagggcatcctgggcgccaacggcattgtgggcggcgaaatccccatcgccactggcgcggcctactccgccaagctccggggcaccgagcaggtcaccctggcctttttcggcgactccgcgtccaacgaggggaccttccatgagtccatcaacatggctgccgcctggaacctgcccatcgtctatatcattgagaacaatctcttcggcatttcggtggatatccgccgggtgacaaaggagcacgacctctataagcgggccgagggctatgggattccgggcgaggctgtggacggcaacgacgtctatgcggtgtacgaggccgtctccagggcggttgagcgggcccgcaagggcgaggggcccaccctcatcgagtgcaagacctaccgctggcagggccaccacgtgggcgaccccggcgagtaccgcgcccctgaagagctggccgcatggaaggcccgcgagcccttggtggtgctgcaggagaagggactgctgagcgacggcgagattgaagagatccgcgcctctgtggagaaggagatcgcccaggcctgtaagttcgccgaggagagcgattatcccgacgtgtccgaggcctacaaggatgtgtttgtagatatcgccgcatctgtttgataataagggaggttcagatcatgagagaattgatggtgagagacgccatccgggaggccctggacgaggagatggcgcgggataataccgtattccagatgggcgaggacatcggcgtcatcggcggcaacttcaagtgcaccgtgggtttgcgggacaagtatggtgatctgcgtgtaaaggatacccccatctctgagcaggggttcgtgggcatgggcgttggcgcggccctgaccggcctgcgcccggtggtggagctgatgttcgccgactttatgatggtctgcggcgaccagctcttcaaccagatggccaagatcacttacatgtccggcggccagtgcaacgtgcccatggtggtgcgcctgcccctgggtggcggacgctcctccgcggctcagcactcccagtccatccatgcctgggccgcccacatccccggcgtcaaggtggtggtcccctccaccgccggcgagtgcaaggggctgctcaagaccgccatccgggacaacgaccccgttatgttctttgagcacaagatgctctataccaccaagttcaacgatgtcccggaggtggaggaggatgtgtgcatccccttcggcagggcccgcatcgtcgcggagggcgccgatatcaccgtggtcaccaactccatgatgaccatcaaggcggagaaggcggtccggcagctacagaaggagggcatcagcgccgagctgatcgacctgcgcaccatcgtgcccctggacaccgagacaatcatcaggtcggtgaaaaagacgggcaagctgctgatcgtagacgagggccacctcagcttcggcatcaccggcgagatcgcctcccggatcatgcccgacgtgttctatgatctggacgcccccatccagcggatgggcaccgccgacgtgcccctgcctttcagccccgcgctggagttcccgctgattcccgacgagaagaagatcgcggccaagatccgcgagatggtgtaaggaggcatcgcaatggctgaagtcgtcatcatgcctaagctgggcttcaacatggacgagggccagctggtcaagtggcacaagcaggtgggcgagacggtaaagaagggcgaggtgctctttgagatcaacaccgacaagaccaccatgcccgtggaggccaccgaggacggcaccctcctgaagatcattctggaggagggtgccttcgccgaggtgtttacccccatcgccgtgaccggcgcaccgggggaggatccggatgccgccctggcttccgccggacaggggcaggccggtggaagcgcgcccgccgccgctccttcggcccctgccgcgccggtggacatgaagtctctgaaactgacacccaaggcccgaaagctggtccaggacgagggcatcgacccggcctccctgacccagatcaagggcaccggcttccagggcgggatcacctataaggacctcaaggcatccccgctggcccgcagggtggcccggcaaatgggcgtggatctggccgctgtccagggtgccggcgccgccggcaagatcatgaaggccgacgtggaggccgcggccgccaaggccgcgcctgcctccgccgggtcggacacccgacaggtggcctccgccgttccctacaagggtgtgcgcaggatcatcggcgagaagctggcccagtccaaattcactgcgccccacctgtactttaccgacgcggtggacaccaccgagctggccgccttccgcaagcggctcaacgagaccagcgaggtaaagatcgccgtctccgacctgctgaccatggcggcctgcaaggccctgaagaaattccccggcatcaatgtcaccctgaaggacgaccaggtcgtcacctacaagtccatcaacgtgggcactgccgtggctggtgacaacggcttggtcgtcccggtgattaagaatgtgcagaacaagactctcaccgacgtggcacgggagagcaaggatctggtggccagagccagggaaggccggctggccccggaggagtacagcgagggtaccttctccatttccaatctggggatgttcggcatcggcaacttcaccgcgatcatcaacgcgcccgaatcggcgatcctgtcggtcagttccgtgcgcaagacccccgttgtggtcaccggcgagaacggagaggacgccatcgccatccggcccatgatgaacatacagctgtctgtggatcaccgggtcattgacggtctgctggcctcccagttcgtggagtatatgaagcagctgctggagcatcctatccagattctgatgtgagtggaggagtgtcatggcagagatcatcatcatgcccaagctgggcttcaatatggacgagggccagttggtcaagtggcacaggcgggtgggtgaaacggtaaagaagggcgaggtgctctttgagattaacaccgacaagaccaccatgcccgtagaggctacagcggacggcaccgtcctccagctcatgctggaggagggggctttcgccgaggtgttcacccccatcgccgtgatcggcgctccgggggaggaccccaatgccgtcctcaacggccccgccaccccccaggccgcgcccgcggccccggcggagccggccggatacgactacgacgtggtcgtgatcggtgctggccccggcggctatgagacggcgatcaaggcggcccagtgcgggaaaaaaacctgcatcatcgagggggccggtttcggaggcacctgcctgaacgtgggctgcatcccaaccaaggcgctgattcagaccgccgacgtgtaccacaaggtgaaggatgccgcccgcttcgcggtgacgggcgtggaggcggacaagatcgcggtggatatggccgccttgcaggccagaaagaaagccgtggtcaaaaccctggtcaacggcgtcaagggtctgctccggggcaataaggtaacggtggtggagggaatggcctcgtttgccgatacccataccctgtctgtggacggcaggagcatcaccggggccaacatcatcatcgccaccggctccagcgtattcatgccccccttcatcgcgctggagggggaaaaccacctgctgaccagcaccgaggccctggacctggatcaggtgcccgcctcggtcaccgtgatcggcggcggtgtgatcggcgtggagttcgcctatctcctgaaccgtctgggcagtaaggtgacggtgctggagctgatggaccatatcctgcccatggtggacatcgaggtctccaggctggcggagaagcggatgaccaaggacgggatcctgttccggctgggcgcaaaggtcagccgggtgaaggacgacacggtgtactacgagttcggggggcagaactgccaggtaaagtcggatatggtgctcatggcggtggggcgtgttccaaacactcaaggcctcaacgcagaggggatcggcatcgagttcgaccggaaggcgatccggacggacgcccatatgcgcaccaacatcccccatatctatgccattggggacgtgaacgggaaggttatgctggcccacaccgcctcccacgagggtatggtggcagtggcggacatctgcggccaaggggaggagatgcgctatgaccggatcccatcctgtgtctatctggagcctgagatcgcctgcatcggcctcaccgaggcccaggccagggagaagtacggcgacggactgaagatcgggcggttcaacatggcggccaacggcaagtccctgatcgcgggggacacggacggcctgttcaaggtgatcgtggcggcggacaccggcgaaatcctgggcgctcacctctatggtcagcacgtcaccgacatgatcggtgagatctcggcggccatggccgccgagggcaccgctgaggagctgatccatgcgatccacccccatcccacggtcaacgaggccctgggcgaggcttttatggccgcctggaacggacgggccatcaattccctgtgacagggaggatcctctgcctgggtgacagcctgacctatggcttcggcctcccgcggggactggtctggacggcgctgtgcgccgcccagaccggggcggagctgctgggcgggggcgtcaacggcaacaccaccggcggtatgctggccgtcctgcccgatctgctggtccgggagcacccggacgcggtcctcctgatgggcgggaccaacgatatcgcctacggcggggatctggcgggcgccagggccaacatgggggccatggcccacctgatcatcgccggaggaggcctcccgctgatcgggatcccgccggggctccggcggcccattcggcgggagtgggcggagctgatgccggagcgggcggcagagctgctggccgagtaccagagctggctgcgccgctttgccgctgccttccgtctgccggtcctggacttcgaccgggccttcacccgatggggagaggaggggctctttcagccggatggcctccaccccaacgccgccggccactgcctgatggcggagacggccgcggcgctcattcgatccctgtgagagaaaggagcctgtgccacgatgcgtgccatccaaagccccagcaccgacccccgcttcaatctggcgctggagcagtatatttttgaccagatgcctcggaaccggtcctatctcatgctctggcgcaacgaccagacgatcgtggtgggcaagcaccaggataccttcgccgagatcaacgccgactatgtgcgggccaaccagattcaagtggtccgccggctgtccgggggcggggcggtctatcacgacctggggaacgtgaacttcaccttcatcgccgaccacacgggcagcgactttgacttctccaccttctgccgcccggtgatctgggcgctggagagcctgggggtgcctgcggagctgaacggccgaaatgacatgaccatccggggcagaaagttttcgggcaactcccagtatgtgaaggagggccgggtgatgcaccacggcacgctcctgtatgactctgacctgagcgtggtgtcctcagcgctggctcccagccgggacaagctgacctccaagggtctgccctcggtgcgcagccgggtcaccaacatcaagccctatatgcatcagccgatgcccacagaatccttcatggagcggctgtggtcctgcctgggagaggtatgtgacctagtcccctatgagctggatcggggggatctgaaccaggtggagcgtatccggcaggcggtgtacgaccgctgggagtggaactatggaagttccccccggtgtcagatcgacaagcgccgcagggtagagggctgcggcgagatccgggtctgcctggatttgaaggagggtgcaatccaggcgctgtccttctatggggacttcttctcccgaaaggaacccgaccagctggcccggcggttgatcggctgtcctctgcgggaggaagctctgcgggcagcggtgccggcgggggaaatcgggcagtattttcagaacatggacctggatgaattttgcgggctgatgctctgctgaggccccatcaaaaacagggcgcggcccggaaggccgcgtctaacagcaaggagtggatgatatgagtattgaccgtctgccgcccgtgggccatgtgggtgtcgtcgtggccgatatggaccgggcgctggaggagatccgtcagatcttcgggatcgacggcgcagggaaggtgtacgacttcacacccatgaatgtatgggcctggggggagaaaattcccggctgccagattcggatcgccatgctggattggaccgacagcctgaagctggaggtgctccagcccgtctttggcgagattgaacataagcgcttcgtagatgaggtgggaggcgggatgcaccacaccgcctactacgtcaaggactacccggcttatcgggatttcatcgtgggccaggggggcgagatcatttttgagtcggagaccgaggatgaaaaggggtaccgtcgatgctgctacgcccgtatgcctgggacgcagatgattgtagaagtattggagaaggcgtggttgcgcaattgaggtgctcctgtcttttgagaaaataagttcatagattaagtatgggcaacacccctcctgtggttcggcagacggggtgttgcttatattctggacataaggatgccctcctgaagcactcttattgagaaaaatgctccatctaagtttagatgaagttatagggtcaagcgtcaaacagcaattattaggtatgaaaaaaatcatgcttaattgtataaatgactataattagactaaaaagtaaaaatagaactttggaaaatattacaacgtacagtcaaagcagcggctgggaggagagggctttcgtgcttgtaccgtaaatttaaagataattaagctaccaaaaaagagatgttccagaggtcactatacctttggaacatctctttctgtttagatttcaaagcggaatcggtaagaagacggcgtatgagcttttgaaggatggcgcaatccactaaatgaagattgggaaatcgtttaagatacctaaaatctatatcattgaatatctgatcggtatatattaaaaagtttcggtgtgtggaaataaggcagtacggaatattggaggagagaactttacatggaataatattttacatcctcttcgattgagcatcccaatatactttcatgccaacgattgtaatagatttcttgttaacgggaagcttttccatagcggccttggtctatttggaatgaccggttgagaaggaaagtccttttgcaaagagcatattaacaatctttcctaagctggctccagcaagatagtatttaaatataccgcggacagcatctgttttttcttcatgcgcagtgatttccttgccagctaaaacgtagccatacggaagtttcacaggtacctcactttccaaaacataaataaaggcaggtttaagagagataccatctctttaaatctgcttgctgacacttgcaatatgtaatggtagccagttctatgctgtggttttaatacacttttacaaagtatagacaaaacctgcatataactatcgttatacgcaggttttgtctacgatggtgccggtagtgggactcgaacccacacgatgttgccatcaacggattttgaatccgtcacgtctaccaattccatcataccggcaacgggactgcaaaatattatacacgacattgaagcggttggcaagtcttttcgatggaggaaaatcagaaaataatcggttaattaacataccatttccggtagagatgtgctatgataatcttgattttataacttatcccatggaggggttccgacgatgaaaaaatgcaggctgcttttggcggcggggctgctgatgtttctgaccggctgtttttcccagtcggtggaggaattctacgcgcctcccaaggcgcccgacgattatctgaagctggacaatgagatcaacaaggtgctcacgcaagggggcgagtacgccgcgcccctcagcggggagctgacccagaaggtgcagcttcaggatttggacggggatggcgtacaggaggctattgcctttttccgggtgagtgcggatgagcggccgctgaagatctacatctaccgccaagtgggggagaactacgaggtggcggccgtgattgagggctcaggaaatgcgattgactccatctactatgagaaccttgacgacagcccctccaaggagctcatcgtggactgggagacagcggggcagaggcactccctggcggcttactccatcgaccgttatgaggtgcttgagttgatgcgcaccgaccacgccggcttccagatttatgacgttgacggggatggacagaaggaaatcctcgtgctccagatggcggcaggggaagtgggccaggcagagagctttgtcaacagcgcgccgggcagccgagtggaggtctataacttccgggatggtatcctggagctggacgcctccgcaccactgtccaacggggtggagaagctggtcagcatgaagacgggctatctccagaacatggcgccggcgctgtttgtcacctccacctacgccgaaaacgggcagatcaccgacattttcgcctggaaaaacggggggctggagaatgtgaccctggagccggacaccggcgagagcgacagcaccatccggtggtccaccgaggtggagagcacgaaggtatcctataccgacatcaaccacgacggcatactggagctgccatccgcctatgcgctccccgatcccaacaatgtggggacggcccccaacttctgggccatccgctggtggcagtacgacatcaacggggtttctcatctggtatataccacctaccacaacagccgggacggctggtactttgttctgcccgaggcgtggtcggggaaggtgacgctctcccgcagcgacttggcgggcggcggcgagcgggccgtaatcttttcttactgggagggaagcgcggacacagcgccggtgccgttcctggtcatctacaagctgaccggcgacaaccgcgtaatgcgggccaacatggccgaccgctttctcctgcccaacaccggggaggagaaggagaccatttatgccgcgcgcctgatcgagagtggttgggactgcggcttggacgaggagggcgtaaaggccaatttcgccctaattaccagcgattagcgcccacggcggacgcctgtgtgcgaaaggaggaaacgggatgaaaaaggtactggtgctggaggatgaggcgaacatccgcagctttgtggtcatcaaccttaagcgggccggctatgaggccatcgaggccgagaccggggaggaggcgctggcccagctcaagcgcaacccggacatcaaggtggcgctgctggacatcatgctgcccgacatggacggatttgaggtctgccgccgtatccgggcgggggacaacaacatcggcattatcatgctcaccgcccgcacgcaggagatggacaaggtgaccgggctgatgaccggggcggacgactatgtgaccaagcccttctctccggcggagctcactgcccgcatcgacgccctctaccgccgtaccggcggaggggacccggtggataccggcgagatcagccagccgcctttcctgctgaacacccgcaaccgtaccctggagaaaaacggacagcgggtcaagcttacacaggtggagtactccatcataaagctgtttatggacaacccgggaaaagccctctcccgggaggaaattctcgactcggtgtggggacgggactacttcggcgagctgaagatcgtggacgtaaacatccgacgcctgcgtatcaaaatcgaagacgaccccacaaatcctgcttatatcaccaccgtgtggggatacgggtataagtggggcttttagccagaggcggacggggcgtcttcgatgggccccgccctggggcggggcggcgcggagcgccgtacaagcgtttttgccggaggcaaaagccttggcccggggcaattcacttgccccgggcagagggaaaagagggggccccgcaaagctctgctttgcggggcatgacgaccccacaaatcctgcttatatcaccaccgtgtggggctatggatataagtggggcttttaatgccggccgggcggccgggacctagaaccaaacccaggtggtgacaacaagatccatgaagaaaatcacaggtatccgaaagcggtggatggtgaactccatcagtgtggtgctgtttatcgtgctgctggcggtggcggccttctccgccgcgatggggagctactactattccaccctgagtgagtctctcaagcagaaggcggaaaacgccatcagcagctttgactactaccgcacagaagccgagtattacgacaatgcccgggcggtggtggccggggaacccaacagcgacaagctggaggtagagtatctggatgccgacggccagattcgcttttccagctccgacctgacggcctttcgctcccccggaacgccggacattgctgaggccatcagcatgaagcgcaccaaggtgtggatcggcgccgaccccagcaccggcgagcacatcatggccgcctccagccccctgatgatcgacggggaggtggttggggtcatgcggtatgtcacctccctgaataaggtggacaagcagattatcatcatcgtggccatcgccctgggcatcggtctgggtatcctgggcatggtgtacttctccaacctctacttcatccgctccatcgtagacccggtggcgggcatcacggagaccgccaagcgcatcgccgcgggctcctatggcgtacagatcgagaaacgctatgacgacgagatcggcgccctcaccgacaccatcaacgacatgtcgctgaagatcaaccagagcgaaaagatgaaaaacgagtttatatcgtcagtgtcccatgaactgcgtactcccctgaccgcgatcaatggctgggcggagaccatcatgaacggcgaggtgcgggacgcgggagatgtgaagaaggggatggggatcatcgtctccgaggcgcggcggctgaccaacatggtggaggagctgctggagttctcccgcatccaggacggccgcttcaccctgtcagtggagcccatggacatcaaggcggaactggaggatgcggtctacacctaccgggagttcttccggcgggagggcattgaactcaaccacttcgactgcgacgaggagtttccgcccatcgcgggggacccggagcggctgcggcaggtgttctgcaacctgttggacaacgccgccaagcacggcggctcgggcaagcgcattgataccgctatcgcccgggacgaggatcaggtggttatcaccatccgggactacggccccggtatcccggccgaggagctgccccacgtgaagtacaagttctataaggggtcctccaaggcgaggggttccggcattggactggcggtgtgcgacgagattattacccgccacgagggtaccctggatattgacaacgccgaggggggagggtgcattgtaaccatccatctgccaatccgagctcaggcggtaatcgaacaaaagttctaaaaatcaaacccgcgccccttgcaatcggggcgcgggtttggtacaatagacgaaacgattgaatccaattagttaaggagaacagtgtacgaatgccaaatgaaacaaagcaatcctgcgctacagcctataagaccatgattggcggacaggctctcattgaggggatcatgatgctgggaccagagaagaaggccgttgtggtgcgcaagccggacggtgggctggaggaacaggtggaggagcgggtgctcatcaaggacaagcaccccgccctgggcctgccgctgctccggggtgtcttcaatttctgctcctccctggccaacggcgtcaaggcgttgatgtactcggcttcctttttcccggaggacgaggaggagccggaggagccctcccggttcgagctctggctggacagacacctgggcagcgagaaggccgcctccttttttatcaccgtggcggtggtgctgggcatcgttttctccgtggggctgttcatcctgctgcccaccgccctcaccggactggtgggcctggccgttcccctgcccatgtggctgcgcaacctgctggaaggcgtggtgcgtatcgtcatcttcatgggctatctgatgctctgttcccatatgaaggacatccgccgggtgttccagtaccacggcgcggagcacaagaccatcttctgctatgaacacggcctgcccctgacggtggagaacgtgcgtattcagccacgccaccacccccgctgcggaaccagcttcctctttgtggtgattgtggtgagtatcctgctgtccagcgtgctgttctcctttgtggaggtgacaaacacgtttgcgaggatggggctgcacctgctgctgttgccggtgattgtcagcctgacctatgagctgaaccgtgtggtggggcgctacgacaaccggctcacccggctggtgtccgctcccggcatgtggctccagaactggaccacctttgagccggacgactccatgatcgaggtgggcatccgggcatttacactggtgctgccggaggagaaggggaaggatcagtggtaaaggggaccggcgggatgaggcaccagcagaaataaaaccgctgtgccgcccagacggcagagcccacgtgaggcgatgcatagttgtcccatgaagaaaatggggggataaccgcctggtattcccctggagagaggaaattagagagagacagaggagtggtttctgtatggcggccacgtacaacaacctctacctggatgcccgcaagcggctgagagaggccggcgtggagggcgcccagctggaggcgcgggagctggtctgctgtgcggccggcaagagccgggagcagttttaccgggatatggccctttatgcctccgacccggtggaggagaagctggcggagctgctggagcggcggctggccggggagccggtggcctacctcatcggggagtgggagttctatggcctgggcctggatatcacccccgacgtgctgatcccccggatggacaccgaggtgctggccgagcgggccatcctgctggcccgggccgccggagagggggcgagggtgctggatctgtgcgccgggagcggctgcgtgggtctggcggtggctgccaacgtgccaggctgccgggtggtgctggccgatgtgagcgaggcggccctccggctgtgcaagcagaatgtccgccgcaacgagctcaacgcccgggtgacctgcgttcaggccgacgccctggagccgcccgacgcggccctgtgggatttcgacgtgatcgcctgcaacccgccctatatccccaccggggacatcgcggggctggacgtgagcgtgcgggactacgagccccgctccaccctggacggcggggccgacggactggacttttaccgggccatcgccgcccggtggggggccgccctgcggctgggcggagccctgctgtttgaggtgggcatcggccaagccggcgacgtgggggccattctggcccaaaatcagtttgagcagattcagaccttccaggacacccagggcatcggccgggtggtggagggcgttttgaattcataagggcgggcagcggcccgcccgccgtgagaggagaagtacacacatggcagacaagaagaaggccgcggtggaatccgccgcccccgccgccgataagaagaaggccctggagaccgccatggcccagatcgagaaggcctacggcaagggttccatcatgcgcctgggcgacaacgccgacatcgtggtggaggccatccccaccggctccctgtccctggatctggccctgggcatcggcggcgtcccccgggggcgcatcatcgaaatctacggccccgagtcctccggtaagaccaccctggccctccacatcgtggccgaggcccagaagcggggcggcgaggtggccttcatcgacgccgagcacgccctggatccctactatgcccgggccctgggggtggacattgactccatgctgatctcccagcccgacaccggcgagcagggcctggagatctgcgaggccctggtgcgctccggcgccatcgacgtggtggtggtggactccgtggccgccctcacaccccgggccgagatcgagggcgacatgggcgactcccacgtgggcctgctggcccgcctcatgagccaggccctgcgcaagctggccggctccatcgccaagaccaactgcgtggtcatctttatcaaccagctccgcgaaaaggtaggcgtgatgtacggcaacccggaggtcaccaccggcggccgggcgctgaagttctatgcctccgtccgcatcgacgtgcggcgtatcgagtcgctgaaaagcggctcggagatcattggcaaccgcacccgggccaaggtggtcaagaacaaggtctctcctcccttcaaggaggcggagttcgatatcatgtacggcgagggtatctctaagatcggcgagatcctggatctgggcgccaagctggatctggtgcagaaatccggctcctggttcgccatgggggagacccgcctgggccagggccgtgatgcggccaagcagtacctgaaggacaatccggaggtgtgcgacaagctggaggccgacatccgccgcaacgcctacaagcttatgagtagccaggcccgggccgcggccaaggccgcaggccgggcggtggacatctccgccgaggacttcgaggatgcggattcgtaagctggccccctccgtccgggtggggggccgctggctctgccacctggaggacggaaccatcctccgcctgggggagagcgaggtagtggccttcggcctgggcaccggcaaggagctggatgaggcggagctgtccgccttgaccgaggccgcccgcgccgcccaggtgcgggagaaggcggtggagttgctgtccgcccgccccctctcccggaaggagctggtggaaaagctcaccgcccgccctcggaaccgggaaaaggagcccctctgcggccgggaggccgccgaggcggcggccgactggctggaggggctgggctatctggacgacgggcagtatgcccgcacggtggcggagcactgtgctgccaagggctacggtcccggccgcatccgggaggagctctaccgccggggggtgccgcgggactgctgggacggcgctctggaggggctgtccggcccggaggaggccatcgacgcctttttgcagaagaagctgcggggggcggagctctccgatcccaaggtgcgccggcgggcagccgacgctctggcccgccggggctaccgctgggaggacatcagtgccggcctgcgccgctatggtgcggagccggaggaatggtaggaagaacgcggcggaccgccgcatgtgagaaaggagcacagaccatggacacgatggaagccctgctgacccgccgcagcatccggaagtacaggccggagccggtctccatagaggatttgaaggagattctggccgccggggccaccgccccctccgccgtcaatatgcagcactggtattttgtggccgtacaggaccccgccgcgttggaggaggtcaaggccatcatgggcggcgtggtggagaaattccagcctgtgctggaggaacgcttttcccgccacccggagcagatcggcatcaccaaccgcttcctgtccaccctgggcggggcgccggtgtgcctgctggttttcatgctcaagccggactatcccgatcgggacggagccatgcagagcgtgtccgccgccatcgagaacgtgctgctggcggcctgggccaagggcatcggctcctgctggctgtccgcgccccagcgtatgggcttcggccctgcgttccagcgccgcttcgcccccgacaagggggagttcgtggcagcggtcaccctgggctaccccgaccagcagcccaaaatgccgccccggcgggacggccgctatctgatcgtataaggagaagttttcattgaaggttgcatttgtatccctgggctgcgccaagaatctggtgaacaccgagcagatgatggcactggtccgaagcgccgggcatgagatcaccgcccagcccgagggggcggacgcggcggtgctcaacacctgcggctttatcgactccgccaagagcgaggccattcagaatatcctggagctggccgagctgaaaaaggaggggaagctgggcaagctgctggtcaccggctgcctgtcccagcgctatcaggacgagctgatggaggagctgcccgaggtggacggcgtcatgggcaccggcagctacaccgagatcgtccccgccctggaggagctgatggccgggggcacgccccaccgcttcggggatatcgaccacacggaggaggacggggcgcgcatcccctccaccccctcctacaccgcctacctgaagatcgccgagggctgcgaccaccggtgcgccttctgtatcattcccaagctgcggggccgctaccgcagccgtaccatggagtccctgctggcggaggccaaggccctggccgatgccggggtgaaggagctcatcgtcattgcccaggacatcacccgctacggcatcgacctctaccacaagcggatgctgggggagctgctcaccgagctgtgcaagctgccctttcactggattcgcctgcactacctgtaccccgacgatctggacgacgccctcatcgacgtcatcgcccgtgaacctaaggtgctcaactacatcgacatccccctccagcacatcaacgacggcattctgaagcgcatgtgccgccgctccaccaaggcggagatcctcgccctgctggccaagctgcgggaccgcctgcctggtctggtgctgcgcacctccctgatctgcggcctgcccggcgaggggaaggcggagtttgaggagctgtgcgagtttctgcgggaggcccgtatcgagcgggcgggcatcttccagttctcaccggaggagggcacccccgccgccgagatggaggatcaggtggacgccgccaccgccgagcgccgggtggagctggtggtggagcttcagtcccgggtgatggacgccttcaacgaggagcgcctgggcgagtgcctggaggtgctgtgcgagggctttgatgccgagatgggctgctatgtgggccgcacctatgccgactcccccgacgtggacggcaaggtgtacttcaccgccggcggcctggtgcccgccggggcgttcgtctgggtgcgcatcaccggcaccagcgacggggatctcaccggcgagatagaggagtgaagcaatgaataccgccaataagctgaccatgctccgggtggcgctgatcccggtgttcctgattctgctctatctccgcttccccttccacatgtatttcgccctcacggtctttattctggccagcgtaaccgattttgtggacggctacatcgcccgccactacaaccaggtcaccgactttggcaagtttatggaccctctggccgacaaggtgctggtcatggccgccctgctctggttcgtagaggcgggccgcttgcccgcctgggtgcttctggtggtcatcgtgcgggagttcgccgtcactgccctgcggctcatcgccgtggagcgggggcgggtaatcgccgccgcctggtcgggcaaggtcaagacggcctccaccatggtgtgcatctgcctgatgctgctcattgcccggcctgcgctggatctggtgtgcgcggcggtgatcctggtcaccactgtctactcgggcgcggagtattttgtgaagaacaaagatgtggtggactggagtaacctgtaatgctggattttacgaaagagctttgccccgaccggccgctgatccacccaacctcccagacgaaaaactgccggttcggccgctatgtggagatcggcgaccactgtgtgctggaggagaccgaggtgggggactacacctactgcttcggctccaacgacatcatctataccgccctgggcaagttcaactccattgccaccggcgtgcgcatcaacccggtgcagcacccggccaagctccgggcggcggcccaccactttacctaccgctgctcccactacgggctggggccggatgacgcggctttgatcgactggcggaggcagaaccaccgggtggtcaccggaaacgacgtgtggctgggccacaacgcggtgctcatgggcggcgtcaccctgggcgacggcgcggtggtgggcgcgggggccgtggtgacccatgacgtggcgccctacgagatcgtgggcggagtacccgcccggcacatcggctggcgctacccgcccgagctgattgccgccatggagcgcatccgctggtgggactggagccacgacatgctgagggagcgcctgcgggactttgacgacgcggcggccttctgccggaagtttgacccgcaatagaaaacaagggcccgttgctttcatccagaaagcaacgggcccttgcattaaaagacctgctggaatagattgaacaggaacgttagcaggggaatggcgttgatacctagcacaatagctaaaacggtcatccaaaagctcaacggctccctctgtgttcggacaggcggaatgtagatgggtgaggagacctcctcgcctaccacaattttagaggagataccgtacccggccagtacttgcaccaaccgctgggcctcacgcggcttcaggtgagtgaccagcaccgccggggcccgttccagcagggcttgcgcatccttctgagagaggcccagctccttggagagacagtgcagagcggccgggatatccgcgtgtgggcccagaccggtgaacacgagcgagtactgcctaggggcccgcttggggggagggaaactctggagtggataaccgcagtgaatgcaggccagggcttggtcagatacctcttttccgcactcaggacaggagatcaaggccataagatacctcctcttgtgtaaaagctgggggattccggttccataataacaggttaatctatggtttgcaaccgtactccgccttgacacatttcccggaacatagtagtatactagaacagttgaattgcgtgaggaacggaaatggtacccagcgagtaacccgccaaagagagagcgttaccggctgagagcgcgcccagggggtaactggggaatgtgtgtccgggagcgcgggggatatggatgccccacggctggccccgttaccggcctttgagtgagaaatgagagtggaaccgcgatttgtaccgcctcttatgccgtccggcatgggaggcgtttctgtttttcaggaggtgtttggactgacgcggctgtgccatccctgagactgatcacggcaccctggcggtctaccgcccggaggagtggctggagcgggtgcaaccctttttggaggagaccccggtcagccgaacagactggtgaacagcagactcagcagagaccagatgaccagggcggtgagtgtggcgaatacgacggaagtgaaggtcagggcatcgcccggcaccggagaggggagctggggcggctccggcaccgccccatccaccaactggacgggagcgcccgcccgacggaatacctccagcagtgcaagggcctcctcctcggtgaggccctcccgcaggggaaccggctcccggcgcgcttgctccagcagacgtatgccctgctccctggagaggcccagctccctcatgagggcgcggagcgttctgctgcgggcatccggataggcggggcgggcggtgaggcggacggtaaagcggttgggccctgtgatggggcggaagtccgcatacggtgcggcggaggagaggggatagccgcagtgaatgcaggccggagcccggtcggatacctcttttccgcactcaggacaggagatcagggccataagatgcctccttttgtgtgaaagcgtgtggtttcagccccatactaacagaaatccccctgaattgcaaccgcaaagcgccttgacacatttcccggaacgtggtagtatactagaacagttgaatcgcgtgaggaacggaaatagtacccagcgagtacccgccagagagggagcgtcaccggctgagagcgcgcccagggggtaactggggaatgtgcgtccgggagcgcgggggatatggatgccccccggctggccccgttaccggcctttgagtgagaaatgagagtggaaccgcgatttgtatcgcctcttatgccgtccggcatgggaggcgtttctgtttttcaggaggtgtttggactgacgcggctaggcgagaccctgcgggcctatcaggcccgcgatccggcggcccggagccggctggagatttttctgctctacccgggcgtgcacgcgctcatctaccaccggcttgcccactttctctatcggcaccggctcttcttcctggcccggctggtgagccagtggagccgctgctggacgggaattgagatccaccccggcgcgcagatcggccggcggctggtcatcgaccacggcatgggcatcgtcatcggcgagacgaccgagatcggcgacgactgcctgctctaccacggggtcaccctggggggcaccggcaaggaccacggcaagcgccaccccaccctggggaacaatgtgatggtgtccgccggagccaaagtgctgggccccttcaaagtaggggacaattcccgcatcgcggccaacgcggtggtgctcagcgaaataccgccggaggccaccgccgtgggcgtccccgcccgggtggtgcgcatcgccggggagaaggtggacttcgccgggcaggtggaccagatccacgtgaccgacccggtgcagaaggagcttcaggcgttgaattcccggctggaatggctggaacaactgatggatgaacaggcaaggagtaagaatctatgaaaatctacaattccgcaacccacaccaaggaggagtttgtcccccatgagccgggcaaggtgtccatgtacacctgcggccccacagtgtaccactttgcccacatcggcaacctgcgcagctatatcatggaggacgtgctggagaagctgctccgctacgcgggctatgacgtcacccgcgtcatgaacatcaccgacgtgggacacctggcctccgacgccgacaccggcgaggacaagatgctcaagggggcccagcgggagcacaagaccgtgatggagatcgcccaattttataccgatgccttctttgccgactgcaagaagctgaacatcaagtaccccgacgtggtgcagcccgctaccggcatgatcggtgactatatcaaggtcatctcctccctcattgacaggggctacgcctacttcgccggcggcaacgtctacttcgacacctccaagctggagaagtattatgtgttcaacgaccacgacgaggaggacctggccgttggtgtccgtgagggcgtggaggaggacgccaacaagcgcaacaagaacgactttgtgctgtggttcaccaagtccaagttcgaggatcaggccctcaagtgggactccccctggggggtgggataccccggctggcacatcgagtgctcctgtatctccatgaagtatctgggggagcacctggacatccactgcggcggcatcgacaacgctttcccccaccataccaacgagatcgcccagtcggaggcgtacctgggccacccctggtgcaaatactgggtgcatatccaccacctgaacaccaactctggcaagatgagcaagtccaagggggagttcctcaccgtctccctgctggaggagaaggggtatgatccgctggtgtaccgcttcttctgcctccagtcccactaccgcaaggggctggtgttctcctgggagaacctggacaacgccaaggccgcctatgacaagctggtggcccgtgtagccgccctgagcggtgagggaactgtggacgagggggccgtggagcggttcaagaacgacttccttgaggcggtgggcaacgatctcaacacctctctgggggtcaccgccctgtacgatgtgctcaaggccggcgtgaacgacgccaccaagcgggcgacgctggacagcttcgaccaggtcctgggcctggagctgctgtcccacgccgacgccctcaaggcccagcaggccgcccccgtggagggcgcggaggagatcgaggccctgatcgccaagcgcctggaggccaagcgcgccaagaactgggccgaggccgacgccatccgcgaccagctccgcgccatgggtgtggagatcaaggacggcaaggacggcaccacctggacgcggatctaagccatcaaagggaggagaccggaaaacggtctcctctttgcttcgcttcgtgtttacacatgcgccgaagggacttcccttgccaaacaggcggaatatcggtaaaatagaaccactatagcggattcaagcgcggaaaaaggggggagaaggacggagaggcagacacagaacgacttttccagggggagcatggcgcggaacatccttcagatggcgctccccatgacggtggcgcagctcatcaacatcctttataatattgtagaccgcatgtacctgggccggttgccggggcacctgtccctgaccgggctggggctgtgcctgcccatcatttccatcctcatgggctttgccaacctgtgcggcatggggggcgcgcccctgtgctccattcaccggggcaagggagagaacgaggaggccgagcggattttaggcaactcctttaccctcctgctcctgtttggcgggggactgacggtgttctgcctggccttccggaggcccatcctctatctctttggggccagcgacctgaccttcccctacgccaacgactacctgaccatctatctgctgggcaccctctttgtgatgatcggcctgggcatgaacccctttatcaacgcccaaggcttcagccgcatggggatgatgacggtggccctgggggcggcggtgaacatcgtgctggatcccatcttcatctttgccctggatatgggggtgcggggggcggccctggccacggtgctcgcccagggctgttccgccctgtgggtgctgaagttcctcactggacggcgggcgctcctccggctgcggtggaacaccctgcggctccaggcggcgcgagtacgtcggatcctcgccctgggcacctccggctttgtcatgtccatgaccaacagcctggtgcaggtgctgtgcaacgcctcccttcagcactacggaggcgacctttacgtgggggtgatgaccgtcatcaactccatccgggaggtggtgtccatgccggtgcagggcatcaccaacggctgccagccggtgctgggctacaactacggcgcgggggagtacgagcgggtgcgccgggggatccggttcaccacggtgcttacggtgggctactccgtggcggcgtgggcgctggttatggccgtgcccgagctgctcatccgtatctttaacgacgagccggagctgatcgctgcgggcattccggccttccggctctatttcgccgccttcttctgtatgtccttccagttcatcgggcagtcggtgttcgtgggactggggcgctccaggagcgcggtgtttttctccctgctgcgcaaggccttcattgtggccccgctgacgctcctgctgccggggctgggcatgggggtggacggggttttcgcggcggagccggtctccaacgtgctcggcgggctggcctgcctgctcaccatgtatatcacggtctaccggcgtctgggccggtaagaccgggggcggatttccccagagggaaattccgccctctttttttgcccggcctgagatattttccgccgcccgcgggtattctcagtgaaaggcctttcaagagacgaccgcaaggaagggagtacccatgacagaagagacattcgagcgggtggcccgcacctacggggacatgctctaccgggttgcttaccacgctctgaagaaccgggcggacgcggaggacgtgacccagaccgtcctgctcaagctctaccagcagggagaccgctttgagagcgaggagcaccggaagcactggctgctgcgggtggcggtgaacgagagccggcgcctgctgcgctccttctggcggagccgcgccgtgccgctggatgagcagtgggacgcgccggtgtccgatgaccccgccaaacgcgagctgttccaggccgtcatgggcctggagaccaagtaccgcctgaccatctatctgtattactacgagggctgctccgtcaaggaggtcgccgcggcccttcatgccaatccgtccacggtgcagacctggctccagcgggccagggagcggctgcggagggagctgtccgaagaagaggagggaaagggctatgtttgaacccaatcaataccgtgaactctgctcggagctgcatgtatccgaggaaaaattagaggaggttatccaaatgactgagcaggaaaagaagcgcaagttccaccgtcccatgcgtctgggcttggtggccgccgccgtggccgccatgctggtggtaacggtgagcgccgccaattccgaggcgattatgacctatctcacaagtctccgcgacgctgcggtcgccggggaggcctgggcggattccccggtgaatacggaggaggggacgggaggactgtgcctcccggaggcgtccctggaggagcgggacggccgcaccattctgattgtggacggagtggagaccgatgtaacccaggcgctgaccgaccagggggaatacctgtatgagtgcggcgagggggaggaacaggcacaggtacgggtctatttggacgagcagggcgcgccccggctgatgaccagctttttcacagccggagaggacggcggaacgggggcggttgtggttgtcccggcggacggggaggagtaaggaaacgcccccatagagctggattggctccttggtgctctccggattgttgactcaaataatcttaaatgtcatactgctccacggaaaaaaccaggcggcccaaggaattgggccgcctggtgctattcgtatttttgactaatttattgtagtatggtataatattatctcattgaattgctccgggcgtgcccggggacaggaggctaccgcatgaaactcatggtcattgacggcaattccctcatcaaccgggccttttacggtatacggatgcttaccaccaaggacgggcagcccaccaacgccgtctatggctttgtcaacatcctgctcaagctgctggacgaggagaagcccgacgccctgtgcgtcacattcgaccggaaggcccccaccttccgccacctggcctacgagggctacaaggcgcagcggaaggggatgcccgacgagctggccgcccagcttcccgtgctcaaggatgtgctggccgccatgaatatcccccgctacgagctggacggctgggaggccgacgatctgatcggcaccatcgccgccagggataccgccgccgggtgggaaaccgtgatcgtcaccggcgacaaggactcactccagctggtcacggacagcacccgggtcaagctggtgtccacccgtatgggacagactactacgaaggagatgaccccggagacctttcgggaggcctacggcttcgaccccgtccacatcgtggacttgaaggcgctgatgggggacaccagcgacaacattccaggcgtcaagggcattggggagaagaccgcgatggatctgatccagcgctaccagagcgtggaggccatctacgccgacgtggagggcgtggaggccaagcccgcggtcaagaaaaagctggccgagggggaagaacaggccagaatgtcctatgatctggccaccatccgctgcgacgcgcccatcgacttctcccccgaggacgcccggcggcgggagccggacggccctgccctgtacgagctgtttctggcgctggagttcaacaagctcatcgacaagatggggctgagcggcggcccggcggccggacgggcggacaagcccgccgccggggccgtccggcaggagcgcgtcaccgaccgggttcgcatggaggagctggtggagcagtggcggagggagccgtgggtcgcggtgctggccctgccctctctggatgtggtggcggtggcctgggacggcggagccagggctgccctgtgcgcggcggaccggctggaggggtacaatgagctgctgcgggccctgttctccggagagatccaaaaggtgtcccacaatgtcaaggatctgatgcacctgctgctggacgaggggctgagcaccgacgggttctgctttgacaccgccctggccgcctatctgctctctcccaccgacggcagctacgagctggagaagctgggtatcacctatttcaaccaggagttccccaaggcaaaggagtacctggcccccgacgctttcggccccctggccgacccggcgggaccggcggaggccatgtgcgcccacgccgccttggcggccgcgctgtatcgtgccctcgcccccaagctggaggagctggacatgcacgagctctattacgggctggagctgcccctctgtcccgtgctggcggaaatggaacgggcgggcatgctggtggaccggagggcgctggccgacttcggtatcctgctggacgggcgtattcaggccgacgaggccctcatctacgagctggcgggggaggagttcaacatcaactccacccagcagttcggccgcatcctgtttgacaagctgggcctgcccccggtgaaaaagaccaagacgggctactccaccaacgccgacgtgctggagaagctgcgggacaagcaccccattgtggaggcagtgctggactaccggcagttggccaagctgaaatccacctatgtggacgggctgaccaaggtcatcgccgccgacggacgcatccacacctccttccagaacaccgtcaccgccaccgggcggctgagctccaccgagcccaacctccagaacatccccgtccgcaccgagctgggggcggagctgcgcaagatgtttgtggcccccgcggggagggtgctggtggacgcggactactcccagattgaactgcgtctgctggcccacattgcgggggacgagcacatgattgccgccttccgcaccggggaggatatccacaccgtcaccgcctcccaggtgttcggcgtgcccccggagcaagtgacccacgagatgcgccgccgggccaaggcggtgaacttcggcatcgtctacggcatctccgacttctccctgtcccaggacatcggggtgacccgggcggaggccaaggcgtatatggagaagtactttgagaaatattctggcgtccacgcctatatgacccaggtggtggagcgggccaaggccgacggctatgtgtccaccctcatgtgccgccgccggtggctgccggagctcaagtcctccaacttcaacctgcgctccttcggcgagcgggtggcgctgaacatgcccatccagggcaccgccgccgatctcattaaaaaggctatgctccgggtggacggccgcctgcgccgggaggggctggaggcccggctggtgctccaggtccacgacgagctgattgtggagtgccccgagggggaggcggagcaggtgcagcgcctgctggccgaggagatggagcatgtggccgagctggccgttcccctcaccgccgaggcccacgcgggcaagagctgggcggaggccaagggctgaccggctctcccggcggattttggccggcgttttgacggtaggggcggctattagccgcccgcgggcgcacaaagtgcgcccctacatgggttccgcctgtatggatcgaaaggagaggttgctatggagctgcgccccattcctacccggggctgggcggactggtacacccaagagctgtgcgcctcctttcccgcctgcgagtgcaagccgctggaggccatccgcgccctggcggcggagggccgctatgagctgttgggcctctacgatggggcggccctgctgggctacgccaccctgtggagcactccggagtggccggactatgtgcttctggactatctgggggtgaccgccgcccgccggaacggcggtctgggcggggccatcctgaagatgctggccgcccgggaggcggggcggcggacggtactcgtcgaggccgaggcggagcgctccggcggcccggaggaggagcggcccctgcggctgcgccgcctggggttctatgcccgaaacggctgcacccccgtttatgagagcttcaactgcggcctgctctgccaggtctttgtgctggggcccgccccggcggatcgggcggatctcaaggcggcccaccgggccatctacggcccggcccggacggacgtggtcatagacccgccccccggcgcggtgccggagccgccctactggatgtaacagaggtgttgacatgatacaactgcaagtgtgtttctgcctgctggggctggcgctggccgcgctggggacggcggtgctcctccggccccagaggctgcggcgcttcctgcggcggctggacgcccggctgtggaagtggacggggcggcggctggcctggagccggctggccggcagcggcctgctcctgctgggaaccgtcctgttcctggtgctgctggcggccctgctgctgcgggcgctctactgaggggggcggagggatgaactacaggctgattcccatggagcgggcccatctgccccaggcggcggagctggagcggcagtgcttctccgatccctggacggaggcgcagctggcgggtgagctggacaacgagctgctctccctgtcggcggccgtgggggaggacgggacggtgctgggctacgccgaggtgcgggtgatcctggatgagggaaccctggagcgcatcgccgtggccccccgataccgccgccagggcatcgcggaggccctgctggacgcatacatacagtacggccgggagcacctggccttcctcaccctggaggtgcgggcgggcaacgcccccgccatcgccctctatgagaagctgggcttccgggaggtgggccgccggaagaactactaccgtgccgagcacgaggacgccctgctgatgacggtggagtttgaccgccatggctgagctgcgtctgctcaccgcccggcagctccggcaggtgtaccgggagcgggtacgatccgattttccgcccagcgagcggcggcctcttgcctctatggagcgcctgcgggcggcaggggtatacgacacctgggggatgtacgagggagaggagctgctggcgtacgctttcctgtggcggtcggaggcgtacggcgtggcgttgctggactatctggccgtgtgccgggagggccgggggcggggaaccggcaccctggcgctttccttgctccaggcccgctatgggggctgctccctactggtggaggcggaggcccaggaggagagcgccccgccggaggaaaacgccctgcgggccaggcggctgtccttctatgagcgctccggcttccggcggctggactaccagacccggattttcggtgtgcaatacgccatgctggtgtggccggaggaggacgccgcagagccggagcggctccaggatgcccaccggggcctgtatcggggccagctcccgaacccgctgttccggcgggtgatccacattccggcagacgagcactgaggcggagccggctttttccgccgcctgatatgtacctgacgatcccgcaagaaaggactgattcggatgaatatcctggcctttgaatcctcgtgtgacgagactgcggcggcggtggtgcgggacggccgcaccgtgctgtccgatgtgattgcctcccaggcggatatgcacgcagtctacggcggcgtggtgccggagatcgcctcccgcaagcacgtggaggccatcgccggcctggccgaccaggccctggcccgggcggggctgacccgggcggacatcgacgccgtggcggtcacctacgcccccggcctcatcggtgcgctgctggtgggggtcaacttcgccaaagcggcggcctatggactgggggtgccgctgatcccggtgcaccatgtccggggccacatcgccgccaactacatcactcaccccgagctggagccccccttcgtctgcctgtgcgtctccggcggcaacaccatgctggtagacgtgagggactacacggacatggcgattttgggcgctacccgggacgacgcggcgggggagtgctttgacaaggtggcgcgggtgctgggcatcggctaccccggcggcgcgcccatggacgctctggcccaggggggggacgaccggcgctatgagctcccccgtgcccacgtggccgacgcgccgctggacatgtccttttcgggcctcaagacggcggtgctcaatctggcccacaacgccgcccagaagggggagacgctggatctccccggcctggccgcctcctttgccgccgcggtgagcgataccctggtgccccgcaccatggaggccgcccgccggacgggctatggcaaggtggccgtggcggggggggtggcggccaacagccgcatccgggccgatctggagcgggcctgccgggccagcggccacaggctctacctgcccgccctgtctctgtgcggggacaacggggccatgatcggctgccaggcctactacgagtatcaggcgggccgccggggcgatctggcccttaacgcctacgccacccgctccatcgagcagggctgagacaaaatgcaccgccctggaaaccaaggtttccggggcggtgcatttttgacagagggcggcaacgggatgcaaaattgtgttatgtctactatgactccaaagcggccaaaagtggggacttcggttgaagcatgtggataactgggtggataagtgcataactgactgggacgctaaggaggagagggggtggaaaacccggtggacaatgtgaataactctctgtagaggcgctgagatgggtgaattatgtcaaataaatggagaaaaaatccagggggaaatgggggcgaaacagaaaaaacagggcggtgactgactggtttttcgtctgattgggccttgacaggcgggcagagcaggggacacacccggcccgcccggcaggaaatttgcagcttttccgccgcggggcagaggcgtatacaatgggtattgaacaggaataaaacttcatgcgccacgggcgcaccacgaacacaggcaaaagccggggcgtatgaagtttttgcgcatgtgggccgtcccggcccccgcgcttttaatttcatggccgtgccgctgaaagcggcacatggccaattttgctatgcttttgcatagcaaaaaaccggtcgcagcgcacgctgcgaccggtagaacgtgggagtagctcaggccagcttggacttggccagctcggtcagggtggtaaaagcggccttgtcgttgacggccagctccgccagcatcttgcggttgatctccacaccggccttcttcaggccgttcatgaaggtagagtagttcatcccgttcatcttgcaggcggcggaaatgcgggtgatccacagggagcggaagtcgcgcttcttcaggcggcggccggtgtaggcgtaggacagggacttcatcacctgctcgttggccatcttgaagtgcttgctcttggcgccccagtagcccttggccagcttgaggaccttatttcttctcttgcgcgtcatcatcgcgcctttgactctagccattgtaaaaagcctcctatgttaaggtaaaaatcagtcctatcttatttgtaggggatcatgcgcttgatggcgggctcgttggtcttgtccgcataagcgccggcgcggaggcctctcttgcgcttggtgtccttgtcgtgaccgttgagcaggtgacgcttgttggcgtgggcgcgcttgaccttgccggacttggtcaggctgaatctctttttcgcaccgctgtgagtcttgagcttaggcatggtggtaaaactccttttctttcaattcaaaacgtgcggggttcaggacttcttggcttccttggcaaccttgggggagaggaagatggacatgtgccgtccgtccagcttggggtccttgtccaacgtggcgacctcgccgcactgctcggcaaacttgagcagcaggcccttgccgatgtcggtgtgagccatctcgcggccgcggaagcgaaccgtgaccttcacccggttgccctcggccaggaacttctgggcgttgcggagcttcacattgaagtcgttcacgtcgatactgggagacatgcggacttccttgatctccacgacgtgctggtttttccgcgcctccttctcccgcttggtctgctcaaacttgtacttgccgtagtccatgagcttgcagacggggggattcgcggtgggagagatcttcaccaggtccagattcgcgtccatggcgcgctccagcgcctcccgggcggacatgatgcccaactgctctccggtgtcggagaccaggcgaacctccttgtcgcggatctcttcgttgatttgatgaccctgtttgctgatacgaaagcacctccaattctcagatacatacaaaaaaacggctaccagtccggtacccgcatccaacctgaacacgcacgcgccgcattgggcgcgcacgggaaacctgattgacctctttgccgtgggctggaggtgaggatgggggcaccgatcctgctttgttttgctctgatagtatagcagaccgttggcgtagtgtcaagagaaatttcaaaggcccggttggggcttccctttttcggagaaatgtggcaaactaggggcagaggagggaatgagatgcatcatccgattcgcatacgcgcgcttcggctgggcctggcggcctgtctgctggccggggcgctggccggactggcctctgctaacgcgcctacttatgaaacgacgattctgttcacccatgacacccacgaccacttcctccccatgccggatgaggagggcggggaatacggcggctatacccgcctggccaccctgatccaacaggagcgggcagcccacccggacgccctggttctggacgccggagacttttccatgggcagtctgttccagaccatctacgccacggaggccccggagctgcgggccctgggcgcgatggggtacgacgccacgacgctgggcaaccatgagtttgactaccgcgcccgcggcctggcggagatgctcaacgccgccgtggacagcggcgatccggtgccccccattgtccaggccaactacaagcccccggaggaggacgcggacacctgggcggcgtgggaccgctacggcatcggggactacctgattctggagcggggcggcgtccgctacggtatcttcggcctgatgggggaggaggcggacagcaacgcccccatgtcgggcatggagtttgagccgattgccgatgcggcggagcgtaccgtggccgccctggaggaggcaggggccgactttatcatctgcctgtcccacagcggcaccgacggcaggggaaagggcgaggactacgagctggccaagcgggtggacggcatcgacgtgatcctctccggccacacccacaccaccctggacgagcccctgcgggtgggggacaccctgattgtgtcctgcggggagtacaccgccaacctgggcgtcctcaccgtggagtggaagccaaacggggagaaaaccgtggccgactaccgattgctccccgtggatgagacggtggcggaggacccggacatggccgccatggcggcggccttccagcccctggtagaggaacagtacctgtcccagtacggcgtgggcttcgacgaggtgctggcccggtcccccttcgcctttacccccatcggccagttcggcgcggagcaccgggaggacaccctgggcagcctgattgccgactcctacgtatacgccgtgcagcaggcggagggggcggactacgtgccggtggacttcgcggtggtggccgcgggggtgatccgcggctccttccccgctggggagatcaccacctccgacgtgttcaatgtctcctccctgggctccggggcggacgggacgccgggctatcccctcatctcggtgtggctgacggggaaagagctgaaggacgcctttgaggtggacgcctcggtgaccgctctcatgccggaggcccagatctacggcgctggcatgacctggacatggaacccccaccggatgatgttcaataaggtgaccgactgcgcccaggtgctgcccgacggctccgctgttcccatcgacgacgaccggctctaccgggtggtgaccggactctacaccggacagatgctgggcaccgtcaacgaccagtccttcggcatcctggccatcacccccaaggacgcccagggcaatgtgatcaccgactatgaggagcacattatttacaaccccaacggctccgaggtgaaggaatggtacgccctggcctcttacctccagtccatgggagaggtggacggccgctatgccgcccccgaggggcgcaaggtagagcacgccacctggaaccccctgaacctgctgaaaaacctcaacctgtttggctggctggccgtgctcgcggcggtgctggtgctggccgcagtcgtgttcctggtgtggcggctctgctttcatcaccgccggggccgctacggcggcaggcggcggggcggcggctaccggccctaccggggataaaggaagagagaaagagagaatatatgaaggagaacaactacgacaacccggggttttttagccagtaccggcgcttcccccggtcggtggagggcctctccgccgccggggagtggcacgcgctgcaaaagctgttccccgacttttccggcaagcgggtgctggatctgggctgcggcttcggctggcactgccgctacgccgccgaccacggcgcggcggcggtgatcggggtggatctgtcggagaagatgctggagaaggcgcgggcggataccttcgacggccgcatccactatgtgcggggggccatggaggaggtggacttcccgcccgcctcctttgaggcggtgctcagctcccttgcccttcactatgtggaggagctggggccggtgttccgcagggtgtgggactggctggcccccggcggggactttgtgttctcctgcgagcacccggtctttaccgccgagggctcccaggagtggtacccaggccccggcggtgcgcccctccattggcctggggaccaatacttcaccgagggccgccgcaccgcccgcttcctgggctgcgatgtggtcaaataccaccacaccctgaccacctatgtccagaccctgctggagaccgggtttgtcctcagggccctggtggagccgaagcccgattcccggctgatggacgtgcccggcatggccgacgagctgcgtcggcccatgatgttgctcctgtctgcccataagccggaataaaacgacgagagccgtttcagacagagaacatgtgctgctggtgccctgtttggagggagtgcaacccggagttgcggatttgagtgcaggtggtaggtggtatgcagccgctgaaacatgcatgatttaagtacggccggtcacggctgaacttaaggaggattcaaaccgtaagtgtatcaaagcagctcattcatctgagaagcatataggggatctcccaggaggagttggcctctttgatgaatggaaccagataggcggtaccgaaatgggagaccgacctttcacatactttaaaatatagatacagaaaccgctcccacacttgggaagttctaacagttgcccgacaataaacgatattcggcctccgtcctgctccatgagagaggcaggacagggaccgggcccagaaagtgaaaaaagggcttgtcaattttgctctgactgggtaatataggagccaagaggtacagaaatattgcgtcggatcccaggtgtagcgagcgcctgaggccctatgtgggtgacacgaccacccatacaacggaaaatccgtactacgctgttgttataacctttcctgccccattctggcaagagggttttagcggctgtgttgcagactgatatgctgtgtggggatatacataccccgcacagcattttttgcctcttgcggaagggccaacagggggcagccgccccccaagggtcccgacgcaagagaagcaaaagcacaggaggccgctgatatgaagaaaaaagtcaccgacttatcccaggcgctggccgtgggcttgcctgtcccggccagcgccgcaggggagaccttttccgacgtccccgccccgccctgggccgtccccgcagctccggagtggaagaacggggggaaggctgctccgtccgatccgtatctcgttccacccctttgaaagtgcgtattcaaccagattgccccccggcatagtgttccactcgtactgtccgcagaggacacaggtaaggccgtgggcctccgctatggccttgaatttcccggcgcctccgtcctgtagtaattgcgtcagcaagtctcgcttgcgagcttgcttgattaccatacgacacaggcgaaacaggccgtcaagactggtgtagccacttgcgaaaaaactgccccgactcttacgaaaccgggacagacttttttcggtcctgaccgcctgaggcggctgtggcacggtgggcattccctacactgtgtaatccctcagtacggaggctttctgctcagcgtccaaacaatacttaaacaggagcagtaagttcagctcctcccggcgataaatagggcttttcgggatgccatcccctgtgatatgtgtgacaacggcgaacatggattgaaagctatcctcattccattccagctcccttgcctgcttctccgcaagctgggatatgcgttccgcggactttgaaattttagatcgtcccctgttccaaattgccagccattgaaacaggtccggggaaaaaagtttatgattgagttctcctactaaaaaagacagcttgcgctggttgattgcttctgttatgtgtcttatgcagtcatcctcaaaggtactgatagccttcctgaaagcaatatcatagctgtcaaggcttttacaggcggccagattatcaagcaatatttgtgcgattgtgggctccatatggagcatggaagccctcagagcttctacggaaatttcctgtgtataggtatcgagataagctttcctttcgtattcccgataaagccgctcaatctcgcttttgacctgttgctgtccctttctgatggcattctcattcgtcctgtcggatagaacggcgctttcaaatgcggctgtcactatgtctatacaagtctggcactccatatcgggccaagtccggtcatacagatagccgccgatggtttcctctccatactccacattttcatctgcccatcctttacggcggtcgttgaacgactccgcaagtgcggatttaaggtttgtgaccgataatccgtggcggtttccgatttcccggattgtaggtcccaaacgcctgtcaagcgtgtcctttttcttcatcggagaacactcctaaaattataataaaaatatctaatttcgatatagtgataagttaaaatatccctggttttcacagtgtgatccatgcgagaatcaaaatgtgcgtttttagtatattacaaagcaaagtgcgtgtgaattttctgcttttgtctgctttcctggtcctgcatagagcctttctccagaggtgggaaatagtagaataattgcatatctagagcggagcaagcgtccggtcagtgcggcatggaagaagattgaagcccaccctctgacggacagccgcgatctggaaaatgaaatttaggcatcgactataattgtcttttggagcggttatggcggcgcggagagcggcatcccatcggcagccgacggcaggccatgatcgccggcaaatacggcggcgtgttttgcaatctcccggatgggaccgtgtgcatgtgtattactcctaccagcatgaggactccgatttcctggtaggagacaccgtgattctggtagtccagcggtatgcggaggagaaaaagcagatgtacggcaaaatcctctcgaagtggtgatccaaaagcgaacaggcccgcccctttatagggggcgggcctgtcacctttactaactcaaaggtccatacccatattattttgtgaaggaaggtcagattgacatatgaaagtgagacgactcgttgccttgtgtacggcaatgttcctcagcctacagatggcggggctccccgcctccgccgcgggcagattttccgatgtccccgccggttctcccttttatgagagcgtgacctatctggcggagtgtgggatcacagccggtacgggcggacacagcttcagcccggagcgtcccatcacagtccgggagtgggctaccgtgctgttccaggctttcgatggaagtaccttgtcctgcgattccccaaaggagcggtccgagctcagtatccagcggtgctatcaaaacggctggctgggcgtgagtgctgccatatcccctgatgggactctctgccgcggagaactgctgctcagtgccttccatacggccggactgccggtatacaacgcctctctctatggctatgaggaggcaggatgtctccgcaggaaaacgcggtacgcattggaaaggaacttggactgtgccccgaagcggccgcaccatttggagtgcagttgcttccgtctctcaatagaaaaatctttcaatcgacgatctatggaagaaaaaacagcagcaggatgctccatacgagcagtattatggcacaagtccgtaggttctactgatagtaggtctgggagagcgtgcaataaactacgaatgcgattagcaattatgatttatttggggcgataaaaattttggaagccccttcagcaatctgaacttcatatcgctgcccacgataataaaagtgaaactgcatggatacaaggccattggggagatgaggggacaactttggaacgccgttctcgatatgcagtccggcaaagccaaagataactgtattccaagtctcaccgagacaggccagatggagcccttccttgcccgtgttgcccataacctcctccaggtccagatagagggccttccgccagtaggcttcagcggcctctgccaggccattctgggccgcaaagagggcgtggctggcaaagctgagggtggagtcatggatacacaggggctcaaagtcctcccaggcggccagcttttcctcttcggtaaactgctctggcagacgggttataaggagcagcgtatccgcctgcttgatcacctgatagcgttggagccggtcgaagcagacctggtgatagctggcctcgtcgccggatttgagctccgccggctcaacgcgctccagcaggtggaacgtatcgtcctggcggtagtgaccggtgattggatccctgggaagctggatggcatcgcgtagtatctcccaagcagcgcactccgctttggacaggctcagggccgcatactgctccggcgcctctttcttcagccgtgcggcggcggtcagcgccagagagagattgtgctttaccatggcattggtgaaaagattgttgctggtaatgccgcagtattcatccgggcccttgcagaacagcagattgaccttcccggcttcgggggcgggagagtaacggctgacccagaagcgggctgtctccaccaacacctgtgcgcccccctgaaagaacaggctgtcatcgccggtccaatccaggtattggcccagagcataggccacgtcagcggtgacgtggacctcgctgcacccgatgtcccagctttcacactgctcggtgccgtcataagacaccatccaggggtagcgggccccggcgccattcatccgcgccgcatgcgctctggcctggggaagcgtgccgacccggaagcccgccagactgcgggcagcctttggatcggtcaggtcataaaagggcgtcagaaagagatctgtgtcccaaaaatagcagcctttgtaccgcgtgtgggtgagccctctagccccgatgctcacggtgtggtcccgaggagagcagttggccgccaactggtagatcacataacgcagcgccgtctgcgcgtcgtcatccccctccatgacaatgtcgcagtccgcccacttttgctcccatgcggcctgattctccgccagcgcacttacaaagtcccagcctggctccacatccagctggagcaggggatccacatcgcggctggaagtcagccgggcggcgatctccaaggcgatgggagcatcggaagcgtcactggtgcagcgcactcccacgccgtcaccggtatctgcaacaaaagcgggggatgaaaagccctctgtgcggcaggaaaccgtctgagccagttctagccttgtgtgatttgtcttatagcgggcggtgaatccggcgtcggtcgcctcgccggagcagaaacgggtcatctggatgatctgggtgttctccttcacctgatcgtctgggatagggctgttgcagctctggtggtcgatcccggccaaaagctccacctgcccgcggccctggaattcaagccgctggaacagaaagctaggcttggccaaggagaaaaaacgctgttcctgcacatccacccagtcatccgcaatactcagccggtaacggaaggtgagcagccctgtacggagatccagcgcgcgggacaaatgggagggaatggccggtgtgcggccattcaaccggatctggtaccagataggggtgggcagattgacaaaatccgtcagctctgtgctgtcggagatccggtcataaaagccagccaagaaaagtccggcgtccaacggccggcggatcggccggtaagcggggtaaccccgggcccccatgcggccgttgccggtaaagaagacgctctccaggaagcggtcggcaagatcgttcccctccgctgaaattgtccagccccggcgcttcacgtcagtgctcataggacacgcctcctaacgcataccgcagggcgtggcacacaaaccccgcgcaagtggcaaaggcgtctcccgtcgcggatcggcccgtgtgctcatcgatgctctcacagacgatgccgttgtccatcaccgcccggcgcagaagatccaacgaccgctccgcctccccgctgagcaggctgttggccacactcaacatccagggatggggggcgtgggcgcagccgatttccgcaaaggcgcacccggcgaagctgtaaggatactccggggcgcggatctgacgcactgtattctgatatgcggggtcatccggcgcgcagaagcccaggtagggcaggagcagcaggcttcctggcggctcgtcatatacatctgtatggccctccagatccgtggaccaggcatagtatgggccgttcgggccctggacaacacagtgctccaggatcgaccggcggagctcctccgcctccccggcaaggtcgccgtatgtttcaggatacagggaggacagcgcgcgaagcgccttccataccagcacattgtcataggtcaggtaggggtagctgcgcacgtcatcggtgggctgaaggaaggtctcgtagagtgcgatcgacctgtgccgtttggtgcgcaaggtgcgcagaatatccgtaagcccggagcggatcgcgttgtcctccagacagtcccggtcgcctgtggcacccacatagcgctccagggccagcaccggggccatcagttcatccagctcaaaaccaggctccaggactgtgccgtcgatgtaccgcgagtggacgcccaggttgcgccgctgacggccgaatacatagtccagcatccggcgggccagtgccgggtcggcgtccactaccgtaggaaagctccacagcaggctgtcccggtcccagtaagccgcgctcacatagtagcgcgggctgcggctggtgaccagaaccagctcctcggtatccaaggtgatcccggcggagtagaacaggcagaagaacagattggtattgtagaggcgctccaactgggcatccggaatgggccagcggcgggcgtccagccagtctgtggtcacctgtaactcgtgctgccagccttggcgcagcatctccttggcgctggtggcggccgccacctcctcgaagccgaccccccagtagaaggtcacagtaacagcttctccgggttccagcgtgcaggcgtgggccagacggtagacgataccggcatccgtctcctgaaaggtggatgagcagggctgatccatcatgggcgcaaaagcaaagaggggcagtccgcagcgcatatcaaagatcagactgtcgttccaaaggctggtgtagcatctgcgcgccccgtcgatctccttgtcttcgttgacgcagtgccatgcggaggcccagcacccttccagaccgaaagtagaggacagcggcttatccgatgtggagcgtactgtcagctgatagagaaaaccacgttcccccaccggagccagaagcattccctccaccgctagggagccggccgtgccgcagaaggtcggaatccagtcggatttccgtccccaggtcagagactgaagcgaggccctttctccttccgtctcaaaaaaaggcgtcatcagcgggagagaagcgccgcccctctgctcgatcaggcccttatatcccatgtgcaggaaggaaaaggactccagcgccccggtgcgggcctggagagtgggaagagagacccactcgttgccggtaggcaaataacactcttgcatagagatccctcactgtcggatttaatcggttaaaccattggcaatctaactataacatattttgggcgcaagtcaataattgttttgtgaaaaatgttaatttatatcttgacaatagagttgttattggctattatttgcttatggaatagtttaaacgattaaattaaacgaggtggtatagcatgtcggccaatcgggtcaccatgagggatgtcgccaaagaggctggcgtcaccagcgcggccgtctcttatgcattgagtgggaagcgcccgatttctgaggagacacgccggagggtcgagcaggccatcgagcggctgggttatacaccaaacatggcagcccgcaccctgggcagcgccagacaggattccaggctgatcggcgtagtggtccctcagaccgaggctggaagccgactcatgtttcagaaccagttttactctgagatattgggaagcattgaactgtgcgccagacagaaaggctaccatgtgatcatctctgctacggatgccaacgagagctatctgaccctggcaaaggagcgcaatctggacgggatcattgtcatcggcatgtatccggattccttctaccagcagatgaaggagagccggatccctatcgtattgatcgacagctattgcaatgaccactattaccataatgtacgcatcgacgatgcttacggcagctatctggcgaccaagtacattttggactgcggtcaccgtgccgtcgcttttttcagcggccgcatcaaggaaaacggcgtcatgaagaaacgcctggccggctatcgggacgctctggcagagtatgagcttcccttccgagaggagttggtctttgaagggaacattgactacaaagacggcatcgcgtctgcccaaaggctcatggacgcgggactccctgccacagcggtggtagctgcggcagatattctggcaatcggagcggcaaaagctttctatgagcgcggcgtcaaggtaccggacgagatctcccttatggggtttgacgatttggagattgcgcagtacatgaccccgggactgactaccgtaaagcagcagatctcagcgaagggggaaaaagcggtggagctgttgatccgcaatatcaatgagccggagttgaccaagcaggagttgatcctgccggtgtccctggtggagcggggctctgtccgcaagatcaaaacggagacaacctgaaaaggtctcaatatagggtaagagtggaacaacacatgtcttaattttgaaagggaggaaccatgcaatgaaaaagcggtctctggcgatcctggccggcggaatgtcgctggcgctcctgctctcatcatgcggcccgtccagtgctccgaccgaaagcccatcttctgcccctgctgatgaaaccggacagcagacggctgaggagcctgtgaccatcacctactgcaacttcaacgcgtccggcggcaatgaggaaaccctgcagaaaatgtacgaggccttccatgaggaatatcccaacatcacggttgagatcgaaaccatcgccatggatgactatttcacccaaatgcaaacccgcgtggccggcggcacggcgcctgactgctatgagctgaacatcgagaatttcgcctcctatgccaataagggcgtgctggccgagatcagcggtgtggacctcagccgcctggacgagactgcactgagcgcgttcaacgtggacggcaagcagtacggcctgcccggcaacttctccaatgtggtgctggtctacaacaaggacctgtttgaccaggccggcattgattatcccaccgcagactggacgcaggatgatgtgcagacggcggctgtggccatccgcgccttgggcgatgatatttacggctactaccagcctcttacttacaacgagttctacaaggtttgcgcccagttcggcggcagcctgctgaatgaggacaagacggagtttaccatcaactcccccgagaacgtggccgccgctcagatgatggccgaccgcgtgctggtcagcaacgtccagcccacggacgtgcagatgggcggcatgggtgactgggatctgttcatgagcggccgtctgggcatgatccccaccggtatttgggcattccagtcctttgccgatggctgtgactttaattgggatatcacgattgagcctggtcaggagcaaaaggccacgcacttcttctccaacggcctggtgatcaatgccgacagcgagcacaaggatgccgcggctacttggatcacctggctggcctccagccccgccgctgctgagatccgcattgaggcgggctgggatctgcctgccgtcagtgacgaggataccctggcctcctatctggacatgacgccgcccgataaccgccaggctgtgtttgactccttggactatctggtggtaccgccagtgatcgaggactatgccctgatgagcgatatcattggtcagaagctgtccgccgccgccaatggctccataaccgtacaggaagccctggatcaggcgcagagcgaatgcgaggcgcagatttcccttagctgataaggggtaggggaggggcttgtgcccctcccctgttcgattttctgaggaggtgtttcccaaccatgttagtcaaacggaagcggcgaaagggacccgggcaggaggggctgatcaccgcgtctccctttttgatgcccagcctcattggcttgctggtattttccctgctgcccttgctcatatccgcctttatcagcctgactgactggaacggcttggatcagttgacggcccccggcttctttcaggagcattttatcgggttggataattataaagccattctctccagccccgagttctggggggtgctgtggaacaccttccgctatatcatcatgtacattccgctgatgctggtggcgtctctgggggtggcctatctgctcagccgccagcgccccggcgtaacagccttccgtatcatctactatatcccggtgctcacctcctgggtggcagcctccatgatctggaagtctatgctatccccggagtatggcgcggtcaacaacatcttggccgttttcggtatacaggggccgggctggctgctggacgaggcttgggccatgccggctatcgtactggtgtcggtatggaaggatatggggttctttggtctcatccttctgtccggtatggtgggcatcaacaagtcctactatgaggcggcatcgctggacggcgcaggctcttggcagaagttctggaagatcaccttgccgctgatgaccccagctatcttctatgtgctgatcgtcagcctgatcaacgcattccagctcttcccgcaaatcatgatcatgaccgacggcggccccaatggcgccacacaggtcatggtggagcgcatctacaagtatggcttccgctactaccgcatgggctatgcggcggccttctcctggatcctgttcgccatcattatggtgtgcaccgccatccagatgaagggccaagagaggtgggtcaactatgacagctaaacgcagactgggcaccacaggctattatgtggtctccatcctcattgccgtggtggccatgatccccttcctgtggatgatctccacctctctcaagagccggggtgctctcatgtccatccccattgagtggattccggcagagccctcgttggatgcctatggtgaggtattttcccgttttccattcctaaagacgattggaaacagcctctttatttccgtgtcctacactgtcatcaccctgatttctgcctcgatggcagccttcgcttttgccaaaatccgtttccgctgcgcgaacctactgctcaagctctacctggccaccatgatgatccccacacaggtgaccatgatcccgctctttgtgatcatgaatcggctgggcctgatcgacagctatgccagtgtgatcctcccctccatcttccgcccctttgcagttttcatgctggttcagcagatgcgtaccgtaccggcggactatttggatgccgcacgggtggatggggcaaacattttccaggtctattcccgggtggccctgccgctgtgcgcgccgaccctggcgacgctggcagtgaccacttttatggagtcctggaacgactacctctggcctctgctgatgttgaccgaccgggccaagatgaccctgcccatcgccctgtccacactgaacggccagtacaataccgagtacaatgtgctgatggcaggcagcctgatctccatgatcccaattatcatcatctacctgttcgcgcagaagcacttcaaaaacggcctgatggcaggcggcatcaaggggtgaaccaatgagagagatattgtgttccggccaggcgcagtccctggagtttccctatccgggcggtatggccgccctctgctggagccctgcgggggagcggggggagttgacggtctccctgcactatgacggggcctatggcatgggagagaagtacaatgccgtgaaccagaagggacatacggcggtcaatgtggtggaggagaagttctgctttcagggagagaaaacctactgcccggcgcctttcttctggacaaatacgggcttcgggctatatgcggccacggatgagcgcaccagcttccgatttggtgagaaagcggtttgcgcggagctgcctgtggattgccgcgtcgtgctgttttcggggatgcccggagagatcattcgggattacatggatctgttcggcccggcaaagctgccgcccaaatgggcctttgggccgtggatctccgccaaccactgggacagccaggagaaagtggagcgggcggtggcgcaggcggaggaacacggctttccagtctgcgccttggtggccgaggcgtggagtgatgagactaccttttatgttttccggggcgcaaggtatgttcccaagccgaatggcggcgcattccggctggaggacttcgatttttccgattccccctggccggatcccgctggtatggtacagcggctacatgaaaaggggatccgtttccttctgtggcagatccccgtctacaaaaagcaggggccggatgagccgctcaatgcgcaaaatgagctggaccgggcggatgccgtcgcccggggcctctgcgtccacaacgcagatgggagtccctataccatcccggagggacactggttcgccggctccatgatccccgacttcaccaaccctgccgcagaggagacctggttttccaagcgaaactatctcacagagatggggatagacgggttcaagaccgatggaggcgagttcatctaccgggaagatgtgcgctttgcggatggcagctccggccgggccggaaagaaccgctatgcccaggagtatacggcggcttacaccaaacatctgggttcggctcaggcgctgttcagccgggcgggctacgctggtcagcataccacgcctatccattgggctggagatcagcagtcccagaacagcgagttggccagcgccctgcgggcggggctgtctgctgccctgaccggcatcccgttctggggcttcgacatcgggggctttgcagggccgctccccacattggacttgtaccgcagggctacacagctggcctgctttgtaccggtgatgcaatggcactccgagccggatggagggcagttccgcgagttgatgcctgggggagaggggaacaatgagcggagcccgtggaatctggcggcggcttacggtaagccggagttcgtggacgagatgcggttctggcataatctgcggatggaacttctgccttacctgtacagtgtcgcgctggattgtgcggaggcctccaggcccatgatgcggccgctggtctatcagtggccggaagatccgctggtatgggactgcgaagatgaattccttctgggtgacagtctgctggtggcgccgctgctggaagaaaacgccgagaagcgcgcggtctatcttccggaaggacagtggatcggcctgttcgaccgccgcgcggcggccggagggcagaccatcgtagcgggcggagaccggaggctgccggtctttctgcgggcgggctatggtctggcgctccgttctgatgcgaactcggcccccggcgctccggcgggagagcgggcagacggaaatgctcctctgcacctgctgttggctggggaatgcgggcgtttccgcttccgggacgagctgggcaccgacttggatatcacctggtctgatggagccgtccacatagagggcgactaccgattcctgctgacttgggaagtgctccccgtggaggaatgctgatatggggatgtgcggtatcatttttgatttggacggcgtgctgtgctataccgaccactaccattatcttgcgtggaaggcgttggccgataggctgagcctgccttttgacgaacaggtaaacaaccgcctccgaggtgtcagccggatggagagcctggagattattctgagccttggcagcaagacctactcccaggaggagaaggagcagatggcagccgagaaaaaccggctctatcgcagctatctggagcgtatggggccagaggcactggcccctggggcagtcgatgtgctccgcactttgcgggagaacggctggaaaacaggcatcggctcctccagcaaaaacgcccccctcattttggaacgaaccggactggacggattctttgacgtggtggcagatggcagtcagattaccaagtccaaacctgatccggaagtgttccagctggcggcgcggaaattacgcctttcccctgatgagtgtgctgtggtggaggacgcctccgccggaatcctggccgcaaatgcaggaggctttttttccatcggtcttggggacgccgcccaggcccccggctgccgcgccgtcctaaacgctctgtatgaattgcccgaactctgccggcgcttatacagccgcgccccaaaattcaagccttccgaccctactccattttcatagggcggaggagcggtcaaaaaggaggaacacccgccgggccggcggtgcggcagtgtggagacctgccgtaacgtccgcagagtgacgctctctgcgggcaagagggtatttgcggaggcattgcccttacggccctgaacatggcaactgtatccctgaagaatgtgaagaagatctatgacaacaaggtgaccgcggttcacgacttcaacctggagattgcggacaaggagttcatcgtcctggtcggcccctccggctgcggcaagtccaccaccctgcggatgatcgccggcctggaggatatctccgagggcgatctggtcatcggcggcaagcggatgaacgacgtggagccgaaggaccgggacatcgccatggtcttccagagctacgccctgtacccccacatgaccgtatatgagaacatggccttcgccctgaagctgcgcaaggtgcccaaggaggagatcgacaagaaggtgcgggaggcggccgagattctggacatcacccagtacctggagcgcaagcccaaggcgctgtccggcggccagcgccagcgcgtggccatcggccgcgccatcgtccgtgatccccaggtgttcctgatggacgagccgctgtccaacctggacgccaagctgcgcaaccagatgcgcgcggagatcatcaagctgcgccagcgcatcaacaccaccttcatctacgtcacccacgaccagaccgaggccatgaccctgggcgaccgcatcgtcatcatgaaggacggcttcatccagcagatcggcaccccccaggaggtgttcgaccagcccgccaacctgttcgtggccggcttcatcggctcgccccagatgaacttcttcgacggcgagctggagaagaaggacggcaagtaccagctcaaggtgggcgaggccaccgtggtgctgggcggcaaggcccaggagctgctggccgggaagggcgtgggcgagcggaaggtgaccgtgggcatccgtcccgagcacatcgcctttgccgctgcccctggcagcgataccgtgtccagcaaggtggacgtgtccgagatgatgggcagcgaggtgtacctgcacgtcaacgccgtggggcgcgacgtggtgctgcgcatccccaccaccgacctgcccgccgagcaccgggccggtatcccctacggcacggagatcaactttgccttccgccccgacctcatccacctctttgaccctgagaccgagaagaacctgatgtactaagggcattgctctccgccgatttgtagaaccgcccggacaaaccgcacccagaggaggtgagcgatggaactctgaagcagactgttttaccgaaagaaaaagggagggttgcgcattgaaaaagatttttcgagtctgtatagcattgcttctatgtttttctttggttaccccggcattcgccctggacggaatatggcacaatccctatggcattgatgatctctatgaccatgaacccaccgagatataccctctgactcccatcgccggtgagatgatctatatcaagagcacaacatggcctatcgaaccggggcagtctgtatggcttacctataccaaaaacggagagccacagcaggatgtcggcgcggaatggaagtacaacgatgggaataacagctattgggaagctgccatcggcccctttgcacagggcgatgttatagagtacaccgtttatgcagacaaagacgggcagaacacgcagtctatcggccccttctctttccacgtagtggaatgggaaagcgcgcagtctgtagaactcggttcgcaggaagagggtctcgttgttctgaatgtaacgtctgaccaaggagattccacgcctaagctgggactcagcttcccatctgctgatgtcctgcgcttccagttttccccgctgggagatgtggccttcgaggcaggggctgctgactacagtattgaagaggacagcaatagcatcattatttccaccagcgcacttgaagtgacggttacaaagtcgccctacggcgtggaagtgcgggatttggataccggcaaacttctgacgcagaacggaggcactggcagcgagctatcctggctgacggatggcgccggcctcgtgaaaaatttccgtggcaggtatgaatcgccttccagtgaaaagttttacggatttggggagcgttataacggaattgaaaagcgtggagaaacggtggatatttacgtttataaccagtaccagaatcagggcgaaagaagctatctggccgtaccgtttttctattccagcaagggatacggcttgtatcttgattccacctattacgctcagttcgatatggcagacagcgatccgaaccagtatacctttaccgtgaatacctctggtgatgatcctgtgctggattattatattatcagcggaacgccggaagaggtgattggcggctattccgagcttagtgggaagccccaggatatgcccaaatgggcatttgggctttggatgtccgccaatgagtgggatagacagtccgaggtgctttcggccgtagaaaacgcagaggcctatgacattccggcctctgtagtggtcttggaacagtggagcgacgaaaacaccttctatatcttcaatgacagcacctatacggcgaagccgggcggagaggcgttttccggcagtgactttacctacagcgagaaatggcctgatcccgcctctatggtggataccatccatgacaatgggatgaaggtgctgctgtggcagattcctgtgctcaaatacaccgattatgcctgggagcagaaggacaatgacgaggcatacatgattgagcaaggctacgccgtcggagacggcgagggaggccaataccgtatcccatcctccgggtggttcggcaatagcctgcttttggacttcaccaatccggacgcggtggactggtggatgtctaagcgtgcttacctgttcgatgatattggaattgatggcttcaagaccgatggcggtgaaatggtctggggccgcaatacctccttctacgacggaagcgatggcctggaaatgcgcaatgagtatccgaatgcctatatcgaagcgtattacgactttacagaggaaaacaccggtaccggtatgaccttcagccgcgccggcaccgcaggcgtccagtccaccggcgtattctgggctggcgatcagtcttccacctttgatgcgcttcaagattcgatcagcgccggtttaagtgctggtatctctggcatcccattctggggatgggatctggctggattcaccggcgatttcccaaccgcagagctgtacaagcgcagcacccaggcagcggcgtttgcgcctatcatgcagttccatagcgagaaggcaaatcccagccccagcgaggaacgcagtccctggaatgtgcaggagcgcaccggagatgataccatcatccccacgttccggtattatgtgaataccagaatgaacattctgccctatatttatagtgaggcacagcagtgcacagaggatggcaccccgctgatgcgtgccatgatgatcgacttcccggaggatccggaagcctacgacttagaagagcagtatatgtttggccggtcgcttcttgtggcacctgtcctcgaagaggggcagaccgtaaaggaaatctatctgcccgaaggcgagtggattgatttcttccacaacgctctcaccgccggaggcggcacaaagaattactactgcgatgtagattctatccctgtctacgttcgcaatgggagcattattcccatgaatctcaacgaagattatgaattgggcggctccatcggcaacgatgtggacaactacacgaatctgactttccgggtatacccgaagggtgatagcagctatacgcttgtccacagcgaccggtctacaatgaccgtaaacgccagcgaggactttaagaacggctcggtatccgtctctatccccgctgccgctattccggtcactacgcaagtgttcggcacggagccgactggtgtcacggtcaacgggcaggccatccagctcgctgctaccttggatgaattccaagctgctcagacggcctattactacagcagcagcgagaagctggtctatatcaagaccgccgccggtgacgcttctgaaattgagattgaggggatctatcaggctccctatgaagcggaacatgcggagcaggccaatgtagccgtaaacacagatcacgaaggctattatggtgagggctttgtggaccagtttgcctctgaaggctgtgcggtcacgtttactgtgtactctgacagcgacaccgctctgctggacgttcgctactctgcagggactgaggcggcccagcggactctgcttgtaaacggagagtccatactgctcgacctgccgaaaacgcaagactgggatagctggaacacagtatctgttcccgtcgaattgctgccgggacaaaatacaattacaatttcctatcaggcggggaacttcgctggaatcaacctagactgtatctcacttcggaatcagtgacgacttgaaccaacacagggaggtgcatggggcttccctatgcacctccctgttgtcttattaaggaggaactgtatgcgaacgataagaaaacggctgcttgccctcttgctgacggtcgctatgctgggtaccctgtttgcgggtcttccgattgcttcggccgcatcggaggcgctcggaaatgtgacggacgccgcagtagatggaaatacgcttttactgacgattgacagcggcgggagcgcgtcagatctgcttacgttggaagtatgccaagacaatatccttcgggtagattaccagccagagtctgtggaacccagcccagacaccccgattattgaccctgagcttacttgggataccactacggcaacggaaatcgacattaccggcgatcccattgtgatccagacagatggcatgcgcattgaaatcagccgtacgccatgccgcatgacggtgatgcaggccgacggaactacgctgttctgggaaccagagagcggaggcatctaccacgacggggtgcgcttcgtacgcgctgaatccagcaatatgtatggtattcatggatttgactgcttcagcgataatgggaaccttctgcggaacgacaacagctctacggccgcagcagggcagcagggaaattccggcggcccgtttatgtggtcaactgccggatatggtattctggtggactctgacggcggctatccctatacaaactccaccgaccgcaagatggaattctattatgggggaacgccggcggagggccgccgctacgagaaagaagacgtagaatatttcatcatgctgggagagccgaaggagattatggccggcttctccaaaatcacagagacatctcccatgatgccaaagtggtctttgggattctccaactttgagtgggatatcgacgaagacgagttctatgaaatggtagagctgtaccgggccaagaatattccgattgatggttatgcttttgattacgactggaaacgttatggcgatgataattacggggaattcacctggaatacggataacttcccctctgcggcctccacgcagctgaaggaggatatggaatccaagggtattaagatgattggcatcaccaaaccccgcgtagtgaccaagctctctgacggaacaccgactgaacaaggtgtggacgcagaggccggagactacttctatccgggccactatgaatacacagactacttcctgcctgtgactgtgcgcagcatcgatccctacaaagcagcagaacggaactggtggtggctccactctcaggatgctttcgatcggggcatcgttggatggtggaacgatgagacggacaaggtctcctcaaatggtgcagattactggtttggcaactttaccaccgcctttatttctcaggccatgtatgaagggcagcgggaatataccgatgacagcgtccgtgtttggcagactgcacgcaattactatcccggtacgcagaggtacgccaccagcatctggtccggtgacgtggcaacccaattctacaaaggagaacgggtatcctgggcggctggactgaatgagcaaaaggctgcgatgctgtccaccatcaataacgggcagcccaagtggggcagcgatggcggcggcttcaaccagaactccgggaacattgaaaaccccagtccggagctctacaccagatggctgcaattcgcttctatgagtccggttttccgcgtccatggaacaaatcatcaacagcgccagccttggtactttggtacaacggcggaagaagtgaccaagtccgccattcagcagcggtattccctgatcccgtacatgtattcttatgagcgggaggcctatgactccggtttggggctggtgtatcccctgctgttcgactatcccgacgacgaaaacgtggctgactactccgatgcctggatgtttggggagtggctgctcgttgcccctatcacagaacgtggtcaatccgtgaagtggatctatctgccggaaggcacctggattgactataatcgcggcactgtttatgagggcggccagtatattccctacagcctcaatagcgagtcttggaccgacattccgatgtttatcaaagaaggcgccattattccgacgcaggacgtgcaggactatgtcggacaggaaactgtggatcatgtgacggtagacatcttcccgagcggccgggagaccagcttccgctattatgatgacgatggagaaacctatgactatgaggacggcgtgtatttcacacaggaaatctccgcgcaaggtaccggaaataccgaagtgaagatcggtgcagtcgatggaagccacaactccggattggactactattacttggccgtccatggccaggcggctaccgaggttaccagcaacgggagcctgccctattatgatgactataatgcgctgttagcggcacctggagaaggctggacagtgggcaaggatgtgtatggggatgtaacctatatcaaggcctatgccgcttctgacagcaacagcacttacacgctcgaaggcagcagccccgtcgatgcggatggccagacctacgaagcggagtatgcttccctctttggtgcctctacagacacgcaggcctctgtgaaccagaatcactccggctactccggagcggggtttgtggataagctggaagccgacggcgctggcgttactttctatgctaaggtagccaatgcaggcgattatgacgtcaccttccggtatgccaacggtgatgcagcagagaaatctctgtctgtctatgtcaacggttcttatattggcaaaaccgccatgccctccaccggagactgggacacctggtcggattgcctgatgcagcttcccctggcggcaggaaacaacatcatcactcttaagcatgaggatgccagcggagacaccggctatgtcaacttggattcttgcaccgtgccgttctatccggaagtgatcaccgcagaggccgagaacgccgcgctctacggcaccgccggcacaaatcaggatcactggaattacagcggaagcggctttgttgacgggatgacttccgccggtgcgggcgctgggtttgagattacggttccgaaggacggaagctatgaggcctctatccgttactgcaatggcacccaggccacgaaagacctgaatctgtatgtcaacggttcctatatagagacaatctcttttggaagtatcggcggaaactggaacgagtggcaggagcttacccagacgctggagcttgatgaaggccggaatgtcgttgcgctgcgttacgacagcagcaactccggcaatgtaaatctggacaagctgtcagtgaagacagagccagacgccacaatttcggtccccttggtagacaatggcggattcgagcgggacacctcacagagcagcgcctggacagagtggcaccctgatggtcaggcagtggcctatggagtagactccggatctggcacaaatccgccagagtccccatatgccggggataagcgggtttacttctacagcagcagcgcataccaacagagcatccaccagggaatcaacctcccgaatggaacctataccgttcaagcctggataaaggtttccaatacggctccagacattggacgcatggaggtcactggttatggaggcgacagcatctatgttgatatgccttatgcaggaaccgggtggaggctggttgagacggatatcaccgttacaacaggctatctggacattgggttctactgctccagcctaggcggtacaactgtgcatatagataatgttaagattttgaataaatagcggaatttaatgagttaactaaaagattattatctaaatatacttaaatcgaagaacatacccgaagagggacgggcctccgcaaaagcggaggcccgtccctctctatcggattcgcatgtcaggagggggaaagctagacaaatgcaagagatagcgctggaacaaaggacaaaatcaacagcaatacacaggagaccaggaaaaatggtacgacccatttgagcatgctctccatcttgattttggctacggccgcacccacgaagaggttgcagccataaggaggcgtacacagaccaacagctaggtttaccgacatgacaacaccgaagtgtatgggattgatgttgaacgcctggatggtaggcagcagcataggcgcgatgatgatgatggcgggcacggtatccagaaaacagcccacgatcagcagaaacacattgatgaccagcaacaacactacagggctgtcggacagattggccatgaagttggtgatcatctgggggacctgttcgaaggtcatgaaggtggagaacactgtggaggtgcccagcaggaaggaagtaacgccgttgaggacagcggcggacacaaaagttttatacaggtccttccaagtcatgtcgtggtacacgaacagggacacgatgatggagtacacaacggagacagcggcggcctcagtgggagtgaagaagccagagtagatgccacctaggataataaagggagagagcagagcccagaacccgtccttggtggctttgcctacccggtgtagccgttctttccagaactggatcatgggaatcctttctccgccgggcccaagctcgggtttgtggacctcggtgccagtgcgcttgcagatgatgatgtttaccatcaaaaataccaggccgatcataacgccggggatgataccggccttgaagagatcaggcacggaggttttggttgaagctccgtagagcacaaaggacagggagggcggaatgatgggccccacgataccgccgaagcagaccagagtggcggcgtaggaggaatcataacccttgcgcttcatttcggggatcatcatgccgccgatggcagaggtggtggccatgccggagccggtaagggcgccgaagaacatgcaggccagcatggaaacgcaccccagggcgccggtcacaaaatcgatcagcgcagaggcaaagtccacgatccgccgggcgatgccgccagtggacatgatggtgccggccagcatgaaataggggatggccatgaccgtaaacgagaaaatacctgaatagcagtattgtgcgttgaccaccatgttcagatccgagaagaaaaacatggagatcatggttgcgccgccaatggcgaaccccacaggtacaccgatcgccagcaggacaaacagcaaaatcaacaggacaatgactgcatccatgcttaatcccccccttcccgggccttggtgtcagcgggtaatttgccattgatgagggtgagggcagagcgcttgatgctcaccagtgtgcggagaatcatcagtccgcagcccagcaccaccgccaagtagccccaggaggtgctgatcttgatgccagcatagggcacattgccctgagcgaccaccagttccacgccatagtagaagatgacggcgcagatgataatcacgacgatatcggaaatgatgttgacgatctgggccaagcggaaaggcagccgatccgtgagcatagtgattttaatatgctcgccttcccgctgacctagactgatgcccatccaggagatccatacgaacaggaatttccccagctcttccgaccaggacagagaattgccggccttccgcatgatgacctggacgaaaatgatgatgaccatcaaggcaaacatggagacgatgatgacttcttcaatgtgatttaggattgaaaaaaatctgctttttgctgaattcatagacaaattagatgtatcactgaaatacaccttttccccctctctctacagcatattataggttcccaaccaggccgtaccgatggcttaggcgggcctatatatagtttcctctagggtcagctctggggaacggtggctagccagcggtccatcagatcgtcgccgatctgcgcacgcaggtcgtcatacacaggctgcaccgcctccttgaaagcagcgacctcttcatcggtgagctcctccacagtggcgccttcctccttgaagcgctcaatatactccatttcgttggcgcgctcctcctcgcgctgctgctcgcaggccaaggccacgccctcctcgatcagcgcccggtcctcaggatccagggactcgatccattccagggagcacacaatggggaagggggagcttgcgtggttggtaatggtgatgtagggcgcgatctcatggatgttgaagtcattgaacacacccaaggagtggtcaagtgcctcgatggtgcctgtggagagggaggtcagcacttcgttccaggacatgggggtaggactaccgcccatagcgtcccaggtcttgatgtccagatcgttctgcgccacgcggatcttctggccatgcagatcctcggaattgtggtaggtactggtgcggctgatcacctgacgcattccattatagaacatgccaacgcagtaatagccggagggtgccaaggtctcgttaaacagctccagaccgccattttcaaaggtgccctgcacccagtcctcataggtggggtacaggtagggtaggtctaccgcgctagtcgcgggtccggacacggaacttaccacggaggataggtcgaactccatggtgagagtgcccagctttacaccggccaccatgtcgggggagtcgcccaactggccattggggtaaacctccactttgaaacggccgggcgcctgatcttccagccactcgcccagccaaacgctccacttgtgagtggaacgcgtatcagagtcggtatggccaattttgatcacaatgggttcctcagaactagtgctgccagtgttgttggcagaggggttatcattaccgccactgctggcactggggcggctacagccggagaaaagagccaggctcatggctgccgcgagagtaagcgctaaaatttttttccgtttcatagttctctccttcctgttcattgcagatggttctatctttcagcggataggccgcagacattcgccgtttaggccagggacaggatcctgcgggcctcgccggggttggcgatctcgcggcccagctccttggagaggcgtaccaccttggccaccagctcaccgttggaggcggccttgtggcccttgcccaggtagatgttgtcctcaaagccaacgcggacattgccgcccattacgatgccggcggcggccatgtcccaggcgctgcggccgatgccggtgacggtccaggtggagccggaggggatttgcttgactaagtaattcaggttgcccaccgtggcgggggtgcagccggacacccccagcacgaagttgaactgcatgggggcgccgggcaccaggcctttcttggccatgttcaggatggtgtccagatggccgatctcaaagcactcatactcgggcttgatgcggttctcgatcatccgctgaccaaaggcccgcatggtaggcatatcgttgacgaagatgtcgtcgccgaagttgcaggtgccgcagtccagggtggccatctcggggaagagctcggtgggctgaaggcgctcctccggggtcatgccggtggcgccgccagtggaggggatcaggatgacgccaggacaggccgccttgatggcgtccagcactacgcggaaccgttcccggtcctgggtgggggtgccgtcgtcccaacggacatgcacatgaatgaccgccgcgcccgcatcatacgcgctcttggcctctcgtaccatctcctccacggtgtaggggacagcggggctgttttccttggcgacctccgcgccgcagatggctgcggtaatgatgagtttttccatcattctcacttcctttcttaaacaaattttatttgcagtagcgttttgtgaagtaatctcgtagcttctcctcccttcgcacagcgtcaaaggcaatttcagcatggccggggtaatatccatttccgataagcatgggcacatatttcttgatgccctcggcccccagagacgctttggcaaaatcagtactcatgctgaaaaagtagatcattcccgtatctttagttacaagcaccgtggccaattccgtattaggtacactcacggtgttgaccgtgaagtccgccagttggtcacccaatgcattctggtaaatatccagggcctccagaggcttcttggcatcggcttccagcacaacgtccgcaatgcccaggctacgcacaatctcacactgccggggggaatattccatgcagatcaccttgccagtgggagctacccgttttttagcctccgccaggcagagaagcccggccttgccggcacccaccactaccacggtatctcccgccttgacgtggactgcgacttgggccggggcaccggccacatccatcaacgccaggctaagctggtcgccaaggtccttcggaagcttggtgtaaatgccgctctcgaacagtatggcgctggccttacaaaagacctgctcggtgtccacgtcaatggacgtgatctcattaatttttagaggagtgagtgacagggacactaaagtggcgatcttatcgcccacctgggcgtctgtagagccagccagatcggcgccaatctccttgatgcgaccgatcagaataccgccagattttgttaccgggtcttggaactttccgcgctcgtccacgatcttctggatctcctgggcgatccggttcacatcgccgccacactcttgcttgatgcggccaaaggctgtggccgttggctggagcgcgatgacgtcgatcagaatctcattggaacaaatagtgggggagttgtccacccgttctgctgcctgcggaagcaatcctttgggggaaatgacacgatggcttccgtatggatctcctcgcatggtagagtctcctttctgtagcgaaatactatatttttgaactgcaagctgcgtgccaactcattttttgatatttttactagttttatctttagtgaaacgggaattcgaagtccatgaacagaagagcgaaccataaattgatcgaacgatcaatttatggttcgcttgtgattcaaaaaaggttcacttgtcttccgattgaagaccgtacagatttaattttcggactacagaggattgactaatccccagcatgttggcaatctttcgagtggacttgtaccgttgctggtataactggaggatttcccgttcccgctggctcaacatttccttcagagaaccgccggtggtctgcttgtgaaaatccggagatggaacggctgctgctacagaaggcggctccacgctgtccatggagaggacttggagcacgtcccgcgcctcaatgatccggttatttgtcataatcatcaaccgctggatcagattttgcaactcgcggatatttccgcgaaaggactggttctccagaaattccagtgcttttgcgcctagcgacttttgaagcccgaattccaggttgtatcgctctacaaagtatttggctaaggggatgatgtctgcccggcgcatgcgcagaggcaaaacagtgatgggatagacgttcagccggtagtaaagatcctctcggaattccccggcctgcaccatgcgagctagatttcggttggtggcagcgatgatccgtacatccaccttgatgggagttagcccaccgacacgaacaatttctttttcttggatcacgcgcagcaacttggcctggaaagtaaggggaagctcgcccacctcgtccaagaatagagtgccgttctgtgcagcttcccagaggccgattttccccttgatgtttgctccggtaaaggaacccttttcgtagccaaacagttccgactccagcagatgctccggaatcgcggcacagttgattttgaccattgggaagctttttcgctcgctgttctgatgaataattctggcaataatttcctttccaacaccggattcgccatagatcatgacgttggaggtatagcgggcaactttaagcgcctggcgcagagtggccttggcctccaggctatggaagatatatccgctcgcacagtcctcgtccgcttcactctttgcgtgcggtgtttcgtccgagttcgggatagagatagtctccggcacaccgcatatcccgcgctggatgtctgtctgcatttgcgggaacctgcgcattagacccaaagtgtagtctgcgtgtccctccaaaaagcctgtgtaagggatgacctgaatctctttgccgatactttctgcggtcagcgccacgaatttatagtcgcagcatatggtggcaaagtatatggttccatggtttttgactgccaataggcttgcagcctcagtgtctgctgtgttgatacagttgatgactacatcaaagcgctggatgatctccgcgtgtggagtgccgcataaagcgctcaagttggtggcatccagttccaacacctcgtcgaacacgctgcatggttccatttgaatacggctttcctgatctcgcacgatacctacaagccgtccgctggagcccatcttatccttggcggcatagccacacatcagaccgatgcggccgctggcaccgagtatcagtacatcctgcccaggttgcacgatctgataggagcgagtaggggcgccagcctcatccatagctgcaatcacggctcgcaggggcaagtccggcggttttttgacgactggagagttggcatataggatggcctgaccctctacctccagttgggcgctttcgcagtcaatgcggaggatctgcgtaatgtgcagaggggttaccgtgagggaggacagagatatgatctcgtcctttggccggatatggtaaatatttgggtagctgggacctaactccaccacggtgccatataacattcctccactgttggttaccggattgtgaagttttccccgctcgcggacaatttctaaaacgcgttgacacagcaaggctctgtcctcgcctgtttcgtctagaatttcattgaagctggccaaattgatattgatgattttgacgtcgatgagaacctcgtccgaccgaagcgtcatcgtattatctattttccacgcctgttgggccagggcgtgccgcggctctatagatcgttctagcccaaagctatccattatagatgccctcttctgtcgcttaatttgatagaaagcggacgggccccattggggacccgtccggcaactgtttatttccgcttgcagttctttgggaccacacaggtgccgctggctcggcagaccagaaccggctcatccagaacgtcggccgctgaagcgcttacgtccggcctagctgtaatgaccttgtacgcggtaaaggtcatcttgcgggacgtatttccgatataagtgatctcgcccttcgcttcgatgtagtctccggcgtaaacaggagccagaaactctatattgtcgtatgcgcaaaacaacccctcatcgccgtcgcagcggatcagcagttcggtagccacatcgccaaagaggtgcagcatatgtgcgccatctaccagatttccaccatagtgtgcatctttggcagacattcttacgcgcagttcagaaacaaacttttccataaacttagtctcctttcttttgagggacaacgccccctctggaaatagtgtatagcaattttaataccaactgttactcgatgtgtgctctgcttggtgctggaagcatgtcacaggggattatagcacaaaaaacaatatatttttagatggataatacggctgatataatctaacggattctgagatttttacaggaaataaaggcctggatgaattactgcagagttggaaatattcaccgcaaagacattccgttatgagactgcaaagcccagagactatgttgtgggagccatggtggacgaagcgataaattgttggcctttctctcgagtgcatgcgcataaatgggggggccatagtcatcgggaagacccgaaaaccagtcggtggcgtgcgagctacgttactttcgggcgatgccgcgatatgcccggcatctggaaataccgcgggcattgctttcggggtgagacggtggagcgtggccaggatccggtctgctgctgaaagatttgtactttgaaatatggggggccagagttttgccggccgcctgttttatggagtaaaggtaacgtgaagcggctgccggaactggacaggctggtgcagtccgcttacgaggataaggtcatgggacgcgtcccggaaaacctgtgtgtccagctcttgaatggctatgaagtagagccagccgcaaagcaggagcggcgtaaggtactttgcgaactgctgtctgccaggcgggaaaaagaacagtccgtagacgagtggccgaacatgatgcaggattatgctcagctggaagaagtggatcgccccacactggttcggctcattcagacgcaaggtaaaatcagcgttcaaggccaaatttgccaaaggacaaaggattttcgcctatgtgcccattggctgccgcaaggacccggagggaaaagcctacgcctggaccatagcccaggtcaaaagcattttgaaggatgaaacctacatcgaaaattcggtccattaccgggaaacaaatatctcctacaaaaataagaagcgtatccgcaaggaccccagcgagtgggtacgtgtcgaggggactcatgaggcgatcatttcgaaagatgtttttgaccgtgtgcaggaacagatcgccacacgccgccgttctatgaaggaccagacaacacaaattttctccaggcttctcaaatgcgccggttgtggctggtctatgcgtttcaggacaaaacgccagatcaagaaaccatacaggcattacgattgcagccgctatggacaactcggcaatcagtgttccgcacattatgtccgctatgatgttctttatccctatgttctctcccgtttgcagttctggattaaggcggtccatcagaatgagaaagccatagccgcccgccttttgaagccctccaacagtggacaggaggcaaagcacagacgggcggcggcggagaaaaagcgggcggaaaaacgtcttgccgagctggacagcctgatagcccggatatatgagtacaggaccgcggaggtcatgaccgcccggaacttctctatgctctcccaaaagtaccagcaggagcaggaggcgctggagactaaaatcctggccttgaatacacagtttgaagccgcacgggaacagacggaaaacattgaaaaatggcttgctttggtaaagcaatatgccgacctgtctgagctgaccgcagaagtatgattaccttgattgaaaaatccttatccatgaggcggtaaaggacagcgagggaaaacgggtacagaaaatcgaaattttctatcgcttcattggcaacatcgaccaagccgttgacaccatctttttaactgcgtgaaacggaccagagtttaccggacagtgaaaaaataattcggctaagtgagatcttcggagtaacaacggattatttgttcaaaggcaaagagtcagactctatggacatctatgtccagcatacttcaaaaggcgggggcggatatgtctgcgaaggtgacggagcgcttggaaggggtacgccgcatgagcaccgccagcggcccttctgctggcggccgccgcggttattgctggacgcatttgctgctcaagtgttgaccggcggacggcctgcactaaggcaaacagcaggcggagcaaagaggcgcggggcaatgccccgcgcctcttttatcgggatttgggtttgggtttaaagatcagggccaccagccagccgaagaagatggcggcggagatgccgcccgccgcggcggtgacgccgccggtgagggcgcccagtatgcccatctcatccacggccttggcggcccccttggccagcagatagccaaagccggtcagggggacggtagcccccgctccgccgaactccaccacgtacttgtagagccccagcccgcccagcaccacgccggacaccacatagagcaccagaatacgggccggagtgagcttggtcttgtcaatgagcagctgcccgatcaggcagagcaccccgccgcagaggaaggcgcgggcgtattcccaaaagacttccatgattttccctcactgttccgttgagatggccaccgcgtggcagatggacggaatgctctccccctggagcgtggaggtgggggagagcagggcgccggtgccgcagaagagcaggcgcctccagcggccctgcttcataccgttgagcagaaagccggtgagcaccgcggcggagcagccgcagcccgagccgccgcagtggacgtcctgggtctgggcgtcgtagatgagcacgccgcagtcctccagatttttgaattcaatgccgtcccggtggaagagatccagcagaatctccttgcccaggctgcccagatcgccggtgacaatcagatcatagtccgagggcctgcggcctgtgtcccgaaaatgggcctgaatggtatcataggcggcgggggccatggcggctcccatattgttggcgtcctggatgcccttgtccacaatcttgcctgtggtcacatgggtgatataggggcccggcccctcccgggagaggatgacgcagcccgcccccgtcaccgtccactgggcggtgggggtgcgctggccgccgtactccaggggcgtgcggtactgccgctcggcggagcagaaatgggaggaggtcatggcggcggcgtgggcggcgaaaccgccgtccaccagcagggcggccagagacaggctctccgccatggtggagcaggcgccgtacagcccgaagaaggggacgtcctgcccccggacggcgaagccagagccaatgcactggttgagcaggtcgccggccagaatatagtccagggcggaggcgctcagccccgccttgtccagcgcggaggagagggccagcttctgcatggcggtctccgccttctcccaggtcttttccccaaaggaatcgtcctgattgatctggtcgaagctgtcggccagcgggccctccccttcttttttccccaccacattggcgtggcccgcgacggagggcgggtgggcaagggcgaccgtctgccggcccagcttttttgtggtcatagcgccaaccttctttccttcagataatgctattttgaacgaaaagccgggaaaatatgaggctggattttgtggcgggacatgctggtcaaaaagagggctttgcggtataataaacagcagaaaccggattcattgaaatggaggcatatcatggtcgaggaagccaagcgtactctggcctatctctgtcccgcctgccgccagagcgtggcggtggagcgcagcgtattccagctggcggcgtccgccaacgaactgccctgcccctgcggcaaatcctctctccgggtggagctgatgggcgaccgggtgaagctcaccgtcccctgcctgttctgcggcaaggatcacaccgtcacctgctcctcccacgcctttctccacgagaaggtgctggccttctcctgcgccgcctcggggctggactgctgctacgtgggggaggaggggccggtgtttgccgccctccagcgcctggaggaagcggtggacaagctggaggccgcttcaggggagaagggggccttcctggacgagctggtgatgcaggaggtgctctccgagctcaaggagatcgcccagcgggacggcatctcctgcacctgcggctcccaccgctggaagctccaggtcaatttcagctccatcgacctgttctgtgccgactgcggcggggccatgcgcattccggcggccaccgccagcgacatcgacgacatctgctgtaaaaacaagctggtcatccacggccaggactgaggaggcggaagcatggtggtatacgagtgcgagtacatggtggactccagggacatcgacccctggtaccactgccgcccctccgggctgatggggatgctccaggaggccgccacccaggcggcctgtgcccttcacgtctcccgggacgagatgctggagcggtacaacagcttctggatgctggcccggctgtggtaccggctggatgtccctctgagctggggggacacggtacacatccgcacctggcaccggggcgggaggggagcctccacctaccgggacttcgacctgtttgtgaatggacagccggtgggggaggcggtgtccacctgggtgctggccgacgccgctacccacaagctggcccgcatgggcaggatcacggagttccagggcaccgacggcggccctctctgcaaggagcgcaccctgtcccgggtccgcctgcccgaaactatggagcacgcggacagccgcgccatgcactacagcgataccgacgtcaacggccacgtcaacaatgtccgttatgtggacttcctctgcgacgccctccacatggagcgcctggggtccagccgcttcgtctcctccctccaggtgggctacctggcggagtgtatggcgggggagaccatcgagctctacaccggccaggccggcggcctgtggtacgtccacggggcggatcaggcgggcaagagccggtttgacggcgcggtggagctggcggagctcaccccttgacagcggcggagccatcgagtaaaatagaaaaaatttaacctctgagagagcaaaaagataaaaggagatgcaccatggtcaacactgacgagcgccagaagttcacccggcagggcctcaccttcgacgacgtgctgctcatccccgccgagagcgacgtcctgcccgcagacatcgatctgcatacccagctcacccgcaggatcaggcttaacatccccctgatgagcgccgccatggataccgtcaccgagtaccgcatggccatcgccatcgcccgtgagggcggcatcggcatcattcataaaaatatgtccatcggcgcccaggccgagcaggtggacatggtcaagcgcagcgagaacggcgtcatcaccaaccccttctggctggcccccggccatacgctggcggaggccgacgagctcatggccaagtaccgcatctccggcgtgcccatctgcaaggacggcaagctcatcggtattatcaccaaccgcgacatgaagtttgagaccgacatgagccagttggtggacaacgtgatgaccagggacaacctggtcaccgccagggagggcgtcacgctggaggaggccaaggagatcctgcgccgccacaagatcgagaagctgcccatcgtggacgatgagaaccacctcaagggcctcatcaccatcaaggacatcgagaaggccacagtgtaccccaactccgcccgcgacgagaagggccgcctgctggtgggcgccgccatcggcgccacccccgacgtgctggaccgggtccacgcgctggtggaggccggcgtggacgtgctctgcctggactccgcccacggccactccaacaacattctggagtgcgtccgccgcatcaaggccctctaccccgacgtgcagctcatcgccggcaatgtggccaccgcggagggcacccgcgccctcattgaggcgggcgccgactgcgtgaagatcggcatcggccccggctccatctgcaccacccgcgtggtggccggcatcggcgtgccccagatcaccgctgtctatgacgccgcctgcgtggccgccgagtacggcgtgcccatcatcgccgacggcggcgtgaagtactccggcgatctggccaaggccctggccgccggcgccaacgtggtcatgctgggctccctgctggcgggctgcgaggagtcccccggcgacactgaggtgtaccagggccgccagttcaaggtctaccgcggcatgggctccctgggcgccatggcctgcggctccaaggaccgctacttccagcagaacaacaagaagctggtgcccgagggcgtggagggccgcgtgccctacaagggccccaccggcgacaccatctaccagctcatgggcggcctgcgggccggtatgggctacaccggctgccacaacgtggaggagctgcacaccaaggcccagttcatgcagatcacctccgccggactcaaagagtcccacccccacgacatctatatcaccaaggaagcgcccaactacaccctcaatccccagtaagcggtggagcgcatcacggtacccggcccggacggcggattttccgtgcccgccgggctggaacaagaggcagcggagcggctgggccgctatgaggacgcctatgagcgcctgaccgcccgccggagtgagctggccgggcggatggaggccctcaaggcccagggaaagcagaagaccgcccagttccgggagctgttcgccgagaagctcaccattcagaataccctgacgctgtgggagacctacggtattcactgaaaaggcccaaaagacggccgccgcccatttgggcggcggccgtctcgcgcgcatggagactagcgggggacatagaccagctcggtcatgccgttgtggacggcggtatggagcagatggagcttccgctcctccgccagcgccccgaacagcgaaacgccgctcccctttgaaaactagttccgcctagccgaccttacggccatgacaagctgtacagccccatacaggccgcagagcaggagaattgtgtcctcataggcgtgaaaaaagatcgatttaatcccagtcagcccccaaagagtcagaagagcaaggagaagcctgttcttgtaccggtaacccgcacagaccgtgatgctcagactgacaatgggacagggcataatatgtgtcaccatttgcggaaaggcgtttcccagaaggagggagacgagggggtaaagcagccagagcagcagaagcagggcctgcacggcggtgggtttttggagcgtatccgctccgttgtgcctgctctcatacaggaacagaatgccgaagagcagatagagcggaagcacaaaatacttctggataggttctgatccataacgggcgaaaaaagcgagaccgatccacaagtttgcgattccgagggcaaactttgccgcccatggtgccttttgggtgtaggacagcgcgaacataaccaggagaacgagcaagaggacgatttgcaggccccatgtatccatattataggccccgattaccttccagaagatctgtgcgtccaatttgcctcacctccaaattgcgatattgtttattgtagcatatcggagggacgtgctcaacggggaagtccccgctgtccaagattgcgcggcggggcgggatatgatataatttaatatctgaccaaagaatggggggagagacatactcaagctgctgctgggccgggcggggacgggaaagacccgcgccttgctggaggccatggccgccggggacgggcggccccagattctgatcgtccccgagcagcactcccacagcatggagcgccagctctgcgccatcggaggcagccgggtgtccctcttcgccgaggtgctctccttcacccggctggccaaccgggtgttctccgtgtacggcggtttagccgccccggcgctggacgggggcggccgcctgctgctgctgtgcgccgccctcaggtcggtggccccggagctgcgggtgtaccagcgcccctcccgcaagcccgccttcctctccggcctgctggccacggtggacgagctcaagacctgccgcatcaccccggagcagctctggaccgcgggggaggagagcggcggcggggagggggacaagctgcgggacctctctctcatctacggcgcctacgaggccatgaccgcccgccagggggccgacccccgggaccggctgacccggctggcggaggcgctcacccgggaggactgggcggttgggaaggacttctacctggacgccttcaccgacttcaccccccaggagcgggcggtgctctccgccctgctggggaaggccaattccgtcaccgtggccctcacctgcgacaagctggaggaggacgaggggggcgcggggattttctcccccgcccgccgcaccgcccgccagctcctccggctggcccaggagcggggcgtttcccgggaaattgaggtgcgctccggcggggccgggcccaagacggcggccctggcccacctggagggccagctcttcgcccaccggcccgccccctatgagggcgcggcggaggagctcaccatgctgaaggccaacagcccctactccgaggtggagtggacggcggcggagattttgcgcctggtgcgggaggaggggtaccgcttccgggacatcgccgtgtgcgcccgcagcctggagggctgcggctccctcgtcgagactatcttcgcccggtacggggtgcccgtgttcctcagccggatgagcgacattctgcaaaagcccattctggccctcatcacctccgccctggaggccgtgtcggggggctaccgctatgacgacgtgttccgctatctgaaaaccgggctcaccggcctgtcggcggaggacgtggatctgctggagaactacgtgctcaagtggagcctggaggggagcgcctggacgggggcgcgggactgggcgaaccaccccagggggtatggcctacccttctccgaggtggaccgggccctgctggcccggctcaacgccctgcggcgtcaggtggcccagcccctggagggcctgcggaagaacccggacaagacgggccgggggcaggcgatcgccctctacacctttctggaggcggcgggggtgccggagcggctggcccagcgcaccgaggagctgaaccgccgggggcaggccgcgctggcggaggagtatgcccagctctgggagatcctctgcggcggcctggagcagtgcgctcagatcctgggggacgcccccatggagctggacgagttctccaagctctttgccctggtgctctcccagtacgacgtgggctccatccccgtgtccctggaccgggtgaatgtgggcgacatgccccgcctggcccaccgggcctgcccggtggtgttcctgctgggggcggacgacggggccatccccgccgccgcgccgtcgccgggcctgctcaacgacgacgaccggagcctgctggcctcctacgggctggagctggccccccggctgtccgacaagctgtaccgggagatgaccatcgtctacgagacctgcgccctgccccagcggcgcttctatgtgagctgggcggcggccgggcccgacggggaggagcggcggccctccttcctccagtccaagctgaatttcctgttccctcaggcccggcgggtggaggaggggcggctggacggctccttccggctggcggccccccggcccgccctggagctggcggggcggttcccccaggccggggcggccctgcgcgccctgccggaatacgcccccctggtggagcggatggagcgggccgcccggatggagcgggggcggctcacccgcccggcggtggacgccctctatgggaggcgggtgcccatgtccgcctcccggatggacaagtacaagtcctgccacttctcctactttatgcagtacggcctgaaggccgagccccggcgggccgccgggttccaggccccggagtacggcaccttcgtccactatgtgctggagcacgtgctgcgggcctgccgggagcgggggggcgtgaaggaggttccggaggaggagctgcgcaccctggcccaggcggcggtggagcggtacgtcagcgaggagctgggcgggctggagcacgagaccgcccgcttccgctatctgttccggcggctgctcaaatcggtgtacgccgtggtggacaacgtggcggaggagctgcgctcctcccagttccagcctatttccttcgagctgggcttcggcgcggggaaggacctgcccccggtggagctgagtgtggacggcatgacggtcagcatctccggcttcgtggaccgggtggacggctgggagcacgatgggcggctctatctgcgggtcgtggactacaagacggggcgcaaaacctttgatctgacggatatctggaacggcatgggccttcaaatgctgctctacctgttcaccctggagcgagagggggaagcgctttacaaccgggagatcatcccggccggcgtgctctacctgcccgcccgggacgcggtggtcgcgggcagccgggccatgagcgaggccgagcgccggagaaaggtggacgccgagctgcggcggcgcggcatcgtgctggacgagccggaggtgctcgccgccatggaggagccgggggaggcgggcatccgtttcctgcccgtgaaggtgaacaaggccggggccatcaccggcgaggcgctggtctccgctgagcggctgggcaagctggcccggcacaccgggcggattctggaggagatcggccgggagctggccgccggcaacatcgccgccgaccccttctggcgggggccggatcacaatgcctgccagtggtgcgagtacgccgccgcctgtcacttcgaggaggggcggggcggcgaccgacggcgcttcctgcctgccgtcaggggcgaggaattctggcaggcggttgcgaaagagcaagtatgagttgggagcccagatacagcccggagcggaactgttcgtcgctctcgatggcggagagcttgcacagctccgaccagaagtcgtccaggaacgcggcggagaagccctttccaaggcgggtcatgtaagtatcgacaacggcaagctgcttgcggtattctggagaagtctcatggatcatcaactgctgtaattctaagagatcaaacatgatagaacctccttttgttgagaataactctgcactcgttatagtgagaataactccacatgtcaagagaggagcggaaaatggccacttttgaggagcggcttacaaagctgcgtacgaaagcaggggtgtcacaacaggcgatcggggaggccttgaacgtgtcccgctgggcagttcacaattatgaggcggggaaaaaccggccggattttgatggcctgatcgccctggccgactatttcgacgtctccctggattatctggtcggacgctccgaccgccgggagcgcaacccgtaggggcggcccttgtggccgcccgcagtcaggagcaggcccggccctgttggaattgcaatcggtcaaacatagcaatagatacctctgaacaggaacaaattgagcctgttgataaattgggggaatcattatgacgtttagacagagactgggcatgctgcggaaagaaagaggttatacgcaaaagacctttgcacaggagctgagcgtaacagagcggtgtattcgggcttatgaaaatgagacgcgccatcctgattactttggcctgatcgccctggccgattatttcaatgtctccctggactatctggtcggacgctccgaccgccgggagcgcaacccgtaggggcggcctttatggccgcccgcgggcgaccaccagggtcgcccctacgccgttatgtactggggcgggtcccctgctggatgtacccctgtagatgggggctgactctaggccttgtttgaaaaatagcaatatgaccagcggcgaggaattttgcccgctggcaagcaattttttcgcaggaatcctggcggatttcaaggaaaaattgggccgtccagagggcaaaaggcccggtgattgggcgtgttgactattttcaaacaaggcctaggcacacaatagtaaaaagcaaagaaatgaaaagagaggaatatctgcgcatgatcaattttggagcgctcttgagcaacaccagcaactttctgtatacctacattctcatcgccctgctgatttttgcggggctctacttcaccgtgcgcacccgcggggtgcagttccggctgttccccgaggccctgcgggtgctgggggagaagaaaaaggacggcaaggacatctcctccttccaggccctgatgatctccaccgcctcccgggtgggcacgggcaacatcgccggggtggccaacgcgatcatcgccgccacggtcatcggcggctacggcgcggtgttctggatgtggctgctggccatcatcggcgcggcctccgccttcattgagagcaccctggcccagtgctacaaggagaagcacggggacaactgggtgggcggcccggcctactacatccagaaggccctgggcagccggttcttcggcgtggtgttcgcggtgctgctcatcgcctgcttcgcctacggcttcaacgccctccaggcctacaacgccggctccgccctccagtactatctgcccggctactccgagagcgtctggcccgcggtggtgggggcggcgctggccctgctcaccggcctgtgcatcttcggcggcgtacgccgcatcagcgccatcacctccggcatcgtcccggtcatggcggccatctatatcgccctgggcctcttcatcaccgtcaagaacatcggccaggtgccctatatgctctccatgatcgtctcccaggcctttgatcccaaggccatgttcgcgggcatcggcgcgtcctgcatcatgcagggcatcaagcgtggcctctactccaatgaggcgggcatgggctccgcccccaacgcggcggcggccgccgacgtgtcccacccggtgaagcaggggctggtgcagatgctctccgtgttcatcgacaccatcctcatctgctccaccaccgccttcatgctgctcctctccggtgtgcccatcgacgcctactccgagggcatgaactttgtccaggcggcggtgcacagccaggtgggccccttcggccccttgttcatcactgtctccatcttcctgttcgccttcagttccctggtgggcaactactactacaccgagtccaacttccgcttcatccgggactccaagaccgggctgctggtgttccggctgacctgtgtggccgccattttcattggcgcccagatgagcttctccatggtgtgggatctggccgatgtgctgatgggcctgatggccctggtcaacctggtggccatcctgctgctgggcggaaaggccatccgggtgctcagggactaccagaagcagcgcagggccgggaagaaccccgtctaccgctacgacgaggtgagcgtgggcagcccggagatctggaacgaagcccacgccaaaaagtgggaggactgaaccgaacccatccccgctgagctgaaaggagcgccctatggccttttccctgacaagtgaacagcaggccgcggtagacaaccggggcggcgggcttctggtgtccgccgccgccggctccggcaagacccgggtactggtggagcggctcctggcccgggtggagggggaggggctggacatcgaccgcttcctggtcattacctacaccaaggccgccgccgccgagctgcggggccgcatcgtggaggagctgtccgcccggctggcggagcgccccaccgacgcccacctgcggcggcaggccaccctggtctataaggcccagatctccaccgtccacgccttctgcgcccagcttttgcgggagtgcggccacctgctggagctggatccggacttccgcctgtgcgacgagggggaggcgggcatcctcatgctccgcgccctcaacgatgtgctggaccggcgctatgaggacatcgccgaggggagtgatttcgcccggctggtggacaccatgtccgccgggcgggacgacagccggctcatgcagatcgtgctggacatccgggggcgggtgcaggcccaccctaatcccgccgcctggctggacgggcaggagcgggcctttgccctggagggggtagacgacccgggggagaccccctggggccgcctgctgctggacgacgcggggcggcagggggcctactggcgggacaagatcgcccgggccctggagctgtgcccctgcgacgccaatctggacgccaattacgcccccagcctctccgccaccctggcggccctggacgcctttgtggaggggacgcggcgggggtgggacggggcccgggccgcccagcccatccccttcccggcgggggggcgcaagaagtaggtggactgccccgacgcggcggagcaggtgaaggccatccggagcacctgcaaaaagcggatggagaagctgggggagtggttcgaggactgcggggcggatctcctggaggatctccgggcggtgcacccggcggtgcgggggctgttcgccctggtgaaggacttcgagggggcctatgccgccgagaaggcccgccggggcatggtggacttcgccgatctggagcacatggcggtgcgcctgctggtgggggaggacggagctcccaccgagctggcccgccagtggtccgcccggtacgacgagatcatggtggacgagtaccaggacaccaacgaggtgcagaacgccatcttcaccgccctgtcccgggaggggaggaacctcttcctggtgggggatgtgaagcagtccatctaccgcttccgcctggccgatcccaccatcttcctgggcaagtaccgcgcctttgccgactacacccgggcggcggagggggaggagcggcggctcatcctgtcccggaacttccgctcccggccggaggtgctggagggggccaacttcgtattccgcagcgtcatgtccgccgacttcggcgagatggactacaccgccgacgaggccctctatcccggcgcgcccttcccgcccgacggccgctatgccgtggagctggacgcggtggacgcctccgccgagggggaggaggagaagaccgcccgggatctcatcgaggcccgctttgcggccaagcgcatccgggcgctggtggacgggggcttccccatctccgacggcgagggcggcgagcggcccgtccgcccggcagacatcgtgattttactccgctcccccaacacggtgctccaccactacgcccgcgccctgggggagcggggcatcccctgggaggcggagggcggcggcgacttcttcgccgccactgaggtgaacgtggccctctccctgctccaaatcgtggacaacccccggcaggacgtacccctcatctccgtcctccgctccccggtgtacagcttctccgccgaccggctggcggagctccgggccgccagtcccgataccgacttctacgccgccctggccgccgacgggggggaggacagccgggcctttctggccgagctggacgagctgcgcttcggcgcgggggagttgagcagccacgagctgctctggcagctctacgaccgcaccaatctgctgggggtgttcggcgcaatggaccggggggaggagcggcagtccaacctgctcaccctggcggagctggcccgccgcttcgagggggcgggtcacaagggcctgttcggctttttgtcctacctgacccggctgcgggagaacggggccaagctggccctgcccgcccccggccgggaggggggcggcgtgcgcatcctgagcatccacaagtcgaaggggctggagttccccgtggtgctcctctgcgggctggcgcgaaggctcaaccgggaggacatgagccggcccattctgttccaccccaagctgggggtgggccccaagcggctggacgtggagcgggggatggagtatcccaccctggcccgccgggcggtggcccggaagctggagctggagatgatggccgaggagctgcggctgctctatgtggctatgacccgggccaaggagaagctgattttgtcggtggccctcaccggcggggcgcgggatctggagaagctggcccccgacgcggcctgtccggtggagccccaggtgctggccgggtgccagagcgtggggcagtgggtgctgctgcccgccctggcccggcccgacggggaggccctccgccgggccgcgggggtgcaggtgcccgtcccggcggcggacttcggcccggcctgggatatccgctttgtggacgaggcggagttccaggcggagccggaggagaatgccgtttccccatccgatcccccggacggcgagatgatttccgcgggggcgggggaggagaccgccgccctggcggcccggctggcctggcattatccccacggagcggaggtggagctgccctccaagctcaccgccacccagctcaaggggcgggcgctggacgaggaggtggccgaggcggcggtccggcccccccggcccatccgcctggggcggccccggttcgccgccgaggagttcggcctcaccccggcccagaagggcaccgccctccacctggtcatgcagtacatcgacttcgagcggacggagcgcgtggaacaggtgcgggccgagatcgcccggctggtggagcgggccttcctcaccccccagcagggggaggcggtggacccggccaaaatcgcggcctttttcgcctctcccctggggcgggagctgatggcctccacctccctgcggagggagttcaagttctccatcctggttccggcggcggactactacccccaggccggggcggaggagcaggtgctcctccagggcgtggtggactgctgctttgagactctggagggcatcaccgtggtggacttcaagaccgaccgggtggaccggcgctctgtagcggcccgggcggaggagtaccggccccagctcgcggcctacagccgggcgctggaggagatcaccgggaagccggtgatccgccggtgcctgtggtttttcgccctggatcaggcggtggatgtgtgaagggccgctggcaacttgaaaaatttctcgaaaaaacagttgcaattccggttttcctgtgctatactatcctagcgtttataaggcgtggaggtttgctgcgccgcctcatccagaacgagaaagaggtgaacacaccatgaaggaaggcatccatcccaactacgaacagaccacgatcaagtgtgcttgcggtaatgtgatcgaaaccggatctaccaagaaggacattcgcgtggaagtctgctccaagtgtcaccccttcttcaccggcaagcagaagatggtggatactggcggacgcgtcagccgcttcaacaagaagttcggcctggacaagaagtaagttcgtatgtaagagcccgtaccggtttcggtacgggctcttttgcatcggaaggataccagccgccggagcggcataagaataaggagggagacggccatgcgcaagtgcctgcgctgcgggacagagatggtggagggctggaacgtcaaggaggatgggcataaacatgaaattatcatcgacaatgggggaagcttcgtgcgcggcgacggacggatgggaattctgaaggccgcggtctgcccccagtgcggcgaggtttcggtctatgtggacgatccggacacggtgatcaacggatggaggtaagagcgatgtttggcagaattgaccccaaggagctgaaccagaatgtcttttccatgatcggcgagcagtggatgctggtcaccgccgggacggcggagcggtgcaataccatgacggccagctggggcggcctgggcgtgctgtgggggaagccggtggccacggtctacatccgcccccagcggtacaccctggagttcgtggagcgggaggactgcttcaccctctccttcttcggggaggagtaccggaaggccctggccctgtgcggctccaagagcggccgggacgtggataaggtcaaggagtgcggcttcacggtggccggggcggcgtgcggcgcgccctactttgaggaggccgggctggtgctggtgtgtaaaaaggcgtactggcaggacatggacccgacccacttcctggacggagagctggacgggaagtggtaccccgaaaaggattaccaccgcatcttcatcggggagattgtggaagtgctgaagaaaaactgacgccggggctgcggcccgcggcgcggaggacggtatgacggaaaacgagacaaagcaagcgaaaaaccgggcggtgctggtgggcctgaacgcccactgcctgtcggccgaggaaaacgccgacgacacctccatggaggagctggccgatctgctggagactgcggggggcgtgtgcgtgggcaccgtgttccagaacaaggacgcccccgatccccgcaccttcatcggcgagggcaaggcggctgaggtgaaggagctggtgggggccatgggggcggacatggtggtggtggataaccccctgtccccctcccagcagcgggtgctgtcggaggagctgggcgtccaggtgctggaccgggcggccctgatcctggatatcttcgcccagcgggcccgcacccgggagggacggctccaggtggagctggcccagtaccagtatctgctgccccggctgctgggcatgtggacccacctggagcgccaggagggcgccatcggcacccgcggccccggcgagacccagttggagaccgaccggcggcacatccgccgcaagatccagaagctgcgggaggagctggagcaggtgcggcgggtgcgggccacccagcgcacccgccgggagaagaacgaggtgccggtggtggccatcgtgggctataccaacgcgggcaagtccaccctgctcaaccggctgaccggggcggacatccccgccaacaaccggctgttcgacaccctggacaccaccacccggacgctggagatcagcgacacctgcaccgtgctgctcagcgacaccgtgggcttcatccgcaagctgccccaccatctggtggaggcctttaaggccacgctggaggagctgagctacgccgacctgctcctccacgtcatcgacgcctccaatcccctgtggcgggagcaggcggcggtggtggagcagctcatcgtggagctgggggcggagcagaccccccgcatcgacgtgttcaacaagtgcgacagatttaccggcgacatccttccccacggggcggacatcgtgtccatctcggccaagaccggccaggggctggacgagctgctgaagaaaatcggcggccgcctggacaccggcgcctgccgggtggtgctccgcctgccctacgaccagggcggcgtggtggacatgctccaccggcaggccaaggtggagcgggtggactacggcgaggccatcgaggtggaggcggtgtgtacccccgtccagcttggccgcctgaaggactatatcgtgtcgggctggacgccccccaaggagccctgggaggactgagaggcgccgtaaacggcgcgataccccctccgcgctccgagggggttcaatgcttgcgatataaggaggaaccgccatgcagttactggagactgaccgcctgctcctgcgccccttcaccctggacgatgcggaggggctgtacgcctacgccagccacccggaggtgggccccccggcggggtggcgcccccaccggagcgtggaggagagccgacaggtcatcgagaacatcttcgtcccctcggatgccctggcggtgctccgcaagtccgacggccgcctgatcggttcggcgggctttgtggaccggcaccgcacggagctggggacgcccagcgaggagatcggctattccctggcccgggactgctggggccaggggctgatccccgaggcggtgaaggagattatccgccacgccttcgccgacctgggctaccaggccctgtgggcggcctactacgacggcaaccgcaagtccaagcgggtcatgcagaagtgcggtatgacctaccgcctctcccgtattgaagcggtggagcagctgggcgagacccggctggcccactactttgccgtcacccgaagggagtgggagcggtgaccgagtattttgtccccaccggagcgtccgagaccgagctggtggagaagcgctcccgcttcctcggccatgtctggccggtggagagcgaggaggaggccagggcccgcatcgaggagatccgaaaaaagcactacgacgcccgccaccactgctggtgctaccgcatccgggaggggggcgtggagcgctactccgacgacggggagcctcagggcacggcgggccagcccatgctcaatgtcttccagcgggagggggtcaccaacgtctgctgcgtggtgacccgctacttcggcggtatcctgctgggggcgggagggctggtgcgggcctatacccagtccgccaaggacgccctggacgcggcgggcatctccgtggtgcgccgctgggtggaggtggccgtgccctgcccctactccttctttgagcggctcaagctggagctggaggcccacggcggggtgctgggggaggtggagtacgccgccgacgtcacggtgcacgccctgctgcccgaggagcgggcggaggccttctccgcccggcttaccgagctggccgccggcggagtggccgcccaggtgtgcggcgagtccttccaggcggtgcccgggacacaagtatgaacaaatcatgaatcttttgcaaaaaagaaggatttttccgaggaaagaagtatatagttacagagactgctgagaggtaggtggtatctgtgaccctgcgcgaacagaccgaggcgctggagcgggagatgctctccccctttgcatgcctgtcgtcccaatcccgggggcggcagacgccgctggagccctgtcccacccgcacctgcttccagcgggacatcgaccggatcatccactccaaggccttccggcggctcaagcacaagacccaggtctttctggagccggagggggaccactaccgtacccgcatgacccacaccatcgaggtcagccgcatcgcccgcaccattgcccggggcctgcggctcaacgaggatctggcggaggcggcggcctacggccacgatctgggccacacccccttcggccacgccggggagcgggtgctcaatgaaatcctgcccggcggcttcgcccacaacgagcagtccctgcgggtggtggaccggctggaaaaggagggggagggcctcaacctgacctatgaggtgcggcggggcatcctctgccacaccggccccgaccgggcggagaccctggaaggccagctcctccggctggccgacaagatcgcctacatcaaccacgacattgacgacgccatccggggcaggatcatctaccccatggacatacccctgtccatctcccaggtactgggcttcacccactcggagcggatcaacaccctgacggtggacatcatcacccagagcgccgggcgggacgcaattctccagtcccccgcctgccgggacgccatgggcgaactgcgggcgttcatgttcgaatttgtctaccgcaatccggtggccaagggggaggaggggaaggcccaggagctgctccgccgcctgttcgactactaccggcgggagccggacaagctgccaccggagtttcaggacatcaggatggaggagggcgtggagcgggccgtctgcgactatattgcgggcatgaccgatgtctacgcggtggagtgcttcaacgcggcgttcattccgaaatcctggagtgtgaagtaggcgcggacaggcaggccgcgcgggagggtataagcctggtatattgtggaaaacatagtcggaaggagggcgcggcgtgccgattcccgaacaattcatcgacgagctggtggcccggagcgagatctccgatgtggtttcctcctatgtccacctgacccggaagggaaacaacctgtgggggctgtgcccctttcacaacgaaaagacgccctccttctcggtttcgccggataaacagatttaccactgcttcggctgcggcaaagggggcggggtgatctccttcatcatggagatcgagaacctgccctttcccgacgcggtgcgcctgctggcccagcgggcggggctggaggtgcctgacacaggcaccgatgacgccgggcgcaaaaagcgggcccgggccctcgcggccaaccgggacgcggcccggttttaccacgactacctcaagggccccggcggtgcgcgggtgcgggactatctggcccagcggcagattgcgccgcgcaccgccacccgcttcggcctgggggcggctccggagcagtgggacgcgctgaccagggcgctgaccgccaagggatacagcaagatggagctcatcgacgccgggctggccgtggcgggcaagaacggcggcgtgtacgacaagtttcgcgcccgtctcatgctccccgtcatcgatgtgcggggggaggtggccggcttcaccagccgcatcctgccgggggaggagggggccaagtacctcaacaccccggagactattgccttcaagaaggggcggctgatctacgccctcaactttgccaagagcaccaagcggcccaatctggtgctggtggagggcaacatcgacgtcatcaccctccaccaggcggggtttgacaacgtggtggccaccatgggcaccgccctcaccgaggagcacgcccggatactggcccgctacaccaaagagctggtgctctgctacgacaacgatacggcgggtaagcagtccaccgaccgggtgctcaacattctgaaaaacgccaacctgaacgtccgggtgctccagctccccaacgcctacgacgcggagggcaagcccgtcaagcaggatccggacgactttgtgaagaaattcggcccggcggcctttgagaagtgcctgaatggcagcgcgggccagaacgactaccggctggagaccctccagcagaagcacagcctggccgacgaggaggggcgcatggcctttctcaaggaggcggtagagacggtggcggcgctccagagccccatcgagcgggagatctacggcaacaaggccgcggccgccgcgggcatttcggccggggcctttgcccaggaggtggagcggttccgcaagaaccgggcatggcaggcccgcaagaagcaggcccgccgggagctgacgccggcggcccagctccagccccgggagcgggagctgcggtatgagaacctccgctcggcccgggcggaggagggggtggtgaggctgctgctgctggagcccgacctgttcccccaggtggaggggctggggccggagcagttttccgccccggtgctggccaagatctacgccctgctgtgccagcgccaccgggaggggcgctccacccagttggccgccctcgccggggcgctctccccggaggagatgagccacctggtgagcgtgatggatcagccggaggccctggcgcacagcgcccaggccctgcgggattacatagagatcattgagaccgaggccctcaagcggggcggggcgggcgcaagcgaccccctgctggcggcacgggagaagttcagagaaagaaaagcgtatggaggataaccgcatgagtgaaaagaagaccaccagcaagaaggtacacaccctgaccctggaggatcagaccaagctggcccaggccaatgtgaagaaaatggagcagggcaagatcgaggtcatgaaggtcgtcgagggcgtccagggggcggaaaagctggcggagctgatcgagcggggcaagaaaaacggcaagctctcgtccagtgagctcatggatgtgctggagaacctggatctggagagcgaccagatggacaagatctacgataccctggagaacctgggcatcgacaccgtgggcgacgactatctgcccgagctggctgacgatatcatgccccccctggaggagctcaacgagattgaggagctccccgaggaggagatggtggaccccaatacgctggtggactccttcggcatcgacgaccctgtgcggatgtaccttaaggagatcggcaaggtgaatctgctcactcccgatgaggaggtccagttggcccaggatatgggggccggcgacgcggccaaggagcagatggaggagctggagcaggcccggaaaaacggcgaggaagtctccatcaccgaggaggaggagaaggaactgcgccgcctggtgaagcggggcgaggccgccaagcagcgcctggccgaggccaacctccgtctggtggtgtccattgccaagcggtacgtgggccgcggcatgctcttcctggatctgatccaggagggcaacctgggcctcatcaaggcggtggagaagttcgactacaccaagggctacaagttctccacctatgccacttggtggatccgccaggccatcacccgggccatcgccgaccaggcccgcaccatccgcatccccgtccacatggtggagaccatcaacaaggtcatccgcgtctcccgacagctcctccaggagctgggccacgacccctcccccgaggagatcgccgaggagatgagtatgcccgtggacaaggtgcgggagattctgaaaattgcccaggagccggtgagcctggagacacccatcggcgaggaggaggactcccacctgggcgacttcatccccgacgaggacgcctccgagccgtcggaggccgcctccttcaccctgctcaaggagcagctggtggacgtgctgggtaccctgacccccagggaggagaaggtgctcaagctgcgcttcggcattgaggacggccgcacccgcaccctggaggaggtgggcaaggagttcaacgtcacccgtgagcgcatccgccagatcgaggccaaggccctgagaaaactgcgccaccccagccgttccaaaaagctgaaggacttcctgaactgagacagtacagcgacgagacgaggcccggaactgtatggttccgggcctctggcctgtcaaagacctcccgcaaaggaaagccgcgcagagttcctgcggccgcagccgcaggaataaagcaaaaatccgtcgtttccggggacatgtgcctcggaaatgacacctctcatagcagaaggggcgactatttcgctggaaatcgagtcccttccgccatgctgtctttctcgaaaaagttgcgctgccactttttcgacacgcaggcggggcccggaaccgtcaggttccgggccccgctgcgtctcctatgcctcggttccggggagcgggccgcgccccccgtcctggtaggggttgacgtaatccggcgggcagaggtgcgtttcgctccacagcagcatgtggttcagcacaggcagaaagctctcgcccatggccgtgagggtgtactccacccggggcggaacctcgggatagacctcccggtggagaaagccgtcggcctccagctcgcggagctgccgggtcagggtggactgggtgatgccgtccaggcggcgcagcagcgccccgaagcgctgtacccggtagaaggccacataccacaggatcaggattttccacttcccgctgagcaccgcctgcaggcggctcatgggaaggcagcgggccagcgcctccggcgtctggaatttgttgtctgccattgcgttccctccctgtcctgacattatagcgggaaaccggaaaaaagcaagacaggatcaaaaaagataccggggcgcaaaaaagaccgtacttgaagaacgggcgggggcaggctatgctgaacgggacaaaccacaaggaggcaaactgccatgcactacacaggcaccatctggcgtccgccctatgaatccggctccctgctgctggaggcggccgccggctgcacccaccaccgctgcaagttctgcacgctttacgacgagctgcccttccgcttccggctctctcccctggaggacattgaggcggatctggccgaggcccaggagctgctccggggacagctcgtccagcgggtctttctggtgggggcaaacccctttgtgcttcagacggagcggctgaaggccatcgcggggcgcatccgcaggtacttcccggagtgccggaccatcggctgcttcgcgcgggtgaccgatgtgggacggaaaaccgatgaagcgctccgggagctccgccgcctggggtacgacggcctgaccatcggcgtggagacgggatacgatccggcgctgcacttcatggacaagggctatcaggcgcgggacatcgtggagcaggcgcaccggctggacgaggcgggcatcgcctatcactttttctatctggccggaattgccggggccggacgcggagaggcggcagccctggccagcgcgtcggtgttcaaccagaccaacccccgcatcctgggcagctccatgctgacggtctatccccagtcccggcttttttcggagatgcaggccggccggtggacggaggccggggaagtggagaagctggaggagctgaaaaccctggtggagcacctggagcggcccctctattttgcggccctgggcgcctccaacgcgatttcggttcagggatttctgccggaggagcgggacgccgtggccgccaagctggcgcgggcctgccgcccggagcacgaggacgccctgcgccgttaccgggccggcctgcggcatctgtagtggaaataaatgcttgaaaaacagataggaataatataatatagaagggggaaagaaagtgggcatactggtttccaaaggaggcatgcaggttgaataacattcagaaggcggccgtcatcggctgtggttttgtaggctccagcatcgcgttcacgctgatgcagagcggcatcttttccgagctggtgctcatcgacgccaaccgggacaaggcggagggggaggccatggatctgtcccacggcctgcccttcacccaccccatggatatccgggcgggggactacgacgacgtggccgactgcgccctggtgatcgtcaccgccggcgcggggcagaagccgggggagacccggctggatctggtgcacaagaatgtggccattttcaggagcatcatcccggaggtcgcccggcgcaacagggacgccatcctgctcatcgtgtccaatcccgtggacgtgctcacctgggcggcgtggaagctgtccggctacccggccaaccgggtgctgggctcgggcacggtgctggacaccgcccggctcaagtacctgctgggggagcgcctgggggtggacagccgcagcgtccacgccttcatcgtcggcgagcacggcgacagcgagctggcggtgtggagcggggccaacgtgtccggcatccccctggaccacttctgcgagctgcggggctactacgagcacgacaaggccgacgagtggctccagcgggaggtgcgggacagcgcctacgagatcatccgccgcaaaggggccacctattacggcgtggccatggcggtggagcgcatcgtccgcgccattgtgcgggacgagcactcggtgctcccggtttccaacctgctccagggccagtacggcatcgacggcctgtgcatgagcatacccgccgtggtgggccggaacggggtggaggacaccctggagatccccctctccccggcagagcgggaggccctgcgggactccgccgccaccctgcggggcgtggtggatagcctggagctgtgagaaaatgcgaaaacggagcccggcacacaaagcgcgccgggctccgttttttgtccgcccggctcaggggaccaccagccaggctacccgctgggcgttgtcggagggccagttgtcataggccgcgctcatggagacctgccaggcatcctcaaacacagcgtagcaggcggccagcttcccgtcctgggcggcgggggcttcaagcatctccaccggctgtccgtctaccagagcggtggtgctgcccggcgtcagaatgatggtgacgccccggtaggtcatggcggcggtctgggcctcgttgctccatacgcagtccacccccagcccttcacacagggcccggacggggacgctgtagccgccgccctccgacaggcggtccatcaacgggatctggaagggatagagggcgggatctatctctacaggctctggtctgccgccgtccaggggataggccatgccgttgaacactaccgcatccacctgggagagctccagcacagagcggagcggatgggcgtagtcgcaatggattgtgcctcgatcgttccaggaggtggggccaagcaaattgtcgcccacgatctgcccccagccgcacagggagccgtcggtcatgcggaagaaaagcagggggaaagcgtcgccgtccgcgtcggcaaaggagtattccatctgaatggagagaggagacagactcacggtttccagggtaacaggggcaccaccctcaatgtgatcaaaggtgccggaaccggtaccctcagcgttaacctccacggtaacaggctctaccggctccacgggaatctccacgtaggcgccctcctccataaggcccagccggagctgcacggcgtagacggcggcattcagctcatcgactctcatactgtaggtgcgggaggtttctgtacgtagcgacgacttctccccatagctaaagctgccagccacagggatttccgcggtggggccgccttcggacggagtgggctccggcttgacggcctcgttctccagagcacggacagagaaggtgtccatgttctcgaagtcatccgccatgagggcggcggctgccgcgtcgtttttggcctcaatggtgaccagtagataggcggagctggtgtccgccaccgagctgatcaccgacagggtgtagttgtcgtcacggatggaatatgtctcatggcttacgtagtcctcaaccggggtattgtccccctcaaagtagaagtccagcacgttccaccggctggctacggccagggcggagccggccagcagggccgcgatggcggccgccgccgcggcaaatcggattttatgtctcatataggctctcctttccgaggggacggcgttcagcgcggcgttgacccgccgcttgaccgccgccgggtcagcctggggacagggcacgcccatcggtactgcgccgtcccacagctcctgcatccggtctctcacgcctccacccctcctttcgtcaatgtatcccgcagggccttccgcccccggaatagccgctgcttggcggcggtctgggtcaggcccagggcacgggcgatgtccttgagcttgtcgccgtagtagtaatagcgcaggaacagggtgcggtcgggctcgtccagcccctccaccgcgtcccacagccgggccgcccactcccgccgctccgcctcggcctgggggtccgcgccgccgggggcggcggcgtcctccggcagaggggcggcctctttgtgggtgcgcagccagtccgccgccctgttccgggccaccgtccccagccaaggccgcaggccctgctccgggttcagctctccggcgtgggcccacagggccaggaatacgtcggcggtcagctcctccacgtcctcccgggcgccctgcccggccagcacccgcaccacgacggcgctcacatagggggtgaagcggtcgatggcccgctccagggccaggcggctgccctgccggagcttctttgccagcgtgatctcgtccagcttgtccccctcctctccaagaaccggttctatcagtatatacgaagcgggggcggtttggttacggaacaggcaaaaaaatttccccgaggcctagcctcggggaagaaaaggagctcagtgcaagtcgggcagggcggcgagcaggccgtccacgtcctcctgggaggtctggaaacaggtgacgaagcgcaccacggtatggctcccgtcataggggcaccagtcctcgtaatcgcacaccgcgtcgagctggggcttgagggcgttgtccaccacggcgaacacctggttggtgggggagtccacccacagcgtccaccccttggccctcagcccgtcctggaggcgggcggccatttcgttggcgtggcgggccatgtggaagtagaggtcgtcggtgaacagggcctggaacatgacgccctgaatccaccccttctccattaccgcgcccatgcgcttcttcatgcggaagaagccgtcggtcagctcgggccgggtgatcaccagggtctcgccgaacatggcgccgttcttggtgccgccgatgtagaaggcgtcgcacaggtgggcgaactcaggcagggtcagatcgttggccttggaggtgagggcggcccccagacgggcgccgtccacgaagaggagcaggccgttctcccggcagaaggcgtacagggcggtcagctccgccttggtgtacaccgcgccgttctcggtggcattggagatgtagaccaggcccggcttggtcagatgggggtcctggtggagggccagcaggggaggcagcatctccggggtgatcttgccgtcgccgcccacgggcacggggaggatcttgtggccggtggcctcaaacgcgcccacctcgtggccgttcaggtggccggagtcggggcagatggccgcctcccacggcttgagcaggaaggagcaggccaccacgttggtctgggtgccgccgatgaggaactccaccatggcgtcggggcagccgcacacctcccggatgcgctccttggcccgggcggtgtacccgtcgtcgccgtagccgtggttgccctccaggttgacggcgcacaccgcctccagaaccttggggtgggcgccgaaggagtagtcgttgcggaagagatactttttcatcacgcatacctccagttgttttgcgaaaaaggcgggcggccgcaggccggggtgacctgcggtcgcccgccgccgttctgtggcttaaaatttgaaggagtccttgaggctcaccgagcggttgaacaccagatggccgggggcgctgtccttgttgtccacgcagaagtagccctggcgcaggaactggaaggaggcgggggcctccgcgccggccaggccggcctccaccttggcgtgggggagcacctccagggagctggggttgaggcagtccaggaagttcttgtccccggcgtccggctcggcgtcggtgaacaggttgtcgtacagccgcacctcggcatccacggcggtggcggcgtccacccagtggatggtggcccccttcaccttgcggccgtcggcgggatcgcccccccggctgtccgggtcgtactcggccagaatggcggtaatattgcccgccgcgtcggtctcatagccggtgcacttgatcacataggcgcccttgaggcggcactccggcccgtcggggtagaggcgcttgtacttgggcaccggcgcggggagaaagtcctccgcctcgatatacagctcccgggagaaggcgacctcccgcgcgccgtcctccgggcggttggggttgttctccacggagaaggtctcgctctgcccctcggggtagttggtgatgatgaggcgtaccgggcggagcaccgccatgcgccgctgggcggtctcgttcaaatcctcccgcaggcagtgctccaggaaggcgtactccacggtggaggctgccttgctcacgccgttgcgctcggagaagttgcggatggcccggggggtgtagccccgccggcgcaggccgcacagggtgggcatgcgggggtcgtcccagccggacacccggccctcctccacaagctggcggagcttgcgcttgctcatcacggtgtagttgatgcccaggcgggcgaactcgatctgccggggcttggcggggacggggcagttggcgatcacccagtcgtagaggggccggtgatcctcaaactccagggagcagagggagtgggtgatcccctccagcgcgtcctccagggggtgggcgaagtcgtacatggggtagatgcaccacttgtccccctggcggtggtggtgcatgtggttgatgcggtagagcaccgggtcgcgcatgttgaagttgccgctggccagatcgattttggcccgcagggtcatggccccgttggggaactcgccggcgcgcatccgggcgaagagatccagggactcctcgatgggccggtcgcggaagggggagcgggcgggggtgttcacgtcgccgcggtactccttaaactgctcgggggtcagctcgcacacgtaggccaggccctttttgatgagctccacggcgtactcgtacatcttctcaaagtagtcggaggcgaagaagaagcggccgccccagtcgtagcccagccagtggatgtcctcctggatggcctccacgtactccacgtcctccttggtggggttggtgtcgtccatgcgcaggttgcacaggccgccgtacttctcggcggtgccgaagtccacgaagatcgccttggcatggccgatgtgcaggtagccgttgggctccggcgggaaccgggtgtggacggtcatgccttggaactgaccaccctgggcgatgtcctcgtcaatgaaatcatggatgaagttctgcgtcatggtgggtttcagctcttctggcatgtaaattcactcctttatctcgatacgaactcttattttaccctgaacagcgggaaaaagcaagagagggaggacattccggcatattttttccagaagggcggagaaaattgcataaaagggggcgtgggaagggggagagggcccggatagttgtcacaaagtgcggaaagggaggcccaaagcccttgacagagggaggcggaacacggtatacttacgacaatcgttgtgaacaaaggcgttccgaccccaagggcggagcgccttcatttttaaagcgaaaggggcggcagaccatgggggtctacagcaaagaggacatcatccgcatcgttcgggaagaggaaatcgagttcgtgcgcttgcagtttaccgacattttcggcatgctcaaaaacgtggccatcaccgcgtcccagattgaaaaggcggtcagcaaccagtgtatgttcgacggctcctccattgagggcttcgtccgcattgacgagtctgaccagtacctctacccggatctgaagagcttccgtatcttcccctggcggcccagccacggtaaagtggcccggctgatctgcgacgtatacaacaccgacggaacccccttcgtgggcgatccccgctatgtgctcaagcgggtgatccagaaggccaacgacatgggctacgaccgcttcaatgtgggcccggaggcggagttcttcctgttcaagaccgacgaggagggcaagcccaccacccagaccaacgacgaggcgggctacttcgacctgggccctctggaccacggggagtccacccggcgggagatctgcatggcgctggagcagatggactttgagatcgaggccagccaccacgagtgcgcccagggccagcatgagatcgacttcaagtacgccgaggccctccacgccgccgacaacatcatgacctttaagctggcggtcaagaccctggcccagcgcaacggcctccacgccacctttatgcccaagcccatcttcggcgtggccggctccggtatgcacaccaatatgtccctgttccgcgacggcaaaaacgtcttttacgaccccgacggcccccgcggcctgtccaaggaggcgtacagcttcatcgccggactgctccaccatgtgcggggtatggcggcggtgaccaaccccctggtcaactcctacaagcggctggtgcccggctacgaggccccctgctacctggcctggtcggcctccaaccgctccgccctcatccgcatccccgccagccggggccagggcacccgggtggagctgcgctcccccgacccctcctgcaacccctacctggccttcgctgtctgcctggccgccggcctggacggcatcgagaagggcatgacgcccccggcggagatcaccgagaacatctacgccatggacgccgccgcccggaaggcccacggcatcgagagtctgcccggctccctggaggaggccctccgcgccctggaggccgaccagttgattctggacaccctgggggagcacgtggccgccaactacctgacgggcaagtggcgggagtgggacgagtaccgtacccgcgtgtcctcctgggagcgggagaagtacatcatcaactattaaggccccgtggagacggtggtcgtcgcctttgagggcgagaaaaacggccggagactcaaggagctgctggagagctccgggacggccgcctgcctgctctgccgtaccgcggaccaggtcaagcgcctggtccgccagcagcggctcaccgccgtggtgtgcggctataagttcccggatgggacggcggaggagctggccggggaactgcccggcttctgtacggtgctgctgctggccccccgcggcctgctggagctggtgccggagcgacccggactcctccgcctccccgcccccgcaggcaggcgggagctgctcgccgcggtggaggagctgcttcggctgggcgaggaggccggagccctcctgccgccccggcggagccgtgaggagcgcgaggtggtggagcgggccaaggagcggctgatggcgcggaacggcatgaccgaggaggaggcccaccgggccctccggcggcggagcatggaccgccgcatccccctggcagacgcggcgcggatgctcttggatgaggagcgccccgccccttgacaaaggggaaaaattggcgtagtatgtcttccgacaacttgatagcatggacagtgccgccctccggggcgggtaaaagggaatcgggtgcaaatcccgaacgatccggtcactgtaagcggggagccggccgcagacgccattgtggagacacgagaaggcgcggcccggcggagagccgtaagtcaggaaacctgctgtctgtgcagaaggataggtgtcttccgcagaaagtagcctgtctgtttgccgccgtgtggtccgattgtgcccatggcgataagcagtcccgctttccgtcggaaagcgggatttttctgtccacagcacaaaaaaggaggattatcatgaaaaagctcgtacccctgaccctcgccctcgccctgggcctgacggcctgcggcaccgccggccggaatccggccccggcggccagccctactcctgcgggggatgtccagggcgcggaaaccccggcaaacaccgagggatttccctttaccctgaccaccaaggacggcgcggaggtcacatttacccacgtgcccgaaaaggtcatcgccgccaacgccaacgcgggcgaccaactgatggccctggggctgggggataagatcatcgccaccgcctacaccaactccgacatcaaccccaagtgggacgcggagtacaaggccatccccgaggcggcggagacctacatctccttggagaccgttttgagcctggagccggacttcgtctacggccgctccagctcgtttaccgagaagtacaacaccgagcatgacaccctgaccaagtacggcatcatgtccctgtcctccattgagggctacaccgtgggcgccgatgtggacgtggtgtaccaggacttctacaacctgggccgcatcttccaggtggaggacaaggccgaggagatcgtcagcgggatgaagggcaagatcaccgccgccgaggaggcggtggcgggccaggaggccaccccggtgttcgtctttgacatggcccaggaggagggagcctacacctgcggcaacaacttcacctcgaagctcatcgagcacgcgggcggcgtcaatatcttcaacgatctggacaccacctgggccaccgtgagctgggagacggtggtggagcgggcccccgaggtgatcgtcatcaacgactacggcgatacctctctggaggagaagattgcccagctcaaggagaaccctgccttggccacggtgccagccatccagaacgaccgcatcatctccgtcaagctgtgcgaggtgtttgccagctccatgacgggcgacacggtggagaagtttgcccgggccttccaccccgactgcttcgcgtaagagggcggtatgaagcagttttgcaggctggtgaagactcacacctttctgatctgtctggtgctggcggcggcgctcctggtgtccattgtcatcggcatcggcaccgggccggtagccatcccctttgccgaggtgtggcgggtgatgtttcaccggctgggcggcctgctgaccggctcggagctccccctggagggggtgcgggagagcacccagaacatcgtctggttcctgcgggccccgcgggtgctgctgggggccctggtgggggcggccctcaccctttccggcgtggggatgcaggcattcaccaagaatccgctggccgagccctatgtgctgggcatttcctccggcgcatcactaggcgcggtgctggccatgctgctgggggtgtccctgcctgtgctgggccgcctgtcggtgtccgccggcgcctttgccggggctctggtgtccatcctcctggtgtaccttctggcccgcacccggaatgcggtgacgccgatccggctgatcctggtgggagtggcggtatccgccatgttccaggcatttaccaactacatcgtctataccgccccggacgacgccgccgtccgggaggccaccttctggatgctgggaggactgggcagcgcggagtgggccgacgtgccactgctggccggcctggtgcctccggccctcctgctgatgctggccctggccaagcccctcaacgccatgatgatgggggatagctccgccgtcaccctgggagtcaacctgacggtggtgcgcaatgtgctcatcggcgtcaccgccctgctgaccgcctcctcggtggcggtcagcggctgcatcggctttgtggggctggtcatcccccacctggttcgctcggtggtggggccggatcaccggaagctggttcccctggccactctgttcggggccatctttctcatctgggtagacgtgggagcccggatcatcaagccgccggcggagatccccgtgggaatcctgacggcgttcctgggcgcacccctgttcctgtggatgatcaaggtgcgccgctatgaattccagtagggggtccgcgccatgatagaggcaaaacaggtccggtacggcatccgcagccgggagatcctccggggcgtggatttccgggtggagaagggggagttcgtcgggctcatcggccccaacggcagcggcaaatccacattcctcaaaaacgtctacaaggtgctccgcccccaggcgggggagctgaccctcatgggggacgatctgctggccatgagcaaccgggagatggcccagcggcttgccgtcatggtacaggagcaggaggccgccttcgatttcacggtggaggaggtggtcatgatggggcggcaggcccgcaagcggctgctggagaccgacagccgggaggaccgggcgctggtaggggagatcctggcgcgcaccgggctggcctccctgcgggagcaggggttctccaccctgtccggcggggagaagcagagggtgcttatcgcccgggccctggcccagcagacggcggtgctggtgctggacgagccgaccaaccacctggacatcaagtaccagctccagctcatggagctggtgcgggggagcggatgtaccgtagtggccgccatccacgatctcaatctggccgcggcctactgccaccggctctacgcattgaaggacggggtgatcgtgggggagggcgcgcccaaagagctccttacccccgcttttctgcgggaggtgtatgaggtggaggcggaggtgctcaccggacgggacggctccctgcgggtgttcttttacccgtcccgcatatcataaaaacggcccccgggcagcgcccgggggccgttttattctgccagccagtcgaaagccaggcggggggtgccgtcctccacatagatggtgccgcaggggagaaagccgtgcctggcgatcagatggcgcatgacggcgttgttctcgtgggtgtcgatgcgcaggtgggacatgcgtctcttacagaagtccatacaggcggtaaacaggccgtgaaccgtgccgtcgccggccacccggtggatggtgccgtagggtgcgccggagcgccaggccccctcgatgacgcggtagttgggctcatcccccaggcggaggacaaaggccccatggatgactccgtcctggtcaaagacgtacagctcaccccgctgcagatccgcctccagatcctccgggagggggtaacggtcgctccactgggtggggttgccgtgctcggccatgaagcggcgggccacgccgtagacgggacccagagcgggcagatcgtcgggccgcgccggccggatcataggtgccgcctctgcggaccccgcgcccggcccatcggcactcaagagggcttccagatggaccttttgcggcctcagaccgcaggattcgtaaaattttatggcggagggattgcagctccatacattgagcgtcagattatagcacccgcttttccgggcgaattccgccgcgtaggcatagagggccccgccgatgtgctgcccccgaagcgcctcgtccacacacagatcatcaatgtaaagagtttttacatccgtcaggatgttgtgattgacatgctgctcaaattgacagaagacgtagcccagcacccgctccctgtcgtccacggccacaaaaatgggcgtattttcatcgtttattttctgactcaactgggtatccgtgtactttctgcccccggcccggaagagatccggccgcccggtgtgatgcacctgagccacctgagccaaaagttcatggatgcgggggatgtctctctccgctgctctgcgaataagcataggtacctccttcctaaccgccccagaggcgccccggcggagcggggacctctgtcctgtgttcaggagcaaatcataccacgttccgccccggctgacaaggccagagccccggctggtggtccttttcccgaacgaaccggcccgggatcgcaaaattttgattgcctttaggcgcaaagtgccgtatgatggaggctggtgatgccttttgaaaaaattgcttcgggtactggggcggctgtttctggcgctcctgtttttagccgccgctgcgctggttaccctaggcctgctgcgctggcggggcctgatccttctgcccgacgaagcggaccccgacgagtgggaggtcttcggcgtggacgtgtcctcctaccagggggaggtggactggcccgttctggcggagcagggggtggactttgcattcattaaggccacggagggctccctcctccaggacaggcggtttgccgccaactgggccggagcggcggcggccggagtgcgggcgggagcctatcacttcctcagctatgacagcccaggcgagacccaggcggacaattttatcgctgcggttccggtgaccgagggggccttgcccccggtggtggatatcgagttctacggggaatatctggacacgccgccggagaaggagcgggtgcgggccattctggaccccctgctggagcggctggaggcccactacggcgtcaagcccatcctctacgtgacctaccgctcttactaccgctatatcgctgggggcggctacggggactaccccatctggtgctccagccccacggtgttcccgctggtgcccggctgggacttctggcagtactcccactccgccgagctggagggctactacgggacccagcgacgcattgatctgaacatcttccggggcagccaggcggaatttgagcggtttggatagaccggacgggggcaggcgagaaaaaacgcctgtcctcttctatttccgccggaattctggtataataataaaccaatgtattttgcgtgtgggaggtcgctatggaccgatttgagagactggcgggtgccctgcggcggatacccggcctggaggtgcgggaaaacgagcccatgaagaggcacaccacgttccgcatcggcggcccggcccggctgatggcgctgcccaggagccggaaggaggccgccgccgccgtgcgggccgccacagaggttggaatcgccccttttttcctgggaaacggcagcaatctgctggtggccgaccacggctatgagggctttgtgctcaaggcgtgcggcctggatcaggtgcgggaagtcaaccaccgtctgcgggcggagagcggtatcaccctggcccggctggccaacgctgccctgggccgggggctcaccggcctggagttcgtccacggtatccccggcacactgggcggagccgtggtgatgaacgccggggcctacggcggggagatggtgcaggtgctcaccgccgtcacctacctggacggggcgggggaggagcacaccctgcccgccgccgcgtgcgccctgacctaccggcacagccggttctccgaccgcccggactggcttgtcctggaggcggagctggagcttcggccaggagatggagaggccatccgggcccgcatggacgaactggccgccaagcggcgggagaagcagcccctggagtggcccagcgggggcagtaccttcaagcggccggagggccacttcgccgccgcgctgatcgaggggtgcggcctcaagggcgtggggatcggtggagcccaggtgtcggagaagcatgcaggcttcgtggtcaaccggggcggcgccacggcggacgacgtgcggcggctgatggcgctggttcaggagacggtgctgcgggagaccggcgtggcgctggagccggaggtccggctgctggggttctgacggggcgcggaaaaaggagattgcaatggaatttatcattatatccggcctgtccggtgcgggaaagagtaaggtggcctcctttctggaggatatcgggttctacgtggtggacaacatgcccgccccgctgatgcccaaatttgccgagctgtgcatggccgggccgggccgctatgaccgggtggccctggtcaccgatatccggggcggccagaccttcgatgggctgtttgacgccctccacgagctgcaccgcatgggctgtgcgtataaaatcctctttgtggaggccagcgtagagaccatcatcaagcgctacaaggagacccggcggatgcacccgctgtcctcgacctcccgctcgctggacgaggcggtgcggcaggagcgcaccgtcctggcccccgtccgccagcgggcggagtacatcattgacacctcggccctctccaccgccaagctgcggggggaggtgctgcggctgttcggggatggggggagcaccccggccatgagcgtcagcgtcatctccttcggcttcaagtacggcatccccatcgaggccgacctggtgttcgacgtgcgctttctgcccaacccctactacatcgccgagctgcgccatcagaccgggctggacgagggggtatacagctttgtctttggctatcagcagaccaaggacttcatggcccacctggagagcctcatcggcttcctcctgccccagtatgtggaggagggaaaggcggcgctggtcatcggcatcggctgcaccggcgggcagcaccgctcggtagccattaccaaggccctggccgacttcatcaagcagaagggctatcaggccacggagaaccaccgggacatgacgcgggcgtaaggaggtggacactatgacggaatggaacggcggagcgggccccaggattgtggccatcggaggaggcacggggctgtccaccatgctgcgggggctgaaaagccgcacccgcagcctgacggccatcgtcaccgtggccgatgacggcggcggctcgggtatgctgcggcaggatctgggcatgccccctccgggggacatccgccactgcatggaggccctggccaacgccgagccggtgatgcagcagcttctgacctaccgattcccggagggctcgggcaacctgacggggcagtccttcggcaacctgatcctggccgccctcaacggcatctccgactccttcgaccaggcggtggcccgcatgagcgaggtgctggccatcagcggccgggtgctgcctgtgaccaatgagaacgtggcgctggaggccaccttcgagaacggcacccgggtgctaggggagtctaagatcagcgccttcaagaaggagcaggactgccgcattgagagcgtccgcctgctgcccgagcacccaaaggccctgccggaggcggtgcgggccatcggggaggcggagctgatcctcctgggccccggcagcctttacaccagcgtcatccccaacctgctggtggacggcattgccgacgcggtgcgtgcctccgacgcgctgaagatctacatctgcaacatcatgacccaggacggggagaccgagggcatgaccgcctctgaccacgtaaaggccctgctcgaccactccgggccgggactggtggatctgtgcctgtgcaactccgcgccggtgcgccccggcctggtggagcggtacagggaggaggacgccgcccccatcgtggtggatcaggcggccatcgaggccctgggggtggaggccgtcacccggcccctggcctccgagacccttaactacgcccgccactcctttgcccgcctggccgaggcggtgatggagctttacaatgagcgggccgacaccaagattttttgagaaagggaggggggcactatgtcgttttcctctgaggtcaaggcggagctgtgccggacggccctctcccgccgctgctgcgcccaggcggaggcctacggagtgctgctctactgcaaccagttcacggcctcacaggtgcgcatcagcaccgagtccaacgcctttgccgcccggctgcccgccctgttccacagggcctttcagctctcctttgaccgcacgccggaggagggggcggccaagcagattttctccatcacagagccggacaagctgtccgccctctggtcggcgttcggccatgagccggcgggcaccctggcccatcacattaactttgccgtgctggaggaggagcactgccgcctggccttttttcggggggcctttctggcgggcggctcggtgaccgacccggccaagcgctaccacctggagctgtccaccccccatctgagtgtcagccgggagctgcgggccctcctgctggagtgtggcttcacccccaaggagaccacccgcaaggccaactccatcacctacttcaagcagagcgaggccattgaggactttctcaccgccatcggcgcgcccctggcggccatggagattatgaacgccaaggcggagaaggacctccgggggagcatcaaccgccgggtcaactgcgacgcggccaatctggacaaggcggtggacgctgcccaggggcagatcgaggccatctacaggctggaggagcgcggcatgctggaggagctgcccgacaagctcaaggaggcggtggatctgcgggtggcccacccggagctcaccctggcccagcttgcggagctgtgcgaaccgcccgtctccaaatccgcgttcaaccaccgcctgcgcaagctgatggagatggccagggcgtagggcgggaaagaaaagaaagggtagattgccatggagaagcaagtggttcaaaagcgctggaagctgattttctggggccttacggcggcggctgttgcgctgctggcgccgggcctggtgctgacgctggagccggcgctgtttctggggctgggcgttctggcggctgtggtattctgcacgggtctgtgtattgctgtgatcaagctccggtgtcctgcctgcggcggctcggtgtaccaccaggccatgcgggcgcaggagggcatcccttttgcctgcccaaagtgcggccggaagctggagatgaaatgagatgaaaaagagaagagacgcccgaaaaaccaggcaggtgctgctactgcctacggtacccgcctttgcgccccgctgtcctctctgcggggccatactgaagataggtattgaccattgccactactgcggagccatgctcaccaaatagagaaagaggaggtactcctaatgtcctttgtccacctgcatgtccataccgaatattccctgctggacggggcctgccgcattcccctgctggtcaagcgggtgaaggagctgggccagagcgccgtggccatcaccgaccacggcgtcatgtacggcgtggtggacttctacaaggcgtgcaaggcggagggagtcaagcccatcatcggctgcgaggtgtatgtggccccccggaagcgcaccgacaaggtacacgagtacgacgcggccatgtaccacctgattctgctgtgccgcaatgaggtgggctaccgcaacctgtgcttcctggactcggcggcctttacggagggtttttatatcaggccccgcattgacaaggaactcttgcgccagcacgccgaggggctcatcgccctgtcggcctgccagtccggcgaggtgccccgcaagctgctggccggggactacgagggggccaaggcagcggcgctggagatgcgtgcgctgttcggggaggacggctactatctggagctccaggatcacaagctgcccaacgatccggccatcaaccaggggctcatccgcatccaccaggagacgggcatccccctggtggtgaccaacgacgcccattatctccgccgggaggacgcggagatgcaggacaccctcatgtgcatccagatgggcaagacggtggacgatcccaaccgcctgcggatggagaccagcgagctgtatgtcaaatccaccgaggagatggccgccctgttccccgactacccggaggcggtggagaacacggtcaaaatcgcggagctgtgcaatatggacttccagttcggcgtccaccacctgcctgagttcaagctgcccgagggctacaccgacggggacgcctacttccagaagctgtgcgaggagggcttcgcgcgccgctaccccggcgccccggcggagtaccgggagcggctggcctacgagatggggattatccgccagatggggtttgtggattacttcctcatcgtctccgatttcatcggctatgccaaggggcggggcatccccgtgggccctggccggggctcggcggccggctccatggtggcctactgcatggccatcaccgacgtggacccgatgaaatactccctctacttcgagcgattcctcaaccccgagcgggtcaccatgccggatattgacatcgacttctgcatccggcggcggcaggaggtcattgagtacgtccagaataaatacggcgccgaccacgtggcccagatcgtcaccttcggcaccatggccgcccggggcgccatccgggacgtgggccgggcgctgaacataccctatgccgacgtggatgtggtggcaaagcaggtgcccagcggcccgggtgcactccatatcaccctggacgaggccctcaagctgtccaagcccctccgggacgcctatgaaggggacgaccggatcaggaccctcatcgacaccgccaaggccatcgaaggcatgccccgccacgcctccacccacgccgccggcgtggtcatcacccggaagccggtggtggactatgttcccctggcgaagaacgatgagtcggtggtcacccagtacgtcatgacaaccctggaggagctgggcctcttaaagatggatttcctgggcctgcgcaacctgaccatcctggacgacacggtgcgcctggtgcagaagagccgccccgggttctctctggcggacatccccgacaacgacccggcggtgttccagatgctctccgagggcaggacctccggcgtgttccagatggagtcggcgggcatgaccggcgtctgcgtgggcctcaagccccagaacatcgaggacatcaccgccatcatcgccctctaccgccccggccccatggactccattccccgcttcatcgcctgcaagcacaacccggacaaggtgaagtacaagcaccccatgctggagcccatcctctcggtcacctacggctgcatcgtctaccaggagcaggttatcgagattttccgcaggctggcgggctacacgctgggacaggccgacatggtgcgccgggccatgagcaagaagaaggtcaaggacatcgagcgggagcggcaggccttcgtctacggcgacgccgggcgggccattgccggctgcatcgccaacggtgtcccggaggacgtggcaaaggacatctatgatgaaatctatgcctttgccaattacgccttcaacaaggcccacgcggtggcctacgccattgtgtgctaccagacggcctggttcaagtgccactacaccaaggagtatatggccgccctgctcacctccgtgctggactccagcgagaaggtggctgagtatatcgccgagtgcagggactgcggcatccatctgctgccccccgacatcaatgagtcggaggccgactttaccgtgtccggcgagcacatccgcttcggcctggtggccgtcaagggagtgggccggggctttatcaacgctgtgctggctgagcggggcaggggagggccctttgtctccttccctgatttctgccagcggatgttcgacgcggagctgaacaagcgtgtgctggagaatctgatccgctgcggcgcctttgacagtatgggtatctaccgctcccggttactggaggcttacgagcagcttgtggactccatcgcccagaacaagcgcaagaacctggcgggccagttcgatctgttcggcggcggtggggatcagatgcagagcgccccggagctccaggtcaaaaatatccctgagtttacccgacacgagctcatgaccatggaaaaggagacgactggactctacctcaccggccatcccatggacgaataccgggacgtggtcaagcagtgcaaggcggcctctatgggggcgatcctgtcggactttgcccaggaggggggaccggccatttaccacgacgagcagcgggtcaccctggcgggggtcatcaccgcctcccgcaccaagaccacccgcaacaacagcctgatggcctatgtgacgctggaggacgacaccgcctccatggagatgcttgtgttcgcacgggtgctgggggaggcaggcccctacctgaaggagggggtggccgtcctggctgagggacgcatctccgttcgggatgaaaaggcgccccagctcatgtgcgaccgggtacgccccttggatcaggtgaagggaaacctgcctccggtggagggggaggagagggccaagaagctctatatccgcatacccagcctggacgacccccgctgggagaggatcaagctggtgctcaccatgtttcccggtacggaacagatggtggtcaagtgtgaggataccggaaagcggctgggcacggtctgcctggtccatcccgcgctgatccaggagctgaacgagctgctgggcgcggagaatgtggtcgtgcgttgaggggagccgatgagatgaatattaaaaaactggcctccctgctctttcagcggtcggtgatcgtggccctgctgatcttcctccaggctgcgatgctgctgctctatatgctctggttttccagcgacttcatttatgtgtactgggggtgtgtggtgctctccattctggcggtgctaattatcgtcagccgccagaccgacccggggtataaaatcgcctggatcatccccattctgctgttcccggcctttggatggctggtgtatctgctctgcggcggcaacaagctctccgcccgcaagcgccggaagatgcagggtatggaccgcaccatgctggagcagttggagcgggactacaaggcggaggagctaaggccctttggggccgacgcggtgaaccaggcccgctacctggagcactacgcccgctgcccggtctataccaacacctatacccactattttcccctgggggatgatgtgtttcccgccatgctggaggagctgcggaaggcggaaaagtatatcttcctggaatacttcattattagccccggcatattctgggattctatggtggagattttgaaggagaagcatgccgccggggtggatgtgcgggtgatctacgacgatgtgggctccctgaacaccctgcctatgaactacgccagaaaatttgaggcggaaaccggcatcccctgctgctgcttcaaccgcttcaagccggtgatttccatccgcatgaacaaccgggaccaccggaagttctgtattatcgacggccacaccgcctttaccggcggcatcaatctggccgacgagtatatcaaccaaaagctgcggtatggccactggaaagacacggccattctcctcaagggggaggcggtgtggagcatgaccgtcatgttcctgaccatgtgggagtacacccgggacgtggaggaggactaccgccgcttccggccggacaagctgccgccggaggccgcgcagggagcggggtactatgtccagccctacgcggataaccctctggacgaggaggcggtgggggaggcggtctacctcaaccttatcaacaaggccgagcgctatgtgtacgccatgacgccctatctgatcatcagtgacagcgtcaatacggccctgtgcaacgcggccaagtcgggggtggacgtgcgcatcatcaccccgcatatcccggacaaggcattggtttttgagctaacccgttcccactacgagtccctgttggaggcgggcgtacagatttttgagtatacgcccggctttgtccatgccaaggtcatggtcacggacgactgctgcggagtggtaggctctatcaatctggactaccgcagtatgttcctccactttgaggacgcggtgttgctctaccacgaccccacggtactcgacatcaagcgggatttcatcaacacgcagttccgcagccagccggtgacgctggagcagtgcctcggccactcctggatacgccgcctcttccgctccattctgcgggtgctggccccgctgctgtgacaaaataaggccgccccccacagggggcggccttattccgcttcaatccttctcctcgtgttccagcagtgcggagagaacctcattgtaaatccgctccggctcggccttgaagctctccgccaggcggttggcctgctcctgggagccgcagaacagctccagggtgaacagattgcccccgtcatcgtccagaaacatccgggctgagtacccgccctccggccggggctccgtctccgcacgtacttgagcattgcgccgcagaatcccgttgagttttaccaactgggcgctacagttgcgcttgaccgagtaggggaggctgctctcacaggctgcgccgttttcacggcctttttccgtgatcgaatagagcccgtcctccagtgtcagatggccgctctccaccaattcagaaaccgcctcggcaaactcaaagtagccaatgccgtcatcgcagaccgtcagctccgtcagtgtcggaaagtcgatgggcgccgcgacccgggccataaaatagaggatcaaaaatttaatgtccagcttgtcgtggataaagccgtagcgagccatctgggaactcctttccaatagacgagtcaaacataatatgtatttatttattataccgaaaggttgagaaaatcacaagaggtatttttgacttgacgctggtctaaaaatatggtattatcctatactgtcggtaacaaatatatgctggaatagctcagtcggtagagcagctgattcgtaatcagcaggtcgcgtgttcaagtcacgtttccagctccataaagccacaccaatctggatattttaagcgggacgcttagagtatcagagggtgcggcttttttattttcctgaaatttgtgttctaaaaaagatattttcgaggtattccggggcctcggaggggccttcccctggcttgccccagtttccgagcccccgacagggatcagcgccctatttgaacacagtcagggcacaaaaatccgaaaaaatgatatacaaaaattagtgcgccggtttattggtttcgtcaaccagcaggccggcgcttttttgctgcccggcgaattcaaaaagggcacacacttttatgtccgctttgctgaatagctttttcgtggataagatggcatgatggcgttcacaagcagcagctcaggagcggccattgaaaaaaggcgttttgcacggagaaggaggtaaaagcgcatgaccaaagaaacctattttgaggagctgtcctgcgccctgcggcggcgggagttgctaccccggccggtggaggaggacggcctgctcccagtggagtggaacggccgcgtcctgtgccgggtcacggaggcggcggggacgataatgaagtacatgaagctcctggagacggccccgccgctgaaggcggagagcctggcagacggctaccgggtgctggcagaattcaacggtacggtactggccgggaaaaagaccctgctgggggctcaattcgtcacctaggcctgggactatgaccggagaggcgtcagcaacggccactactacatggaggactaccaaaccgccaaggaggacttcaccttccgctccgggctgatggccagggagcaggtttttgaccgggagcggttggaggagctgcgccaggcggcacagggcttcctatgcggcgagggccccgcctcctatcggcaggaattccggtgccaacgcattctggaccagattcgatcccagttacccgaaccgaagcaaaattaaatacaaaaagagggaccaagcattgaacagtctatgtgaaggcggcgccgacaaaggcgccgccttttactatgcccggcatttatttgcctcctgtacccacaagctgtacgccccggatcatccggcggacgctccgcccgtgccggtgtgcacccgctcagacctgtgccggggctgcccctacccagcccatggcttcctctgctggagcaccgccggggaatgcctgcggactaggatgaaaaaatccatacgggagggaaaacggatgatgcacgcagtcctgagtaattcgcggcacccggagtacggccagctcacagtcccttttcccatctcccggggcgcctatgacgacacggtggcagccctggcctctttgggtatcggtgacccggtcggccgggactgccgggtggatgagctcaacagcagttttctcatcctgaagcggctggagaaggtagcggtcaacgtggacgagctggactatctggccaagcggctggacagctctgacatcaatgaagccgccaaattccaggcgatgacagtgaaatggggcctgttcgagatgactgacctaatcaacctgaccttctggtgtcagcaggccacgatcatcacagacttttctgatttggaggacattggccgccggcactatatgcccctgaacggcgggagctgcagcactgaggagttggaacggctggatgcccgcaaggcggcgctggatctgatcctcaacagtgaaagcacctgcgtcaccccctacggcgtggtctatgacaacgacatgaagctggaacaccactacgatggccagcacttcccatgctatctctgtcagcccgccatgctggtggtgggtattttcccgaagaatgcgccggagggatcaagcgagaccacatggctgaccctgccctgttctgagcagtagctcaagcgcggcatacagcagtccggcctggacttgggcacggccaacatccggtatgaggctgtcatgcttccctgggaggtgacgcaggtgctggccccggaaagggaaagtcccgttgccctgaatatggtcattgcccaggacaccgagtatgtcctgctggacgagcccaccaacgacctggacatctaccacgccaccaatctcatgaagatcgtccggcggctgtgcgacgagctgagcaagacggtaatcctggttctccacgagatcaactaggccgccttctactccgactacatctgcgctcttcaggacggcagggtcgccaagttcggcactgtggaggaggtaatgaccaaagaaaccctgtcggagctctaccaggtggacttcaagatcatgaccatcgcgggccggcctctgtccatctactattgaagcctcctagttttcagtacttttgtcgaaaaggagaaccaccacatgaagaagaaaaccccgcgcgctctctccctggtccttgccctggccctgtctctggcggcctgcggcacaggagccgctccacagccccagggggatacggcgacccttaccgccctcaacgcccaaaaggagcccgccgaggtagcggtcccctatgatccccagcgcatcgccgttctggatatggccaccctggacatcctggatgccctgggggtgggcggccggggggtgggcgccgccgacaccagcctggactatctccaaactacgtcggcggcgaggtgtcctgcctgggcaccatcaaagaggccggcctggaggacacggccggggaactcatgaccggctttgacagccgcgtggcggccctgacctccttttccgaaggccgaaccgccattgtgtgggcctggttaccagcggcggcttcaatgtgctgggcaacgacggccgctgctccctcatcggccgggaagcgggctttgccaacgtgggggcggacgcccagcccggcacctccacccacggcaacgaggccagcttcgagttcctcgtggacaaggaccccgactatctctttgttctggaccgggatgccgccattggcaccgacggggccaagctggcccaggaagtggtggagaacgagctgatgaagggcaccgccgcctaccgggacggcaggatcgtctacctggcccatcccgccgtgtggtacaccgccgagggcggcatcaccgcgctggaccggatgctccgggatcttgaggatcccctgctgaagtaaataccgcagagcggaccgggatgagcgccgctcatcccggtccgctgccgttccgcctgcggaatgcttccggctcctgttccgtctgtttgaattggctatttattcactatactattcttataacgaatatataaaaattattaactgtcatagctccgatattatgaatatttatacagaatgactattgcatttttatacgggttggattatactgggaacacatcagctgggcggccggcctcgccgccccacaggaggtcatcaacatgtctgagatcaagaaagtcgtcctggcctactccggcggtctggatacgtccattatcatcccctggctgaaggagaactacaacgaccccgagatcatcgccgtctccggcgacgtgggacagggggccgagctggacggcctggaggagaaggccatcaagaccggtgcgtccaagctgtacgtcgaggacctgaccgaccagatggtggacgaggtcatcatcccctccatgatgatgggggccaagtacgaggactatctgctgggcaccgcctttgcccggcccatcatcgccaagcggctggtggagatcgccaagcaggagggcgccgacgccatctgccacggctgcaccggaaagggtaacgatcaggtccgcttcgaactggccatcaagcgctttgcccccgaaatgaagatcattgccccctggcgggagtgggacatcaagagccgggacgaggaggtcgactacgccgaggcccacaacgtccccctgaagatcagccgggagaccagctactccaaggacaagaacctgtggcacctgtcccacgagggcctggacctggaggaccccgccaacgagccccagtacgacaagcccggcttcctggaaatgggggtctcccccgccatggcccccgacgcccccgcctatgtcaccatcgactttgagaagggctggcccgcggccgtggacggagtgaagatgaaggccagcgacctcatccgcaggctcaacgagctgggcggcgccaacggcatcggcctgctggacatcgtggagaaccggctggtaggcatgaaggaccggggcgtgtacgagacccccggcggcaccatcctctaccgggcccacgaggtgctggagcagatcaccctggacaaggacaccaagcacatgaagcagaagctggcggtagacttcgccgacctggtctacaacggcaagtggttcacccccctgcgggaggccctcaccgccttcgccacggacactcagaagtacgtcaccggcaccgtgaagctcaagctctacaagggcaaccttatcaccgcctccatctcctccccctgcaccctgtactccgaggatctggtcaccttcggggagagcgactacgaccagacggactcccagggctttatcaacctgtggggcctgcccgacaaggtccaggccctgcgggagcagggaaagctctgagcggagaccctgtctgatatctttttccgcctgcggacggcaaaactccgcgaggcaaaaggagcgatactatgaaactgtgggccggacggttccaaaaggagacggatgccctggtcaacgacttcaactcctccatttcctttgacgcccggatgtaccgggaggacatcaccgggtccatcgcccacgcggccatgctgggcaggcaggggatcatcaaggagcacgaggccgagaagatcattgacggcctcaaggccatcctggccgacattgaggccggacaggtggagttctccctggagaacgaggatatccacatgaatatcgagaccatcctcacccaacgcatcggggacacgggcaagcggctgcacaccgcccgcagccggaacgatcaggtggcggtggacttccggatgtacgtccgcaaggagatccaggccatcatcggcctgatcctggacctggagaaggtgctggtcaggaaggccgaggccaatctggacacggtcatgcccggctacacccacctccagcgggcccagcccaccaccttcgcccacgccatgatggcctacgccaacatgttcaagcgggacgtgacaaggctggaggactgtctggcgcggatggacgagtgccccctgggggcgggggccctggctacctccacctacccggtagaccggttccagaccgcacaggctctgggcttttccaagcccaccgacaactcgctggactcggtgtccgatcgggatttcgccctggagtttctctcggcctgctccattctgatgatgcacctgtcccggttctccgaggagatcattctatggtgctcctgggaattcaagttcgtggagctggacgacgcctactccaccggctcgtccatcatgccccagaagaagaaccccgatgtggccgagctgctgcggggcaagacggggcgggtgtacggctccctcatcaccctgctcaccgtcatgaaggggctccccctggcctacaacaaggacatgcaggaggacaaggagtgcgtctttgacgccatcgacacggtggagcgctgcctgcctgtgttcaccgccatgctggacaccctcaccgtgcggaaggagaacatgcgccgggcggccgccggcggcttcatcaacgccaccgactgcgctgactacctggtgaagaaggggatgcccttccgggaggcctacctgatcgtgggccgactggtcagccagtgcatcagagccggtgagaccctggacaccctgtccctcaaggacttcaaggccgtatccaaggtctttgacgaggatgtgtaccaggccctggagctcaggacctgcgtcaacggccgcaaggtctgcggcggcccggcggcggacagcgtccgggtgcagatcggacatatcagggaattcgtggagacacgcagacatggataagccgaaggtctttatcgacggccgggagggcaccactggccttcagctctgggagcggctctcccggcggaccgatctcgaactgctgcgcatcggcgaggccaggcgcaaggacccggcggagcggaaaaaatacctcaacgcggccgacctggtgtttctctgcctgcccgatgccgccgcctgggaggcggtggggctcattgagaacgggcacacccggatcatcgatgcctccaccgcccaccgtaccgcctccggctgggtctatggcttcccggagctgtacaaggacccagagcgcatcatcggacaggcccgtcgggtggctaatcccggctgccacgccaccggcttcctggcctcggcagcccccctgtccgccctccatattctgctccgggactgccccctcacctgcttctccctcactggctactccggcggaggcagaaagatgatcgcccagtatgaggcccccgacaagccggccgagctgttcagtccccggctctacggcaccggcctgcgccacaagcacctgaccgagatgcagaaggtggccgggctggagcagcccccggtgttctgccccgtggtggacgactactacaagggcatggctaccaccatccaactccacaaccgctatctgcggggccagcccaccgcccgggagatctgccacatcctggcggcctactacgccggccagcccctggtctcggtgcgctggggcggggatgcccccaccctccccgccaacgctctggcgggcaccgaccggctggagctggtggtgtgcggccacgaggagcagaccatcgtcaccgccctcttcgataacctgggcaaaggcgcctctggcgcggcggtgcagaacatgaacctgatgctgggctttgagatgacggcgggcctggccctggaaaccccaccggcgggcagtcccgcctcagcaaggagtgagcgaacatgaagcagatacccggcggcgtcaccgcccccaagggcttccgggcctggggggttcactgcggcgtcaagagcaaaaaggcagacaagaaggacctggccctcatcctctccgaccaggagtgcgcggcggcggccgtgtacaccatgaaccgggtcaaggccgcccccctctatgtcaccatggaacacctggaggacggcaccgcctggggcgtggcggccaacagcggcaacgccaacgcctgctgccccatgagccacgagtacgccgaggagatggcccggctggccgcccgggccaccggccgcgcacccgccgacttcgtggtggcctccaccggcgtcatcggccagaccctcaacatcgccgccatccgggcggggatgccggaggcggcggcgggcctcaccgccgggccggaaggctccgacgcggcggcccgcgccatcatgaccaccgacacggtgaagaaggagcttgccctcgcctgctctatcggcggcaggaccgtgacactcggcgccatcgccaagggctccggcatgatccaccccaacatgggcaccatgctgtgcttcgtcaccaccgactgcgccatcacccgggagatgctggccgaggccctccacgaggtggtcccccgcaccttcaaccgggtgacggtggacggggacacctccaccaacgacatgtgcgcggtgctggccaacggcatggcgggcaatcccctcatcgagtggaaggatgacggctacaccgtctttctgaaggccctccgccagctctgccaggagctggcccgggccatcgccggggacggcgaaggggccagccgcctcatcacctgcgccgtgcgggaggcccgcagcgaggagagcgccgagcgcctggccaaggcggtggtgggctcccccctggtgaaggccgccatgttcggcgccgacgcaaactggggccgggtgctgtgtgccatgggctactccaaggcccccttccgccccgagtatgtggacatttccttctcctccgccgtgggtgctgtggccgtctgccggggcggcatgggtctggacttcgacgaggaggccgcccggagcatcctctcccaggacgaggtggtcatcgacgtccacctccacgagggagagcacgaggccacctgctggggctgcgacctgacgtacgaatatgtgaagatcaacggcgattacagaacatgagaggcgcagcccgcgcccctctccccaaggaggcgaaccccatgtccgacgtgaccctgcgggcccaggtgctggccgaggccctgccctacatccagaagtattacggaaagaccatcgtcatcaaatatggcggcagcgccatgatctcccgggagctgcgggaagccgtcatcggcgacgtcattctcctcagcctagtgggcatccatgtggtggtggtccacggcggcgggccggagatctccgccatgttgaagaagctgggcaaggagtcccgcttcgtggacggcctgcgctgtaccgacgccgagaccatggacgtggtgcagcaggtgctctgcggcaaggtgaacaagaacctggcggccaccctcaaccgccggggcgggcgggccatcggcctgtgcggcttggacgccggtctgttccaggccagactgctggacgcgaagtacggtctggtgggcgagctcgccagggtggaccccgccccggtccgggactgcctgacggctggctacatccccgtggtgtccaccgtggctcagggggtggacggcgaaaacgcctacaacatcaacgccgacacggctgccgccaggctggcggtggctctgggggcagagaagctcatcctcctcaccgacgtgcacggcctgctgcgggatccggcggacgagagcacccttctccagaaggtgggcctgtccgaggtgcccctgctggtgcgggagggggtcatccagggaggcatgattcccaaggtggagtgctgcgtggaggcggtgcgctccggcgtggagcgcacccacatcctggacggccgcatcccccactccattctcatcgagctgctctccgacgagggcatcggcaccatgatcctgtaaggaggcgcagacatgacctttgacgaactcaaggcgctggaccacgcccacaccctccagacctacggccgcttcgacgtggacgtggaccacggacagggggccaccctctgggacctggccggcaggacatacatcgacttcacctcgggcatcggggtgtgctcggtgggctacgggaacgagaagtgggcccgggccatctacgaccaggccctcaccctgggccacatctccaacctgttctactcccagccctacgcccggctggccggcgccctctgcgcccggtcgggcatggcggcggccttcttcggcaactcgggcgcggaggccaacgaggggcttctcaagctggcccgcaaatacagccacgacaagtacggcgccggccgcggcaccatcctgaccctgcgcaactcctttcacggccgcaccctcgccacccttgccgccaccggccaggacgtgttccaccaacacttcttccccttcccggagggcttccgccacaccggcgccaacgatctggccgacgtggaggcccaggccggggaggacgtgtgcgccgtgctgctggagctggtccagggcgagggcggcgtgctccctatggaccgggacttcgtctgcgccctggccggcctgtgcgagcagcgggactggctgctgctggtggacgaggtgcagaccggcatcggccgcaccggcaccctcttcgccttccagcagtacggcatccggcccgatgccgtctcctttgccaagggcatcgccggcggcctgcccatgggcggcttccttgtgaacgagaagtgccggccggtgctgggccccggcagccacgcctccacctttgggggcaaccccgtctgctccgcagccgctctggcggtgctggacatcctggacgaggcggccctgaaccgggtcagggagaagggggcctatctgcgtgagcgcatcgaggctatgggcaagcggtgcctgggcgccacccggggcctgggcctcatgatcggggtagaggtccgccccggctggagcaacagggagctggtcgcccggctggccggacacggcctgctggtgctcaccgccggccccgccctgcggctgttgccccccctgaccatcacgaagggcgagatggaccagggcctggccatcctggaccggggcctggagtgaccccgggctgcgcccgccatttttgtatgaggtgaacgagatgaaagacctgctgaagctgctggacctctccagagaggagatcgtccgcatcctggacgtggctgaccagatgaagtacgaccagaagcaccgcctgccccacccccgcctccaaggcaagaccctagccatgatcttcgagaagaactccacccgcacccgggtctcctttgagaacggcatgttccagctagggggccacgccctcttcctctccggcagtgagagccagatcggccggggcgagccggtggaggacaccgcccgggtgctctcccgctactgcgacggcatcatgatccgcacctactcccaggaggaggtggagaagctggcccggtatgccgacatccccgtcatcaacggcctcaccgacttcgcccacccctgccaggtgctggccgacctcatgaccatccgggagcgcaaggccaggctggaggggctgaagatgtgcttcatcggcgacggcaacaacatggtcaactccctcatcgtgggctgcctgaaggtgggcatggaggtgtccgtggcctgccccgagggctatgacccccaccccgatgtgctggccttcgcccgggaggcgggccacgggttctccctggtgcgggatcccctggaggccgcggcgggggtcgacgtggtgttcaccgacgtgtgggcctccatgggccaggaggaggaggccgcccagcggcgggccgccttccggggctaccaggtcaacgaggccctgatggccgttaccgatcccagctgcatggtgcagcactgcctgcccgcccaccggggggaggagatcaccgccgaggtctttgaggcccacgccggcgagatcttcgacgaggcggagaaccgcctccacgcccagaaggccgtcctctgtctcctgatgggcgaggacgcccggtaaacggccgccccagcctgcgcagcagtttgccgaaagaaatgcacgggagctctcatactgaaagacggccccgggccgcgctgtgcgcggtccggggccgtctctgcgtccgggcttgcgttgtcagtggtcaggccgcacctgtgcagaagcgcaccagaatggcggccgcctgggcccgggtcgccccaccgccgggcttcagggcagcgggaccggtcccgctgatgaggccgccggcattggcccactgcataggcccacggcataggggctgatcttctctgcatccgcataggcggacaaatctgccctagctgacacatcgcggccctggctgcgggcgtagcggtaaaggatggcggccatctgctcccgggtgatggtgtcccctggtccgaaacgcccgtctccatacggtggaggatggtcacgatcatcccccgggtggtagtcacctccggggaaaatcgtccgtcgccggtgccggccatgaggcccgcttcggcggcgcagcgcactgcgctctcataccaggccccggataccacgtccacaaagaagggctccgcgccgggcttggtgaagtatgccaccacactgtcgccggagagctcgcacgtcttggcggcgctccactccgctgctccggcgtcggccttcacgctcagggtatagctgccggttagttcggcgccggtgaccttgatgatgatgacggggacggaggcacctcgcttcatggtgatggtaatggtcccgtcctcccacttctggtcgtacaggtcggcactgatggtcttgtcataggacacacggacctcatgctactggcctcaacacccaggttgcccagcttgtctacgggtaccacgctatacctataggtcaggttgttggccgcgcccagatcatccgtgtaggtatccgaggtggtaaagccgatggccttgccgttacggcggatctcatagcccagcagtttttcactgtcggcgtgcctcatggtcagagtcaccctgggttacggcgtatcactttccacccggggagaaagccgttctctttattttatccccccgcagaatttgagctattcatctcttttctggccccgcccccgctgtaatcctttgctgcggcgacgaagtcccgaaacaggggatgggccttattcggccgggacttgaactccgggtggaactggacggccaggaaccagggatgatccggcagctccaccatctccactagcttcccgtcgggggacaggccggacaggaccaaccccttctccgtcagcagggaacggaagtcgttgttaaactcatagcggtggcggtggcgctcggagatatcctccgcaccgtaggcctgataggctctggtgtcatgcgtcgtgatataacaggggtaagcacccagacgcatggtcccgcccttgtcagtgatgccttgctggtcgggcatcaggtcaatgaccggatgggcggtggctgccagttcactggaatgagcatcggccagaccggccacatggcgggcgaactccaccaccgccatctgcatccccaggcagatgccgagatagggaacctgattctcgcgggcccaacagacggcggagatcatcccctcgattccccggttcccaaaaccgccgggcacgatgatcccagcgcacccagccagcagttccgcggcattgctgtcgttgatgtcctcggagtccacccaacggacatccacctgcaccccgttttcgatcccaccgtgggtcagcgcctccaccacggagatataggcgtcgtggagggccacatatttccccaccagggcgatctccaaccggcccgccgggcgtttggctcgctccaccatggcacgccactcctccaggtggggcttactgacgggaagtcccaatacctcgcacaccgcttttgccaacccggcctcctccagcatcagcggcacttcgtagaggatgggggcggtctcgttggagatgacccgctccggcggcacattgcagaacagggcgatcttgtcccgcaccttctgggacaccggcccgtcgcagcggcagaggatcacatccggctggatgcccaggcccagcagctcctttacagaatgctgggtgggcttgctcttgggctccccggtgccgggaatggagacgatgagggagacgtggaggtaaagcacattctgccgccccacctcagcggccacctgacggatggcctccaggaagggctgggactcgatgtctcccaccgtgccgccgatctcggtgatgaccacgtccacctcctcccggcggccaacccggtagatgcgctccttgatctcaccggtgatgtgtgggatgacctggaccgtgccccccaagaaggccccctcacgctcccggctgaggacggaccagtagacctttccggaggtgatggaggagtccaccgtcaaatcttcgtcggtgaacctctcgtaatggcccaagtccaggtcggtctccgccccgtcctcggtaacgaacacctccccgtgctgataggggttcatagtgcccgggtcaatgttcaggtaggggtcgaacttctggagggccaccttcagcccccgggccttcagtagccgtcccagagaggccgccgctattcctttccccaggccggataccaccccgccggtgatgaagatatactttgccataccgatccctcccttgggtaagttggaagttcaaattttgacgcgtcagaacccgctggccccgtaatttttcagtgcccgggcggaggggtcatccacgttgcagccctcccaggcccgatttggcatccagaagtccttgatcatccgggcctggccggggtagtaccgctcgaacaggtcccgatagagcaggctctcccgggtgaagggcgggcggtactggtattgggcgcagccccgagtgaaagctaggtcgctgtactgcgctctggcatattccttcagatcatccaccatagagtggcccaccgcgtcggagaaggccgccttctcccgccacaggatctcgtcaggcagcagagcatcggactggaaggcccggcggagcagatacttgcccttgccgcagcggttgaccttcaacgccgggtccaccgacatgacatactccacaaagtccaggtccccgaagggcacccgggcctccatggaccagccgctgatacaccgatccgcccggagcacatcgtacatgtagagctcctccacccgcttttccgcctcagcctggaaggcagcgggagagggggcaaagtcggtgtacttatagccgaagagctcgtcggagatctccccggtgaggagcacccggatgtcggtagtctcgcggatggccttgcagcacaggtacatgcctacgctggcccggatggtggtaatgtcccaggtgcccagggcggccaccactttgggcagagcggctatcacgtcgtcccgggtgatgatcacctccgtgtggtccgccccgatgaactgcgctgccttccgagcgtacttcagatcgatggcgtcggtgtccatgccgatagcgaaggtgcggataggctttccaagcagccgggcggcgatggcacacaccaggctggagtccagtccgccagagagaagaaagcccaggggggcatcggcgtccagccgcttgtccaccgcggcgataagcttgtcatggatgttctggcagacggtgtccatgtcgtcggaccggctgaggccgggacgggcggggttggcgtagcggacaaaccgtccccggtaccagtagtgtcccggagggaaagggaggatctgctcacacaggcccaccagctgcttggcctcgctggcgaagagaatgccgccgtcaggatcgcagccatagaagaggggccggatgccaatggggtcccgggcggcaacgtattcgtccgcctccccatcgtagaggatcagggcgaactccgcgtccagccgggcaaacatgtccagcccgtactcccggtacatgggcagcaggagctcgcagtcgctgccgctgcggaaggtgtagcccctctgctccagctctgcgcgctgcctccgccagccgtagagctccccgttgcacaccacctggtcaggccccagggcgaagggctgcatcccacgctcgtccagccccataatggacagacggcgaaagcccagccagccggaggcggtttccgccacccgggccatgtcagggcccctggtataggcccggtccagacaggccaagacctcttcccgccccctggtcttttgggtaaatcccacgatcacgcacatagaaagcacctccaaaaatgtttgcgcagccctcgtcctcttgattaggacgaatgctgcgctccgcggtgccacctaatttgccgccggacggcggccccttttccggctctgacaagtcggcgcgatgtaacggtcgcagcccgttccccctactggcgcggtgcgttcgggtttccgctccggagcgttcttcccgcggcctcctgtgcggggctttcaccatcccccgctcgctgggactgagtccccgcagtactcttctccctcattgcgtttaacggtattgcctgaaaaaacggacaagggcgctgtggtccatgccacagcgcccttgctgttatgggatattatagtggccgccgcccccattgtcaagaaaaactttcggcgggcgtccccaatttccctcagaggcggatgggatagttgccagtgaagcatccgtcgcaaaagccgcagccagcgtccggggcgatctgatgcaggaccttcagcggcagaaagcctaggctgtccgcgccggtgagggcgcaaatctcctccggggagcggtcatgagcgatcaggtgctcactgtccggaatgtccgtcccgaagtagcagggggtgatgaagggcggtgcggagatgcgcaggtggacctgcacagcgccggcctcccgcagcaggactacgatctgacgggaggtggtgccccggacgatatcatcaccacccgcctcccttccacacagctgcgcagcgccccaacttaatgcgcaccgcctgctcctggctgcgctgatccggggtaatgaaagtgcggccgatatagcggtttttgaccagacccactccatagggaatcctcgactcctccgcataacccatggctgcgtccaggccggaatctgggatgccgatgactacatccgcctccaccggccaggtctgagccagcagccggcctgcccgccgccgggcctcatagacggactgaccgcagagcatggagtccggccgggcgaaataaatgtgcctgccgcccctttgtcaagaactccccataccggcggtgcagatagctcatttatgaaagtctattttatacttcctgcacaaatatggagagccgtctggctatttgtcttagtggcgaagcaaaattgagttgaacttgcaaaaacatcttgacatggaattgcggttcgcgtataatttgcccatagtttaggacaaaggcgttccgaaccaacaggtcggcctgcctttgtcctctttttattttaactttacttgaaagaatgagaggagtgtcctgcatgtcgtacagcaaggaagacatcatccgtatggtaaaagaagaggatgtggagttcatccgccttcaattcaccgacattttcggtcagctcaagaacgtggccatcaccgcatctcagattgagaaggcggtgaatgaccagatcatgttcgacggctcctccatcgagggttttgtccgcatcgacgagtcggatcagtacctgtaccccgacctggactccttcgccatcttcccctggcggcccagccacggcagggtagcccggctcatctgtgacgtatacaacaccgatggaacccccttcgtgggcgacccccggcacgtcctcaagcgggctctgaaaagggcggaggagatgggctttgatgccttcaacgtaggtccagaggcggaattcttcctcttccagactgatgacgagggcaagcccaccacccgtaccaacgacgaggcgggctacttcgatctgggccccctggaccacggggagggcacccggcgggagatctgcatggccctggagcagatgggctttgagatcgaggccagccaccacgaggtggcccagggccagcacgagatcgacttcaagtacgccgacgccctgcgtaccgcggacaacattatgaccttcaagctggcagtcaagaccctggcccagaaaaatggcctccacgccacctttatgcccaagcccatcttcggcatcaatggctcggggatgcacactaacatgtccctgttccagggcgggaaaaatgccttctacgacccggatgacccaaagggcctgtctaaagaggcatattccttcatcgccggtctgctggcccacgtgaagggcatggcggcggtgaccaaccccctggtgaactcctataagcggctggtgcccggctacgaggctccctgctacctggcctggtctgcctccaaccgctccgcccttatccgtatccccgccgcccgggggcagtccacccgggtggagctccgctctcccgacccggcctgcaacccctacctggagctggctgtctgtctggccgccgggctggacggcatcgagaagggcctcaccccgcccccggaggtcaccgagaacatcttcgacatgaatgccgccgcccgaaaagctcacggcatcgactctctgcccgactccctggaggaggccatccacgctctggaggccgatcccttggtgctggacaccctgggagagcatgtggcagccaactatattgagggcaagcggaaggaatgggaggagtaccgcacccgcgtctcctcctgggaacgggagaagtacatcatcaattattaaagcgatcccatcccaacaggggagtgaacgcacatggaaaagatcattgtggcctttgagagcgaaaagaccgccctgcgtgtaaaggaactgctggaggggggcggcgcggccgcctgcttggtgtgccgcaccgccgaccaggtgcggcgggccataaacaagctgccagtgccggcggtggtgtgcggctacaagctgggggatcagacggcggagctgttctttgaggacctgcccccctcctgcgccatgctggtgctggctcaccaggaccgattggatcttctggggaatgacgacatcttccgcctgccatccccggtaagccgtggggatctgctggctgcggtgcggctgctgctgcaagtggggcgcaggctggagcggtacgggcgcccctgtcacagtggggaggatcggagactcatcgaccgggctaaggccctgctcatggaccgccatggcataacagaggagcaggcccattactatttgcagaaaaaaagtatggacagcaggacaaaattggcccagaccgcccggctggtgctggacagcaaaacgatggaatagaggcggagacgaggtggtctcacggcgacggtcgggagacggaccgccgccgtttttatggaaagaggcgagacgcatgagggaaaaagcggctgaagggagagggctgtactgccccgaattcgagcatgacgcctgcggcattggcgccgtggtggacatacagggccgggccagtcatgagacagtggacgatgccctgaagatcgtggagaagctggagcaccgggcgggcaaggatgccgagggtaagaccggcgacggggtgggcatactcacccagatcccccacgcgttttttgccagggcggcggcggaggcgagcatcgccctgcccggacggcgggactacggcgtgggcatgttcttcctgcctcgggatggtttgaaacgccggcaggcccagagacagttcgaactggtgaccgagaaggaaggcatggctttcctgggctggcgggaggtgcccgtgcacccggagattctggggcagcgagccagggacaaaatgcctagcatcttccaggcttttgtggccaggccggaggaaacggctcccggcttggattttgaccgaaagctctatgtagcccggcgggtattcgagcatctgagcggggacacctacgtggtctccctgtccagtcgcaccgtggtctacaagggcatgttcctggttcaccagttgcgggccttctaccccgacctgcaaagcataaactatacctccgccttggccatcgtccactcccggttctcgaccaacaccaacccctcctgggagcgggcccaccccaaccggctaatagcccacaacggggagatcaacaccatccggggcaacatggaccggatgctggcccgggaggagaccatgttttcccccctgctggcaacggatagggacaaggtgctgccggtggtgaacgcctccggctctgattccgccatgctggacaacaccctggagttcctgatgatggcggggatggaccttcccctggcggtgatggcctgcatccctgagccctggcggaatgaccgcaccctctcccgctcccgccgggacctataccactactacgccaccctcatggagccctgggatggcccggcggccatcctgttctccgacggggacgtggtgggagcggtgctggaccgcaacggcctgcgccctgcccggtactacctcaccgacgacagccggctcattctctcctccgaggtgggggtgctggacatcccaccggagcatatcgtggaaaagtcccggctgcggccgggcaagatgctgctggcggacctgaggcaggggcggatcattgacgaccaggaactgaaggagggctacgccgcccggcagccctatggagagtggctggacaccaatctgctccgtctggccgacctgccgatcccaaaccagcgggtggagcggcacagccgggaggaacttagccgccttcagaaggccttcggctacacctatgaggacgtgaacgacaccatcctgcccatggcccgcaccggggcggagcccaccgccgccatgggggtggatatccccctggcggtgctggacaacagggatcggcccctcttctcctacttcaagcagctcttcgcccaggtgaccaacccacccatggatgctatccgggaggagatcgtcaccgacaccaccgtctacgcggccgatgacgggaatctgctccaggaacagccggacaactgcggggtgctccagatccacaaccccgttctcacctccaccgacctgatgaagatcaaggccatgaaccgacctggcttccacgcagccaccgtgtccctgctctattacaagggcacccacctggatctggtactggaccggctggcggtggcggtggacagggcgtaccgggagggggccaacattgtcatcctttccgaccggggggtggacgagaaccacgcggccatcccctctctgctggcggtgtctgccatggagcagcacctggttcgcaccgggaagcgcaccgccgtatctatcctcctggaatccgctgagccccgggaggtccaccacttcgccgccctgctgggctatggcgcccgggcagtgaacccctacttggcggaggagaccatcgtggatctgatcgaggagggcctgctggacaaggacttccacaccgcagtggccgactataccgccgccgtcctccacggggtggtgaagatcgcctccaaaatgggcatctccaccctccagtcctaccagtctgcccagatcttcgaggcggtgggcatacggcaggatgtaatcgacaagtactttaccaacaccgtctcacgggtggggggcatcggcctggaggagatggccgccgcagtggagcggaaccacgaccgcgccttcgaccccttgggacaggagactgacctgacactggagagcctgggggagcacaaggcccgagccggtggggaggaccacctctataatccacagaccatccacctgctccagcaggccgtccgctgggaggattacgggctcttcaagcggtacaccgccctggtggacgatgagacaaagccccacaccctccgtggcctgatggagatgaaatatctgggcgagcccatccccttagaggaggtggagagcgaggattctatcgtcaaacgcttcaagaccggggccatgagctacggctccatctcccgtgaggcccacgagtgcctggcccaagccatgaacctgctggggggcaagtccaactccggcgaggggggcgaggaagacgaccggctgggggacccggagcggtactccgccatcaagcaggtggcctccggccgcttcggggtcaccagcgcctacctggtgagcgccagagagatccagatcaaaatggggcagggggccaagcccggcgagggcggccacctgcccgccgggaaagtctacccatggatcgcttggtgccgccactccacccccggcgtcaccctgatctctcctccgccccaccacgacatctactccatcgaggatctggcccaactgatctatgatttgaagtgcgccaaccgtcaggcccgcatctcggtgaagctggtcagcgaggcgggggtgggtaccgtcgctgccggggtggccaaggcaggggcccaggtgatcctcatctccggccacgacggaggcaccggcgcggcccctcgtacctccatccacaacgccggtctgccctgggagctgggtctggcggaggcccaccagaacctgatccaaaacggcctgcggtcccatgtggtgctggagactgacggcaagctcatgagcggccgggacgtggctatcgcctgtatgctgggagcggaggagttcggcttcgccaccgcccctctggtcactcttggctgcgtcatgatgcgggtgtgtaacttggacacctgccccgtgggggtggccactcagaacccggagctgcggaaacggttcacaggcaagccggagtacgtggtcaacttcatgcgcttcgtcgcccgggaactacgggagcatatggcccggcttggggtgcgcacggtggaccagctggtaggccgcaccgacctgctgcgggtacggaagcccgccgccaaccagcgggcggccacggtggacttgtccgccattctggacagtgcttacgccggctggccaaagacccgctttgatccggcggacgcctatgacttccatctggaggacacagtggatctgcgggtactggaacagaagctgggcgtcgcccttgagaaaggcgaccataggcggctggaactggcggtgtcctccaccgaccgggcagtggggactatccttggttcggatatcactctcctccacggggaggcactccccgacgacacctttgtggtaaagtgtaccggcgggggaggccagtccttcggcgccttcctgccccgcggcctcaccctggagctggagggggacgccaacgactacctgggcaagggcctctccggagggaggatcatcgtctatccgcccaaggacagcccctttgacccggcagagaacattctggtgggcaacgtggccctctatggagccacctccggccaggcctttctcaacggcgtgaccggggagcggttctgcgtgcgcaactccggcgccgacgcggtggtggagggagtgggggaccacggatgcgagtatatgaccgggggccgggtggtaatcctgggccccacgggccgcaatttcgccgccggcatgagcggtgggatagcgtatgtgctggacgaggaccatgacctgtacctgcggctgaacaaggaactggtgtccatgggcccggtcacggaagagggagatatagaagcgctgcgaggcctgatccaggctcacgcagaggccaccggctcccccaaagccggacgaattttggccaatttcggagcctggttgcctaaattcaagaagattttgccccacgactacgaccggatgttgcgtaccatcgcctggtacgaggcccagggtatgggccgggtccaggcagagacggaggcgttctatgtcaacgccagaggaaagggggactgaccgtgggaaagcccactggatttctggaatatgcccggcagggcaatcactgccagccaccgctggagcgggtggcgtactggaacgaattccatccccggctgggccgggaggagcggcaacggcagggggcccggtgcatggcctgcggcgtgcccttctgtcagtcaggggcggtgttgaacggtatggtctccggctgcccactgcacaatctggtgcccgagtggaacgacctggtgtaccgcagaaagcttggccgcgctttggagcggctactgaaaaccaacgacttcccagagttcaccggccgggtgtgccccgccttgtgtgaggcggcctgcacctgcggcctaaacggccagccggtgacggtgaaggacaacgagctggggatcatcgaggaggcctgggagcagggactcatgtcccctcggccgcccgagacccgcaccggtaggaccgtggcggtggtgggctccggccccgccgggctctcctgcgctcaaaggcttaaccgccgaggtcacagcgtcaccgtgttcgagcgggccgaccgacccggcggcctgctgatgtacggcatccccaacatgaagctggaaaagtcggtggtccagcggcggctggatctgatggcggcggaggggatagccttccgcaccggtgtggacgcgggccgggacgtgggtcaggaggagctgagagaacagtttgacgcggtggttctctgctgcggcgcggcccagccccgagatctggacgtaccaggtcgggcgggagtggacgtctggtttgcagtggacttcctgacaggggcaacccgtgccctgctggatgggacttactgtccctctgcacagggcaaggatgtggtcatcgtagggggcggcgacacgggcaacgactgcgtgggcacctgcatccgccagggctgtaaaagcgttacccagttggagataatgcgtaaagccccaggcgcccgcaccgccaagaacccctggccggagtggccgcgggtgtgtaaaacagactacggccaagaggaggccatcgccatctttggtcatgaccccaggatctacgagaccaccgtctcacacctgcttcgggatgcggaggggcacctcaccggggtggagaccgtcctgctggggccggaccgcaagcctctgacaggaacggagaaactgctgccctgccaactgctgcttatcgctgtcggcttcctgggcccccaggactatgtgccggaggccttcggactgacgcgcactccctgctccactgtacagacagcggaggggggctattccaccaacatccccggcgtgttcaccgccggggacatgcgccggggacagtccctggtggtgtgggccattcgggagggccgcgaagccgcctgggaagtggacaggtacctgatgggacacggcgagtggaccgagctcccgctgattcagacagattgaaaaacagaaggcccggtcggtgcccgcattatgcagcactagataaggatacatcgtgaaccaggggttcatatcattttctcttagcataaggccacaccaatctgcatattttaggcggaaagcttagagtaccagggggtgtggcttttctattttccctaaaattgaccagatcaaaaaatgatattttcgaggaataaacacccttatagaggttgttttccagagttttccgtgtttccccgctgtattcccttttagcgccctatttgctctcaaatagggcgctaaaattcgaaaaaatgatatacaaaaaacagcgcgccggtttgttggttttgtcaaccatcaggccggcgctttttgttgcccggggagttcaaaaagggcattttcaatttgcgccggagaaggatgacatagcgcgccaactttattcgtactgccaaaaagggcacacactttttcgtcccatttgctaagtggataagatggtacgataggagactcaagcgagtgactggagcgatgatcgaaaaagggcattttgcctgaaggaggaagatgcacatgaccaaagaaacctatttcgaggaactgtcctacgccctgcggcggcgggagctgctgccccggccggtggaggaggacggcctgctcccggtggagtggaacggccgcatcctgtgccgggtcacggagagcggcgccgtccggtatgaccccacctgggtagacaccagcagggcaaaggccgccctggcccaggtcacggaggcggcggggacggtgatggagtacatgacgcttctggagaatgccccacctctgaaggcggatggcctggcggacggttaccgggtgctggcagagttcaacggcacagtgctggccgggacagagacgcggctgggggcccagttcgtcacgtgggcccgggactatgaccggagcggggtcaacaacggccactactacatggaggactatcagggagccaaggaggacttcgccctccgctccggcctggtggccagggaacgggtctttgaccaggagcagctggaggggctgcgccaggcggtgcagggcttcctctatggagagggccccgcctcctaccagcaggagttccaatgccggcgcctcctggatcagatcacagcccagctgccggaaagaacccaggatcagatgcagagcgaaagtcaggagcttggacagtccatgtgagggcggcgccaaatcaggcgccgcctttttctatgcccagattttatttcatttctgcgcccacaagccgtacgccccggagcacccggcggaaccgccacccaggccggtatgcacccgctcccccctctgcgtgggctgcccctaccccgccaacggcttcctctgctgggggaaggatgggaagtgcctgcgctcggagatgcggcggttcaatgccccggacaggcaggtggcacaagaagcgaaggaggagtgatttcgcggtgagaccatatagcgactgctttcccctgcagccggccgcccgtgaggaggccggcctgttctactcagatgaccaggtggacaggacactgggactggacaggccggtgggccgggtgtccttttccaacggcgagcgcatggagttcacagccccgcaggattacctccggaccatccgggaggagctgcccacaaaggatgggaccggcttccgctttgagaccctgacggatgacccggcggtgcgcaaggcggtggacgatatggtctatgacctgtatggggaggagaaccccaggccactggaggattacgtgccccgtcaggggccggagatgggagggcagcagatgtgaccacacagaacagacagccggtgctgcgctgtgtcctgagcaacgcggcgcacccggagtatggccaggtgaccatccccttccccatccccgtcatggaatatgagcgcaccctggaacttctagccgctatggaactgggagcccgcctgaaacgggactgccgggtggacgagctggagagcggcttccccatcctcaaacgcctggagaaggtgggcgccaatctggacgagctggactacctggcccggcggctggatagctttgacgactatgaggccgcccagttccaggctatagcggtcaggctgggtacgtttgatatgacggactttatcaatcttaccttctgctgccagcaggccacagtaattacaaacttctcagatctagagggcatcggaaagacgcacatcctgacgatcagcggcggctgcttgtatgtagacgagcaggaacaggtagacggcagggcggaggccctgaagttgatcctcaacgagcacggtaccgtaaccccctatggggtggtctatgacaacggtatggagctggaacagctctacaaggagggcggccccttcccggactatcttgaccgggagttcgtcatactcctggaggcgtccgccggcgaagggcagagcaccctgctggttctgccggacagcccagccaggctggaacggctcctgtgccgcaccggtatacgggacagcccccaggcacattccagggtagtggacagcaccctgcccggcgaggtcatccgcagcattccatcggaacatctgtccatcaatggcctcaaccggctgtgccaggcggcggagcggattgcaccggaggatttgaaaaccctggtacaactgctggccgacaaggaccaccccagccaggggccgtccatgggcggcaattccatgtgaagtggagggaaagaagatgcagaaaacagaatttatccggcagctcaatgagctggtccccagtccagatcccgtcaccaccgaggcgctgtaccgctttgaccgggagtgtgcggagacggagtacatcgatatgctcaccgccctgcgagtggtggcgcggaatttcagtgaggagacgctccagggcgcctatgagatcatccagaaccaaaacgccgccctgcccagcgagctgttcaccgccgccgtctaccttcaggccgggcgtacaccggcagaggtgtccggtctggccagggagggccggcttatgggcttctttggcccggagcggccggaggagctcagccggattgcgacctgcaccattgtggagtctgggcgggagcaacggttttacaccatggacttcgggaggttcaacccacagcatgccttgaagcgggccataacatacagccgggaagcaggtatatccgccacccaggccatggcccgcctcaccatggatcaaccggagtttgccgaaaagcccggcgggccccgctgtatcctggacggcctgggctcagagctcaccaaggcgttgttccagctctcgccggcctgccccgccgtggccgcccatatcacctgccatgcggatttgggtatcacagagatagcttatcatcctctgtggctggagcgaagccagagtcaggcggccatccagcagatgtgaaaaaactgctggatatcacgggcacactgtggtatgttgtgtgcttaccagaagaaagggcgggaaagagctatgaaccatcagaggaaacagagcatgcgcaagaaccccgttgaaggccggcttccatttggggagctggccttttctattcagatgatacttgcggcaaaatgaagggaggcagatcatcatgcaggatgtatcgaaggagtggctggatttccggcggaatcagttccccgcgggcagccggatccagacgtgggagctggatgatcccaggaacacgctgaaggaggccagaaagctggattacatcgatgactcgggccggttccacgtccggcagagcgacggaggtgagtgcgtcctgacccttggggaggagatgttctccgtccacccgcctgagtccacccagctcaagctgtacatgcccctcaccgccagcttctatgcccggaatgagtggggagattgggatgagacgggtgaggaatgggacggcagaacgcttctggattatgaggacaggatcctgggttcatggtgtggaaccgggtgccggaggaggcggggcggggcctcatgctctggtgcgacaaggagttcctggacgtcaaggtgcgctccgccgtgtttacggcagaggccagaggcggcaggctgtggggcgtggcggagtgccaggtcgtcggccagctctctccggaggagctgacaagcctgaaggactatctcaccggccaggctgcggacggcgttggcgagggcctggagcagcaggcaatccgtgtggacggcggggagctctatgtccacctgtggcaatctgagggctggagcattcagacagagggggagcggttcgggcagacacagatccaggaaccgcacgatgacgtggtccccaccgaagcccagcacaacaggttcggtggggagaggagttccggcgaaatgagtgagccttgcccacagggcgaggcgaagggtatggagcgcggaatgacgatgggagggatgagcttgtgagtgttcccgtgctgacccaccgcagggatctgaggaaaggggatcttgtgtttccggaggagatcctgcccattggccacatgctggatgttcaactcgactgtgtcggcaaagaagttcagcaggaggtgtttggcccggagttggatcccagtccactgtgtgactggctgaacctccatactgcctatgattttgcgcttcaggatgtggtggaccatatagaaataaccctctgccggaattttggagaggaggagcacccattcacgtatccgctcaacagggcggagcgggacgtcctgcgcggggagatggaggcctgctgccagctccgtaccggtcgcacactagcacagcattacaaccatctgctggtgcaggaggaggtggagccgccggagctcacggctgggacgcgccgcatccccgtggacaaggtgagttttgcggatgagctctcagagtgcggtgggctgctccagttctatatgccggtggcctttgccccggacgcagtctttggcacccacgtggcgaccgcagaaaacgacggctggctcaacgtgtacgccgcctatgacctgaacaccggcaagccgtgctctgcactggatgttatcctggtgtgcggggacagcagcgagttcgccttccggtatccgctggccaagcaggagcaggccgcgctgctggaaaagatggacgcctactgccgggagcagaccggtatggcgttggcggatttccgggcccggtacctggtggaggaaccgcagccccgccaggctcccagtctggcccagctgtgagcacgccgtcggccccgtgtgcgccctgtgtgacgtgttcaggcggagggcgggccagggccccgcccagccagaaaactgccccgttggggccagtttcgccccggtttggggcgttcgattttagtacgaggataaagggaggtggtcgcaagcgccggcctcccgcccacaaagtcccgcagtgtggggctttcccggatttcaggctaggtggtcggaatgggagattctggccgtttggggtggtcgggttcagataaacacttactgcgccagcgggttccgctgtgtcgcaggcaaaaagcggaggtgaagaacatggaggaacacgacaacaaaaagcgcaccgccgtctggctgacacccggtgtgatccgccggatggacagctggctggaggaggacaactgcaaaacgcgcagtgaatttattgaaaaggccctgcggttctacatgggctacctggccacggaggatacctcggagtacctctcccgcgccctggcggacaccctgcggggtacattggcagacaatgaaaaccggctgcgcactttgctgttcaagctctgcgtggaggtgaacatgatgggccacaccgtggccgcccacttccgcgctgatccggtgaaccgccgggagctgcgggcctttgcagtggacgaggtgctgcgcaccaacggaaagatccgcttcgatgatgcactggatctccagcggcaggtctaccctgacggatgagccgcgtccggttcatgtccccctacctgaagggcggcagggatacagccaagctgtccaaccgggcccgctacatcgccacccgtcccggcgtggaggtgatcaggggcgagcacagtgaccagcccgccacgaaaaagcaacacgattatatccaacgtctgctgcgggactttccgggcgcggaggaattgctggagtatgaggactactgcaacgcgcccacccaggcaaacgccaacactttcatccgccaggtgcaggaggacttcgcggagcccatgagccggatggagaattacctggactacgtgtcccaccgccccggcgtgcagctgaacggtgagcacggcctgtggtgcgccgggggcaaggtacgcaatctctcccaggccgtccgggaggtggcggagtacaccggcagtgtgtggacgccggtggtggccatccgcagggaggacgcggaacggctgggttacaacgacgcggagagctggcggctgctggtgtgcgcctgcgcgccggagatcgccagggggtacaagatcccgctggagcatctgcggtggtacgccgccttccaccgcaaggaggacagcgtccatatccacatggtggtgttctcctccgatcccaaggagggctacctcaccaggcagggtatccagcaggtgaagtccgccttcggccggcggatcttccaacaggatttgctccacgtctacgaacagaaaaccgaataccgggacgctctgggccgggatgcggagcgcaccatggcagagctgatcacccagatggagactggccagatccaaaatgagaacctggagcggctggtgctggagctggcccagcggctgcacaacacccagggcaaaaaagtctacggctacctgccacccaaaaccaaagtattggtggacgccatcgtggatgagctggcaaaggacgagcgcgtagcagccgcctacaacctgtggaaccagatgcgggaggaggtatgccgcacctattctgagcagctgccggagcgcctacctctttccaaacagaaggagttcaaggccgtgcgcaacatggtcatacgggagacgctccggctggggcgatgtgagccgcctacaacagatgaggtggtacacgggtttaccccatctagcacaccgcctgcacaatccggtatgccgcatggggtacatcacccacagcagaaggtcacgcaccaccagcgtacacagacacatcgggcggtatcccacgcggataccgcccgatgtgtccttcagctattccacaacatgggccgcatcttccgagagcagtccgcctccgatgccatccaggcttgcctgcacatcgacaggaagcgccgccggatgctccgggagaagcgtatggccctgggacacaaggccgatgaccatgaggaaatcccccagcattctcaaagataagatgggggactgccattgaactggtagtcctccgtggtttcttccgctacttcggctccagaaatcctatgaccatatctaccgcctctgaggagatatcctccggagcacgctccacaaaggaggcatggcggctgttcaaatccagcatccgggcctgatcacacaggatgaccccgtccgtcctggtacgctcatccagccggaggtggaacgggtgcccccggtctgtgtgggtgatggggcaaaccatggtcaggctgctgacccggttgaacaagttgttgctgatcaccaaggcaggacggcggcccttctgctcatggccggactggggatcaaagtccagatagacgatatcaccctgttcaaaaatcgtcaccatgcctcagagccctccgccttcccccaatccagctcttcggcctcaattcggtcgatctggtcaatgggctttccgtagaatgcggtgaggcgttcctccagggtgcggtgcgggatggaagaggcacgccggatgttgataccatcatccatctgcaccagttccacccggtcgtgttctttcagaccaactgcgtccaggagggccttggggatccgcaggccctggctgttgccccatttttggatcgtcgcgtacatgaacgacacctgcctttcaaagatagtatatacagagtataaacaaaagtcaaccgtttgattcgaggtgagccgacatgggaacctatatccattttaccgatgaacagaaggagcgggccaactccgttgatctggaggaattcctgcggcagcggggggagaaactgctccgcgccgggcgggagtcccggctggccagggtgcaccatatcaccgtccggggcaacgaatggtacgaccatattgcccggcagggcggccatgcggtcagctttgtccagcactactacggcatgagctatcaggaggccatggagctcctgttggggaatgaattgggcgcgacatatcccgccgcagagccaaagcgggaggagccgcctaagcccttcgccctgcctccgcccaacgccgatatgcgccgtgtgtacgcctacctgatgaaacagcgccgcgttagccgggaggtggtcacccacttcgcccggtccggcctgctgtacgaggatgctcaataccacaactgcatctttgtgggcacggacgagcatggtgtcccccgccatgcccacaagaggagcaccaacagccagagcaagtctttcaaggtcaacgtggaaggcagcaggccccagcacagcttccaccacgtggggcaggacggcctgctttatgtgttcgaggccccgattgatctgctgagcttcctcacgctgtacccggacagatggcaggagcacagctatgtagccctgtgcggcactggcggccaggcgcctccaggaagagttacagggagcaggataccacagcggtatcctgctccctgtgcataaggactggaacgacgacctggtgcaagggcagaccatggccggccttgtaatgaccatggggcagagtatgtaggccgcagaggcgcaccgcccgccaggggggtggtgtgccctgccgctggaccgggggccggttcattttggcccgcccagaaggtcacaatggaagtagatttaaacacagagagcagacaacgaagggatgattgcagtgaacaacgacacctggatgctgatcctcctgctggcggtggtattcggcgccctggtcgccaccaccaccttttccggccggggcagcctggacagcatcaagagtaaaaccgtgggcgacgggcagcacggcaccgcccgctgggccacgccgggggaaatcaagaagaccttccgctccgtccccttccagaccgcgctgtggcggaagggggagcgcctcccgggcacacaggggctggtgttgggctgtaccggaaagaaggggcagctcacggccctggtggattcggacgatgtccactgcctcatgatcggtgcctccggcgtgggcaagaccgccttcttcctataccccaatttggaatacgcctgtgccagcggcatgagcttctttgccagtgacaccaagggagatctggcccggaactatggggccatcgcccgggactgctatggctaccaggtggcggtggtggatcttcggaaccccacccgctcagatggctataacctgctcaccctgatcaatcactatatggacgcgtgccggagagatccggctgacctggccgcccgggccaagtctgagaagtactccaagatcctgtccaaggccatcatcaacccggatggggagaactttgcacaaaatcaatatttttacgacgcggcggagggcgtgctcaccgccgtgattctgctgctagcggagtacctgccgcccagggagatcgacggagtgctgcgagagcggaggcacatcgtatccgtgttcaagctggtgcaggagctgctggcccccagcattctgcccgacaagaatgagttccagctcctcatggaccgcttgccggaggaacacaaggccaagtggttctccggctccgccctcaccgccgccgagcagtctatggcctccgtcatgtccaccgtcctctcccggctgaacaccttcctggactcggagctggagcaagtgctgtgtttcgacagcaccatagacgccgagagctttgccgcaaagaaatcctccatcttccagatacttccggaggaagatcagaccaaaaacttcttggctgggctaatgatccaaaccctgagtcgggagcttttctctgtggcggatgaacacgacgggaagctgccctgccgggtggtgtttttctgtgacgagctgggcaccatgcctgccttcgacattctgcccctgttctccgctggccgctcccggcggctgactctagtgcccatcatccaaagcctggcccagctggagaagaactacggcaaggagggggcggagatcctggcggataactgccaggacaccatcttcggcggctttgcccccaacagccagaccgccgaagtgctgtccaaggctctgggcagccgcaccgtgatgagcggctccatctccagggggaagaacgaccccaaccagagcctccagatgatcgagcggcccctcatgaccccggacgagctcaagtccatccccaaggggcacttcatcgtcatgaaaacaggcacccaccccatgcaggcccgcctgcgcctgttcctggagtgggggatcacctttggtgcggcctaccaggtaccccagcaggccgcccgaaaggtctactacgccagcaaggcagaattgaccgatatcatataccgggcatttcctgcgcctgcctgccagaacaactaccgcacgccgaaaaaggaggaaaccgtgccatgagctattttagtgagatctacggcgacccggagctgagtgccagggccaagcaagtgctggtgtacctccacgaccgggcaaacaaggatggcaagagctggtacgccatcgccaccatggccaaagacctgagcatctcccgctccaccataaaacgagccctggcagagttgatccaccagggccgagtggagaaataggcaagattccgggagaacagagggtgtacttcgaactgttatcaaataaagcaattgatgcgcatctaatgtgataactcagtcagttaagatataaagtgttgtggggagaatttttgcgttttatgaaatagcccatagtattcatgaaggatttagattgagataaagtgttatacgaaacataccgccttcctgctttatatcgagcgtacccccgtatttgtctacaaccgactggacattttgtattccatatccatggaaagaatggccggagtgtagacgatgtttaccgccctcaatatacgggttggacatctcatagagaagaagattgttatggactgagatctctaatgagattttcctatgttgggctggaagggctagacatgcctctaaagcgttttcaaaagtgtttccaataataatgctaaggtcgagtatattgatgtttagagtttggggtacccagacagataaatctaatggtacagtcaaatcattagcttgctgggcatagtgttgcagaattgcgccgacttccgggttcccgacatcaacaacacttccgattttgctgagagagtcctgtgcatcaaggaacacctgttccacagacgatttatccccgcttaccgacacagctttcatggcagttaggtatttgctcatatcgtgccacatggcgcgggtttgctcctgctctttccaaaggctgtcgtaatagcttaactgtagttcaagctgttgctgtcggagatcggcattgtgccgctcttcctgccgtgctttgaccacctctgcatagacaatgattataatattgagatagaggatgcctattaaaataatcgtcgattccacagagagttttcgtcctccattttgcgtaaggcgcagaatttcatcgcagaaatagacgctgaatatctgacacgcaagaagaggcaacaagcttttcagcttcagtaaagagtgctccctgtgcatgagtggaacggcgattatgaccaacgctaattggcacactttcgctatgagaatataaatagcccgttcataccccggggacataacgtccagatactcccaccccataattgcaagcagctttaagcaaaggagctccgtaatcaaggccaacgcacaaaatacggtagcaacataaactgcattaagtggtgcagagcgataacagactttacacagcacaagaataccgagccaagtgtaaatagttcggacaatcggcataacaggaaccacgttcaaggccatgagtcctattccaaatataatataggcaacccacactatcgcagatgaacgtgagttccgggaaagtagcttttgcagatagaaaaagatgaggaatactccaaaaacaatggtagaaagatgatagatgaaatacatacaatcaccttctcaaaaagtgaaacagggcttcatcaaataatttcttccgatttctgctgatggggatctctgttccgtctgttaaaagaaggttggccttttgaatacggtctacaaaatcgaggttcaccaggaagctgttgtggggccgtgcaaagccattgccccacaaagtcccctcaaattccttgagcggagtccgcacctggtactgttctttgctggtatggattatcgttttatagctaaagacctcaatgtacgtaatgtctctgatccttacgagaattggcccgcgttccccggccacagggatgctttttggggagcacttagccactgcggcagatactgcccgcacaaagtccgggtattcgaccggctttttcaaataccgaaaggcaacctcatagccccggattatgtaggccccactctgtgtaatgaaaatgatcaacggaatatcgggcaacttgttgagttcctcagccgcctggtagccgttcataccctccatttctatatccagaagtacgatatcgaaatagtcccgccgaaaagccgcaagcagctcctccgatgaggcaaaccccttccagttcgcttgagcgttgtagcgtagcaaatagtcccggatctgccgcagttcattagggttgtcgtcgcacaacgcgaatttcatttctctccctcaacttggtcatgagtgctttttgtggaaagctgtacggatactgtcctgaataaatttctgtacaggctcgtccagttcagagagcatattttccagctcgctaaattgatattgatcttgcttctcgtcatagaaaatctgatttgcgtccagtgaaagcacattgaccagccgctttagcgtggggatgctcgccatggacaggcctcgctccaactgcccgatatagccggccgatttcccaatcaattccgcaagctgctcctgtgtcaatccgtgctcttcccgtttcatacgaattaagtcgccaatctgcatagccatcaccaatgccctcagctgtagtgttgctattattattacatagcaaatcgttggcatacagatagtgatacaatgattttatcatagttatacaaaagaaacaaccagatactgcacagaaacgacaggttacagcaaatctattgtgcattttatacaagaagttaatatatacttatcagtaaaaagaaggaatgaacaatgatcaaaaaggcggcagccggatatgtcggttggttgtgtgccaatgggattgtagcgccggaaaagaacaaattaggcgggctgaacctggcaatcgggatcttccttatctggggccttcaagcgccggccccatggtgcacaagctattacttaggagtcatcgcagcatcaatttcgatgtgggcggctcaaataaaagaaaggatgtgtgtgcaatgaaagtgatggttgaacgtattttactgtggtttggcggggcaatggccgtgctagcgagatatacagccactgcgtcggtaagctccacctgcttctacacggcctatcagccggatgtaccagatgagctttgagatgaaaatgtagttcaattgcaaaacaaaatttagcagaaaaggggtgcacagatgaactggaactggaaaaaaatgatatctattgtgctggtagtaactgtatgtaccacagggagtgcaatcgctcaagctgttgaatgtgatgtgccgcaatatactttttcagatgaaaacatcgagattgtagaccctgctctgttttatgacctcttcacacaggagaatgatatcaatgccattcaagatgatactctagatgcttcatataaatatacatttgctccttgggaggataatgctgacaaaagcgatgtttctgtggattttgtagtcgtagtaaacggagtaccggcatacggttcggctactggtgtggttgatgcatatgatatcaacgctggcagtatcctttgggctgggcctcttaatggaagtattgatattaatgggtacaagtatcctcttattttgggattcaccaagatggagccgagtcaggaagtctgtctttcgataacgatccaatcctttgataatcatcccaatatggaaccagtttatttttcaattggtacgcccttgataacagacggtgttgaggaatatatcagaaatagacaagtagcagtaggcgcagatgatatcagtggtgttgtatctgatgatgcttttaaggcaaatgacttttatcagataggaagcgatttcggtaatttcaatggtggcctaggaggaacatctggaataggccaagaaagctttgtatatggcaatgctacaactggaacagtcatggtaactctgcgtacacatggagatcggattgataaggccttttcaggagccggggttagcaactcttttgttagtcgtcttatgattaagttaaatcgtcaagactatacagatgatagctattcatggattgtaggaattgaacagtacgattttccgagttcttcttttggaaaatctggggaattgttaatgcccctatttaatgagatacttggcgtgatgggagttccttcaaatgtgattagcagtgcactctctgggctaacaggagttgtaactaaagaaaatgcaagtacagatgcgtactatgtttcttgtgaattctctctccttgaagaagcacgctttgataagatagagactggccttccaatagtgttccaactcgaccataatagcaattatacaggatatagtgattatgcttcttccactgaaattatgtatcgtacttattttaagccccatagtgcaaacaaaggtacatactactataccagttgtgaagatacctttattcctttccaaatcacacttccagaatgaaaaagagtgctatcattattgtatggggagtcattctatgtacgagcgtttttattgtagtacatatgttatattatacgaaagtacaaatagaaacacctactctaatacacaagtcttttgaagggactatttccttctattgtgatgaaagtgactccccatacacacatattgttatcgcattggccaataggcccgataaaacagaacgatttgttgttactgaagacactatatttgccgacgattcagaaagtattattgcagagcgtatagtaggggtgcacgtagaaatagaatctgaatattggaataatgtagaatatgattactatccagttactttaatttccggatgtctttaatgtaaagactacaaaagtattcttgatgtggacaagatgaaggtggttttaatcgatctatactagtattttcgtttagaattagtaaccataaaatcttccggcgcataaaaggccgtcatctctgcacataggtattgagatggcggccaatgttattctatgcctcgctatactacccctgaatttttatttctagtgctgaaaagtcccctaaattaggggacttttttaacacaaaatcaaacgctgaacgtgacaaaggagagataatccagaagtttatggaattcagagcttcgacgaacgtccacagacgatcatttcacgccagtgattgtacttggatatcccccacacagatgcgccttttcccggttaatagagacaaattcaagtagggggtgcttttgtgtgggaagaactagtcgtaaaacgctatctttgtgcaaagacggctgggctgctgaccttggaatattatctgctgataagtctatttgcagaagatctggagatttacggtgtcaaaattgttgagtggcagaacagcaaccagcgccccggcctcacaatgagcggccagcagatctttcgcccgattgctctgctttccaaagggactgttgtgccgacaagcttggtggtggaatttatagggggctgtcgtttgcgttgccgggggacggaggaccttcaatgagcgtagaacgtggagtgtcccttactatttacatttctacttatagtttctctctgtccgaatagagtatttgcctctcatggggagctcgtgttgctgtggtctgcgactacagcaacacgggcttttctcttgattaaacaaaaccgcattgcgcattatacatagatttttacgcccagatggagcacaatgctgattttacaaaaaccagaggaaaactttttttaaccggaaaagaaccttccgctttaacctttatacttcaatcacagggcaagacgagagcggtgagaggaatgcccccgtcagagcggagaagtgaaatcctacgtctgctatgcaagcggaggcacgaaacagccataaatcttgcgacagagtttggtgtctctgagcggacgatccgcaacgatttggtgattctctcctgctattacccgatccaagttacatggggacgatatggcggagtggctcatctaccagaatggttccacctagaaaaccggatgttatctccgaaacaggaaatacttctccaaaaactgaaaacagccttagatggggaggagctccaagtcatgaatagtattctagcccagtttgccctgtattgggagtatcggtgatctaccgatttccgtcctgatccttgtaaatagaatatccggcagcgggatacgtccgctgacgagaggccctccgggaggggggctgaagcgacgctggaggatgcgccaagaccacctgtgcgggctgtgagcccgcatcaaagacggccaaggaaggtgcagagcggtgcccatctgtccacaaagtagcctgtggcgggctgtttcgcattgcggctggcttatccggcccgaccctcgtcagcaatctgataatgatactcctgtccagccacagccccgggtaaaaccgggatcaagcaatgggggcagctcggagagatcctcggagggatgagattcccgtgatgtgtgccaacacagtccgtctgctgccgcccagggcccgggaagtagtgtcgaatagggccaaccagcgaaatgtatttttgagagaattagcgggggccgttctgcggccatacgcctcataacggcccccatttgaaaatggagatatgaaatgaaccacaacattaactatatcgggatggtgaacctccttcatcacctccagaatgtcggccttgttagtcggaaggaggccgggaggaccgcggcccggctccgtgtagagaccggggcggacgtcatattttctccctgatttttgttgcgtttggatatggatattttgcggaagtgctggtattgtgtgttgctgacaggagatatagagaggcgatttcgtggacgaacagaagaaaactagtggttccctggcattgaacagcacgccccgggtgatcaccatcgcgcccagcaccccagtcagggatcgaaagctgcgggtggcggcctacgcccgggtgagctccagctcggaggatcagctcaactcctttgccgctcagaacgcccactatacagagctcatcacagccaacccggagtgggagttcgtggacgtgtacgcggacaagggcatcactggcacctcagcggagaagcgtgacgacttccaacggctcctggcgggctgccggcggggccgggtggataagatcctggtgaaatcctcctcccgatttgccaggaacgccaaggagtgcctgaaggccatccgggagctgaaggccctgggggtaggggtacggcttcgaggaacagggtatcgacacctctgaactggccggcgagcttctcaccgccatctttgccatgatggaccagaaggagagcgagaacatctcggacaacctccggtggagtatcgatatgcggatgcgcacggggaaatacaatgcctgcttcgccccgtttggataccaacttgtgggcggaaaactggagctgatccttgagcaggcgccgattatccggtatatctatgacgcctacctggcaggcaagacggcggaggacatcgcagcgacgctgaatctgttctctgatgaccgcccttggaagccacagcggatcgactacatcctcaccaatgagcggtacagcggcaatgcccttctgcggaagcgatacgcgacggatactataccccgcaaagtgaagcgcaaccgtggagagaggcccatgtgttttgtggcaggaatcaatgaagcagtggtttcgcaagagatattcgataaggcgcaggaactgcgcaaaaaacgatgggaaaaccgccttgtcgaccctgacatttttatatcccgccaaaacgagctggcggaacagctccgcgccgcaaagctggagaaggaacggttcctgaaggccgaggaggatcagacgatccaacagactcaggagctgattgaagccctggaggctgggccggacttcctggatgccttcgatggggagctgttccgcgagctcgtggacaagattatcgtggagagcaatgaccgtctgcggttccggctggtcaatggcctggagctgacagagcccatagaacggacggtgcggtgatggggagcaaccggaaacggcccttcggctacaaaatggagttcggggagatcgtgctccacccggcagaggcggagacggtgcgctggatctacgacagctacctggccggggccagctacaacgctctggtggacaagctccgggagcgggggatttcctatgacggggacaagccctggaacaagaatatggcggcccgcatcctggcagaccgccggtacaccggcgagggtggattcccgtccatcatcccggaggggcagttccacatggtgcaggtacggcggcaggagcggacaacgccctgcaaaaagagcccagcccagaaggagcttcggaagctgtgcggcggcagcccgccggcctgggtggaacggcaggtgctgggcctcctgaaccgcctctaatccagcgcccggagctcattgcctgcccagtcccaaaggccgagccaccaccagaggtgacgaagctgcgccgggggctggacgagctcctgcaccgcccgccagtagacgaggctcaggccagagatctggccttccggttggccaccctccagttaaatgccatcgggccggaggagtatgaaaccctccgccttcgtaggctgtttcaaaaccgccggcctatgatggaactggagcaggaactgctccatgagagcgtccgccgcatcgccgtcagcaacgggacagtcaccgtcctgctgaaaaataaccagaccttggaaggaggaaattacacatgaacgataccgcgcccaatgtcatcgtcatcccagccaaagtggaaacaccccaggaacaggataaaaagcgccacctgcgggtggccgcctactgccgggtgtctacggacagcgaggagcagctctccagctatgaaaaccagctctcttactacacggagaaaatcatgaaggaaccgggctagaccatggccggggtattcgcagacgagggcatcaccggcacatccacctgcaagcggaaggcgttcctgcggatgatccgccagtacaggcaggggaagatcgacatgatcctggctaaatccgtctcccgcttcgcccgcaacaccgtggacaccctcaacttcacccgggagctgcggagcctgggtatcccagtggtcttcgaggagcagaacatcaactccatctacccggagagcgagtttctgatcaccctgcacggggctttcgcccaggccgagagcgagagcaccagtagccgggcgcgctggggcaagcgtcaggccatgaaatccggccatgtcgccatgcagtacaagcagctgctgggctatgagaagggccccgacggcaagccaaggatcgtgccggagcaggcggagaccgtccgcttcatctatgaccgctatctggccggggacagcatccgggagatcaaggcggccctggagggccagggaattcccacggtctccggaaaagcagagtggatggcatcccatatcaggagcatcctgaccaacgagaaatactgcggggacgtcctgctccagaagaccttcatccaggactgcatcagcaaaaaggtgatccccaacaccggacagctccccaaatacctgattcaaaaccaccatgagggtatcgtcagtcgggagaccttcgacgctgtccagctggagatggctcggcggaacgccaaggcgggcgacacgcgaaagagcacccccaccggccggggcaagtacagcggcaagcatgtcctcagcaaactgctgttctgcggggagtgcgggacggcctaccggcggtgcgtgtggactcagcgcggagtcaagcgccccgtatggcggtgcgtcagccgcctggactatgggaagaagttctgtacccaatcccccaccctggacgaggaaccgctccagcaggccatcctggccgccgtcaatgccgtcatgctggaccgcgataccctggcccggcagcttaccgccgtcatggagtgggagctggccccgatgctgggtgagagtatgagcctggcggacatcgaccgggccctggaggaactgagcagccagttcaacagcctgctggccgaggcgtcagccaacccagcagaggactacacggagcggttccgggagctgtccgagtccaccacccgtctcaaagaacggaaggcacagctggagggggcctgccaggaacagggtcggctccagaaccgcctgcgggcggtctcggccgccatggagcatatgacagcggcactgacagagtgggatgaggaggtcatccaccagctgctggagaaggtgacggtactctcccaggagaagatccgggtgaccttccgggatggccgggagatcgagcagtatgtggcacagccaaaaaggaggaagcttgcatgaagatcttcgctacaggcgatacccactggaattttgagcggtttcgcccggaatacttcccggagggccaagagctcaccaagaaagatgtggtactccagctgggagacttcggcggcgtgtggttcggggataaacgggatgacgaggccctggacaccctgctgcaaaccgaactgccggaggcggaattgtaccttgagattggcagggccatctgtgctcgcccggagaagggcgcggcggtaatggccgctgagtatctccaggccaactaccccgagtgcgggggcttctcccccagaaacctgcgccggatgagggagttctaccgagcctacgcagatagccggggactgcgggcgctggccctaaagctgggctggacgcagaatgtggccattctggagggctgtgaaggcagccaggaacgcacatggtatctccgggccgctctggagcaccgctggaccaagtccgagctgctggaacagatccaggctggggcatggctgcaatccacactcgacgaacagacggattcctgctatactgaagaaaatacagagagtgtggagtgtctggagcatgaagaaaatcctttttgtgtgtcacggcaatatttgtcggagcccgatggccgagtatgtcatgaaagatctggtgaaaaaagcgggcctggaggccgagtttcaaatcgcctcggcggccaccagccgggaggagatcggcaacccggtctacccgccggcccagcggaagctggcggagcacggcatatcctgcgagggccacgccgcccggcagctccgcaaccgcgactacgaggagtacgacctgctcattgggatggacaaggccaacctccacaatatgttccgcatctgcggcggcgatttcaacaacaagatgcatctcctgctggagtacgccggccgaccggatcaagaggtggcggacccctggtatacgggagactttgattccacctggcaggatgtgctggaggggtgtgagggacttttagacaatttaatgtaaaaaggttgaaccaaagtcgatgaactgattgtctgcgaagcaaaagtcggtatccaatggaaaatggaacgggacaactatgccagcctgagatattgcaaatgtaaagggtcatcaaaaaactgaacaccgttatattgctggcattaaggtttctcctacgccaaaacgttcgtacagcaaaaaaaagtatcgtcaatcaaaaggaaaggtatgtcctaataaaaatatttagattggagtttttcctggagcccgccggagtccatagattccggcgggtatttttttgcagttcccacactctgggaactgctggagagcatactcataatgtccctgatcaccggagttgagtcctgggctcggcaattatgcttgtactggagagggctggatagcagtaagaagccatgcatggctggaatgggaagacaaaaattatgcatactatggcagaaaaatagggtgacaggacgaaatattccattgtggcagcgccggtttggtgctattttgataacagcacacataaaacgggggtgatacgcagatgtggattttggaggaaggacagattttgccctatctgcgcagccattaccctgtgtttgaccaatcgggaccggttgatatccagtgcataggcgcactggaaggagaggagaagcctcgggaaccggatgaaggcgggctgatcaactatatatttcgggtttccaacgggaagcagtctgtcatcgtgaagcaggggcgttccgccagccggaagaacgacaaaatagttctgcccatatggcggaatcgtcaggaatatgagacgctccggcttcgccatgccattgtaccccagtacacgccggagacctattatgtggactgggagaacgcaatttttctgatggaggatgtgtctgatctcgctcaggttcggaagctgctctgctcgggagtcatgctacccagactggcggagcaggtgggggaatttgttgcggcgagcaccttttactgctcggagttttatctggaagcagacctgtttcgaagactttctgcacgcttccgcaacagcgatatgcggtccatcatggaagactgggtgttcctgcgggatgcaccctacctcacccataatggaaacccggtgctcaaacagcttattgaccgggatgagagcatcagggtttgctgctacgagctgcgccacaaatttatgacccggggagaggctctgatacatggggatctgcatacgtccaacgtgtttgcagacgaggagcggctcaaggttattgacatggagtatacctttgccggaccgctctgctatgatatcggatactttgcggccagcctgctgacccagtactgcacagcgtgtttccggccgttcccatcggaaggggcgcgccgtacctttctctcctatctcctctccagcctgctggagctctactactcctttgtggagcactttacggagttttggagagaggatgcaaagccgatttatcagagatcgggcgggttttgtgagcacctagcccgtgggtttctgccggatgtgcttgggtttgcggcggtgccctgtttcccccagattacaacatctctgaccccggagttcgctcagttggacgggaaggccagaggacaggcgcatgagctctgcctggtgctcagccggtaccttctgcttgagcgggagcggtgggatacgatggaggatgcggttcaggccatcggagcggttacgcaaatttacctggattgcctggaataaacgcagcaaattaagacacatggcgggcttgccatgtgtttttttctcaaaaaagtaattatttggataaagtggtgttgctcaaatggacttttttgttataatagagaaaaaacatggctggtgcgcaagtgggtacccacttgcgctaccggatatccggtagagtaaaaccctttgtctgcgccgggagatggggcggaacggaaaattgagaaggaggatagaggggcatggaggacgcaagaaaattgtccgattttattgatctggacctgctgcagaacatccaggataattgctcaaaagcgatgggccttgcatttatcacggtggattacaaaggcatacccattaccaaatacagcggcttcacatctcactgcatgctggggagacaggcaaagggatttgcagagatgtgtgagcaatgcgacgcgcacggcggacttcacgccgcgatcaccggacagccgtacatttaccgctgccacgccgatctggtggatttcgcggttcctctcattgtcaatggaagctatatgggggcggtgctgggcgggcaggtgcggctacaggaggagagcgagcgggagctggagcacatcctcccacagcgtcccaattggaaacgggataaggaatgggaggaggcttaccagaagctggaggtcgtcacctatgaaaaagtggaggcatctgtaaagctgctgcgcgacatcatcgtgacatttgtggaaaggcggactggaaagggggcggatggagtcctgagagagaaggaaaagcagctctcggaggagcgggcggcccgtctggacctggaaaagcaggtacagaagcaggagagcaatacggcccgccgcaggacagagctccactacttcttttttgtcatgaacattatctcaaagttagcctatgaggagaaggcggccaaaacagaggcggtttcatacgattttgcagacatgatgcgttatgcagcgggggcagagcaaaaaatttccaccttgggggaagaactgaactatatcggggcgcttcttcggatacggaaggcttgggttcgggacaagttagcctatactatttctgtcccggagcagtatcatcaggtatcctgtccctttatggtattgcagcccattgtggagtgcgctctggagggggccgaaacggaggctgcggagcccagaaagctggatttctatgcggaggaggagaacggcaggctgctgtttcagattctcagcaatgacaccagccgctcggtggaggagctgacggaggagttatccggggcggcggaagagggatactttcatacaggcggtgtggaccgcctgttgaagcagacgctgggagggggataccgcctgatggtcaaccggcggagagacgggcgggccggtgcagcggtcagcttttacctgccgctggagcggaacggatagccggctcaagagtgctgtaaacgggaaggagctgccgcatgaagcagattctggttttgattgaaaacgagttggagcagagcattacaggggatattctgcgctccgggctgggggctgaggcggaaatcaccctcacagccggggcggagcaggccatccagcagcttcagagcggagcggtggatctcttcattgcggatgttgaacggtttgacgtggcccactgcaatatggtcaccacggcgcgaaagacggccccggacactccgatcctggttacatcggtggggacgcaggaggaaatcgcagggtatgtctggcgcctcggcgtccgggattatctgctcaagccgtaccggcccacgtggttgttggctgcggtgcgcgccttggtgcgtaaggagcgcagcggcggatgcgccgccgaccagcaggagatttacctgaggcgcctgacggagcacctgcagagattccagtataaaaagtgcaccgatgccgcaagagaataccttgatttgctctatcaaagtactgataataagggtgttatccgcacgagtgcggtccgctttgcggagggagtggcgaaagccggaatcccgttcagcaggaccacccagtggaagctgtcgggaagtctggagcactttcgggtccgctttgaccagcaggagcggaaatatgcaacctatgagtttattgtccggatgctggacacgatctttgacgccatagagaagagcgggctgtacgaggtagacagcgagcagaagattctgaattacattgaccggaatatccggcggggggtcagcctggatgaggcggcggagtacgcgaatatgagctcgtgctatttcagcaagctctttaagcggatgaccgggaaaaactatattacttatgtgacggacagccgaattgaaatggcgaagcgcatgctggtggacacggaaatgccggtcatcaatatcgcctatgagctgtcctataacgagacaaattatttcagcaaggcgttcaagaaaaaggtgggagtgacacccagcgaataccggacagcccattccgagctgttcagggagcagggggcgggctgataccggccgcgcagacgccttgcagcgccggaaagggtggagaaacatggaggaattcagcttcagcaccagaatcttttttggtgagggcgcgctggaacgcctgcgccgggtgcaggacaaaaaagttatgattgtgaccgaccgttttatggcgggcatcggtgtgccggataaggtggcggggcacctgacccggtgccaggtatctgtatttgacggcgtggtgccggacccccccatcgaggtggtggcggccggcgtccaggcccttcaggactgcggcgcggaggtcatgatcgccgtgggcggcggctccaccattgacgcggccaaggccatccgggcggtggcgaaggagactctgcacatcgacacagaccggtgggagtgctttgccgtgcccaccaccagcggtaccggctcggaggtcacggactacgccgtgatcaccgaccgggcaaagggaatcaagtatccgctggacagccaggcgctccgcccgccggtcgccattctggacccggagcttacagtttccgccccggcctcggtaacggccgacgcaggtatggatgtgttgacccacgcgctggaggcatacgtctccaagggagccaacgatttctccgacgcgctgtgtgagaaagcggtttctctggtgtttcgcttcctgccgctggcctttcaggacggcacaaacctgctggcccgggaaaagatgcacaacgcctcctgtatggcgggcctggcgttcaactcggcggggctggggctgaaccacggcatggcccacgccatcggcgccaagctccacatcgcccatggccgtatcaatgccatgctgctgccgcatatcattacgttcaacgccgacttgggacggattcggaacggcgagtacgccctcgcagcaaaaaagtatcagcgcatggcaaaggttttggacctgccggcccccagtgtgcggctgggcgtgaccaaccttctgcgggaggtggagcgcctgaaccgcaccctgaagatcccggcctccctgaaggagtggggagcggagccctccaaggtgaaggagctgcgcggggagattgtttccgctgccctggcggatgccaccaccgccaccaatcccagaccggctgcggcggagcatgtggaggctcttttgaataaggttatggggggataatcccggagcgagaagcggcaccactctatttacaaaaaagcacccgaaggggtgcttttttgcgttgtttataggaaaagcaaacaaacaggctttgaacaggtggaggacttccgacaaaaaagtatatatggcagccaagaaaacaggggagtgtttccggtataatttcgccagaaagcgtgcgaatgctgtttcaggcgcgccgcggaccacaataaggaggtagtaatatgcaacaggaagccctcggaatggtagagacgaagggcctggttggcgccattgaggccgccgatgccatggtcaagtccgccaatgtcagtctggttggctacgagaagatcggttccggcttggttaccgtgatggtgcgcggcgacgtgggcgccgtcaaggcggccgtggacgccggggcctgctccgccgagaaggtgggcgaggtcgtggcccagcacgtcatccccagaccccacaccgacgttgagaagatccttccccatatggcgtaaccgacataacggaaacttaaattagagttcggagggaacatagatgaaagacgaactgatcagcaaggtcatggacgaggtcatgaagaagatgggcgcgtccgacgcgacttccgcccccgccgccgcgtgctgcagcaatgccagcgcgaactgcaacctgacggagtttgtgggcaccgccatcggccacaccatcggcctggtgatcgccaacgtggaccatcagatccacgagaagatggacatcgaccccaagtaccgctccatcggcatcatcggtgaccgtaccggcgccggtccccagatttttgccgctgacgaggcggtgaaggccaccaactgcgagatcgtgaagatcgagctgccccgtgataccgagggcggcgccggccacggctccctgatcatcttcggcgccgaggacgtgtccgatgcccgccgcgccgttgaggtctgcctgcgcgaggtggagcgcaccatgggcgacgtatacggcagccccgccggccacctggagttccagtacaccgcccgcgccagccacgccctgaacaaggccttcggcgctcccatcggcaaggccttcggcatcaccgtcggcgctcccgccgccatcggcgtgctgctggccgataccgccgtgaaggccgccaccgtggacgtggtgggctatagctcccctgccaacggcggcaccagcttctccaacgaggtcatcctgaccttcaccggcgactccggcgccgtcaagcaggccatcatcgccgcccgcgatgtgggcatgcaggtgctgaagaccctggagcccagcgtggagctcaagtccaccaccaccccctatattctgtaattgccgggaaggagtcagacagctatgaagtcaaaacgttttgaagttctggccgcccgtccggtcaatcaggacggctacgtacaggagtggcctgaggtgggcctgatcgccatgaacagccccttcgaccccaagcccagcatcaagattgagaacggcgtcatcaccgagatggacggcaagtgccgcgccgatttcgatatgctcgataccttcatcgccgaccacgccatccgcctgggcaacgcggagaaggccatggccatggattccctggagatcgcccgcaagatcgtggacatcaacgtctcccgtgaggagatcctggacatcaccctgtccctgacccccgccaagctgaccgaggtcgtaggcaagctgaacatcgtggagatcatgatgggcatgaccaagatgcgcgcccgcatgatgcccgccaaccagtgccacgtcaccaacgtgcgcgacaacccggtccagatcgcggcggatgccgccgaggccggcgtccgcggcttcgccgagatggagaccaccgtggccgtcgcccgttacgctcccttcaacgccatggccctgttcgtgggcgcccaggtgggccgccccggcgtcatgacccagtgcgccctggaggaggccaccgagctgcagctcggcatgcgcggcttcaccacctacgcggagaccatctccgtctacggcaccgagcccgtcttcatggacggcgacgacaccccctactccaaggcgttcctggccagctgctacgccagccgcggcctgaagatgcgctttacctccggcaccggctccgaggtccagatgggctatgccgagggcaagagcatgctgtacctggaggcccgctgcctggctgtcaccaagggcgccggcgtgcagggcacgcagaacggctccgtgtcctgcatcggcgtgcccgccggcgtacccggcggcatccgcgccgtggccgctgagaacctgatcgccatgctgctggatctggagtccaccacctccaacgaccagaccttcacccactccgacctgcgccgcgtggcccgcacggtgcctcagctcttctccggcaccgattacatctgctccggctactccgccaccccgaactacgacaacatgttcgccggctccaactgggacgccgaggactacgacgactggaccatcatccagcgcgacatgaagatcgacggcggcctgcagcccgtccgcgaggaggacgtgctcaaggcccgcaacaaggctgcccgcgccctgcagggcatgttccgtgagctgggcctgcccgagatcaccgacgccgaggtggaggccgctacctatgccaacggctccaacgacatgcccgagcgcaacgtcaacgaggatctgaaggccatcgaggacatgatggcccgcaaggtgaccggcgttgacttcgtgaaggcgctggaccgcgccggcttccccgatgtggctcacaacatctacaacatgcttcgccagaaggtggccggcgactacctgcacaccgcctccatcttcgacgagcagttccacgtgctctccgccgtcaatgtgcccaacgagtatcacgggcccatgaccggctaccagatcagcgaggagcgctggaaccagctgaagaacattcccaacgccatccgtccggaagatatctaagaggggtgaagcagtcatgacgtttgatgaaaacacgctgcgcagtgtaattgaagaggtcctgaaggagatgggcgaggtgagcggcaccgccgccgcccccgctgcggcgcctgtcgccgcggccgcgggcaagctgaccatcaccgagaatggcgaggcccggaagggcaccgccgccgacgaggtggtcatcggcctggcgcccgccttcggcaccaagcaggttaagaccattatcgacctgccccacgacaaggtgctccgcgagatcatcgccggcatcgaggaggagggcctgaagtggcgcatcatcaaggtgtaccacacctccgacgtttccttcatcgcccatgtggccgccgagtactccggctccggcatcggtatcggcatccagtccaagggcaccacagttatccaccagaaggacctgcccaacctgtccaatctggagctgttctcccaggcgcctctgatcgacctggacacctaccgcaagatcggcaagaacgccgccaagtacgccaagggcgagtcccccacgccggttcccaccaggaacgaccagatggcccgccccacctatcaggcgctgtccgccctgctccacatcaaggagactgagctggtggacaacaacaagaagccgcaggccgttacggtctcgttccagtaaaggaggcagcacgttttatggatcaggaacttttgatgaagcagatcgtggagcaggttatggccgccatgaagaacggcacgcccgcttccgcgcccgccgccgcttccagctgcggctccaaggtcaccgcggccaactatcctctggccgagagcatggccgaccagatcaagacccccaccggcaaggacttcacctctctgagctatgagaaggtcatcaacggcgagctctccgccgacgacatgcgcatcgcgcccgagaccctggagatgcaggcccaggtggccgagtccgtccaccgcgaggcctttgccggcaacctgcgccgcgcagccgagctcatcgccgtgcccgacgaccgcctgctggagatctacaatgccctgcgtccctaccgctccaccaagcaggagctgctggacatcgccggcgagctggacggcaagtacggcgccaagaccgccgcttccctggtgcgggaggctgccgaggtttatgagaagcgcggccgcctgaagaagttctaatcatactccagagtcaggaggccccagaatgaaactggtcgcaggcattgacatcggaaacgcgacaacagagacagcattggcccgcatcgaggacggtcacgcggtctttctggccagcggaaccgtccccaccacgggcatcaaggggacccgccagaacatcaacggcatctttcactccctgaccaacgctttggagaaggccgggctggagctcaaggagctgtcggaggtgcgcctgaacgaagccgcccccgtcatcggcgatgtggccatggagaccattaccgagaccatcatcaccgagtccaccatgatcggccacaaccccgccacacccggcggaatgggcgtgggcgtgggagagacggtcctcatcacggagctggaacaggctccggtcgggcgggactatattgcagtggtgcccgggacggtggactttgaggtggcggcccggctgatcaaccgggccaccgccggggaccgcaaggtcaccgcagccattgtccagcgggatgacggcgtgctgattcacaaccgcctgacctgcaagatcccgatcgtggacgaggtggcgctgattgacaaggtgcccatcggcatgcgctccgccgtggaggtggccgccgtgggcggcgtggtggaggtgctctccaacccctacggcatcgccaccctgtttggcctgtcctctgacgagacccggcaggtggtgcccatcgcccgggccctgattggaaaccgctcggcggtggtgatcaagaccccggccggagacgtgaaggagcgaaaaattccggccggcacgattgagctactgggggaaaaccgcagcgtcaaagtggatgtggacgacggggccgacaagatcatgaaggccgtggagtccattcccagcctggaggatgtgcggggagagccgggaaccaacgccggcggcatgctggagaaggtgcgccaggtcatggcgaatctgactagccagcaccccagggacatcaagattcaggatctgctggcggtcgacacattcacaccccagaaggttcagggcggcctggccaacgagttttcccaggagaacgccgtgggcatcgccgccatggtcaaggcggaccgcctccagatggaggccatcgcccgggaatttgcccagcagatcggcgtcccggtcgaggtgggcggcgtggaggccgacatggccatccgcggcgccctcaccaccccgggcaccaacaagcccctggccattctggacatgggcgccggttcgacggacgcctccatcatcaacgccgagggacagatccactccatccacctggccggagcgggcaacatggtcacactcctgatccagtcggagatgggactgcccgactttgacacggcggaggatgtgaaaaagtaccccttggccaaggtggagagcttgttccacatccgccatgaaaacggcaccgtggagttcttccagcagccgctggatcccaacctgtttgccaaggtggtcattctcaaggagggcaagctgctccccctggagggtgactggagcatggagaagatccggctcatccggcagcaggccaagcagaaggtgttcatcaccaacgcgatccgggccctgacccgggtcagccccaccggcaatgtccgggatattcagttcgtggtgctggtgggcggctccgcgctggacttcgaggttccgcagatggtgaccgatgcactttcccagtacaaggttgtcgcgggccgcggaaatatccgcggcaccgaaggcccccgcaacgcggtggccaccgggctggtgctctccctgacggaagggaggggctgatatgcccgtaatccaagaaaggatcaagcccaccgtccatgtccgctgtgcagaggacaccccgcaggaggtactgcggcagctccagtacggcatggaggaggagggcattccctgggaggccgcagccgggacgggcgacgccctgtccctggcctgggaggccgcccggagctcccggctggaggtgggaatcggcctggaccgacaggcgctggttctccactactccaagctggagcgcgagcagcccctgttccgtattcccgccaattccggtatggagacggtgcgggcgctgggggccaatgcggcgcggctagtgaaaaagctgccgctgaaggccctggacaggaggtgagagcatgcagcaaaaaagcctgggactcatagagacccaaggcctggcggccggcatcgaggccgccgatgcggcggtgaagtcggccaatgtggagctggtgggctatgagctgaccaaaggcggaggctggactaccatcaagatcctgggcgatgtgggcgcggtgaaggcggcggtagacgccgcgcggattgccgccggcaaggtgagccgggtggtaagcacccgggtaatcgcgcggccgtccatggggctgaccggcctgatccacaacaccgacacggtgggagatcagccgccggagccgcctgcgccgcccgctccaacggatccgccggagccgccgaagtctccggcagacgtgcagcccgcagaggagggtgcttcggggacgacggagtctccggaggaggtacagcccgttgaagtggagccttcggggacgacggagtctccggaggaggtacagcccgttgaagtggagccttcggggacggcggagtctctggaggaggtacagcccgttgaggtggagccttcggggacgacggagtctccggaggaggcgcagcccgcagaggagggcgcttcggaggcgatggagtctccgaaggaagccccctctgaaaaggcgaaggagacgccctccaaacggcgggggaagaagtccgcaaaacgctgaaccgcgcagaaaagcgggacggcagcactgatttttctgatattttctaggaggttatcacaatgggtgaagctctgggtatgatcgagacaaagggtctggtcggcgcgatcgaggcggccgatgccatgaccaagtccgccaacgttacgctgatgggctatgagaagatcggctccggcctggtcaccgtcatggtgcgcggcgatgtgggcgcggtcaaggccgcggtggacgccggcgcctgcgccgccgagaaggtgggcgagatcgtggcgcagcacgtcatcccccgtccccacaccgacgtggagaagattctgccgaagggcctgtaaaaagaggcttgaggcatggacaagaacaacgtggtttcagcagagattgtccgccagatcacccgcatggtggtggaggagctccagaagcagcagcggctggagcgctccacccccattggggtctccaaccgccatgtccatctggaccgggcggacatggacgccctgtttggtccgggcagcgagctgacggtcaaaaaaatgctcggccagccggggcagtatgctgcggaggagaccgtcaccatccgcgggcccaaaggggagctcagccgcgtgcgcgtgctggggcccctgcgcgctcagacgcaggtagagatctccatcgccgacggcttcacgctgggggtcaagcccccggtgcgcgagtccggtcagttgaaggataccccgggcattgagatcatcgggccctgtgggagtgtaaagaaggacagcggcgtgatcgcggcgctgcggcatgtgcacatgactccgaaggacgcggcgcgcttcggcgtggaggacggccagtatatccaaacggagatcgacggcctgcggggcgcgatcctctgcaatgtgctggtgcgcgtctctgacaagtacgcgctggaaatgcacattgatgtggaagaggccaatgctctgggcgtcaaaaacggcgaccgggcctttttccttgacgattgagccgggaaggaggcagggcagaggtgggccaggagctgacgcaggccaatgagacccttctggaatttgagcggctgattcaaaccggaggctgcaatgcctgggagggtacgctgcgtaccggagtggatctgggcaccgccaacatcgtgctggcggtggtggatgagcagaaccggccggtggccggggcctcttatccctccacagtggtccgggacggtatcgtggtggactacatgggggcggttcgggcggtcacacatctgaaaggacagttggaggagcgcctgggcgtcatgctggacgccggagcctgtgccatcccgcccggcatccttgagggcaatgtgaaggccatcggaaacgtcgtggaggcggcgggcttccgcctgaccaacatcgtggatgaacccacggcggcctcctccgtgctgggtatttccgacggcgcggtggtggacgtgggcggcggcaccacaggcatcagcgtcctgaaggacggaaaggtgatcttcacgggcgacgagcccacaggaggcacccacatgacactggtgctggctggcttccacggctggaatacccaggaggccgaattggccaagcgggatccggcgcaggaggccaatgtgtttcctgtgatcaagccggttgtggagaaaatggcgtccattgtccggaactacctacgggagtacccggtggaggcggtctatgtggtgggcggcgcgtgctgtttcacccaatttgaatcggtatttgagaaatttttgggtgtccccgtggtcaagccggcggctccgctgctggtgacgcccctggggattgccgtaaactgcaagctgtaaagtaggtgaggaccgttgacgacggagcaactgcgcggaatggcggacgaggcgtttgtcgagattctggcccagcgcgttgtggagaagctcctggcgcggcagaagcaggcgctggtagtctacaccggttccaacattggtgaggccgccgcgctggaggccatgggccgcctgcgcggagagggcttcacgttccgggtgctcctctcccggggggcgtccggcctgctggacgtggaacggctccgctccgttctggagccggagaagctgtgggtggagactccggaggagactccggaggcgctgaccgcccggtacgacaccattttggttccggccatgacggtacataccgccgcccacgtggccgcctgcatggcggacacaccggcgtccgccgttattctggacggcctgatgcggggaaagaacgtggtggtgaacatcgacggctgctgcccggatcacgccgagcgcctgaagcgcggcttccatatggcggagccgctgaagcaggcgcttcggaacaatctggagaccttgcgctccttcggcgcgcgcctgaccacctccggcggcctctatgacaaggcgctgcgggcggttggcggggcacaggcccggacggcggcaccggctgcgaggccggaggccgcgccccggaagcaggagggggctgcccgcatccggctggagggccgggttttgagcggacgccacgtccagggctgcccgcctcacagcaccctgtgggtgccgcgggagaccctgattacccaactggccgccgatgaggcgcgccgccgggacatctgcatccgaaaagagacgtaaagcaggtggcaaaatgtatttgggaagagtgatcgggacggtggtttccaccagcaagaacgagcatctggtggggatgaagctcctggttgtggaaaagctgacggagcgcctggagcgggaaggcaccagcgaggtggccgtggactccgtgggagcgggcaccggcgagattgtcattgtctgcaagggcagctccgcgcgctatgtgttcggcaagggtgacgccccggtggatacctccatcgtgggcattgtggatacggtagaggtgggctgatggcgaatctttacaccaaaaccggagacaagggccagactagcctggtaggcggctcccgggtgagcaagtccagcctgcgggtggagtgctacggcaccattgacgaggccaactccatgctggggctggcgtatgcccagaccgaccgggaatatatccgcaccacggttcaccgcatccagggccggctgttcgccctgggggcggaactggccagcgacgagcagggtgcggccgggctgacgggaaagatctcggaggaggacgtggcctttctggagggcgtggtggacaagtgcaccgagaccaccgggaaacagactcacttcgtcattccgggcgtggaccccgcctcggcggcgctccatgtggcccgtaccattgtccgccgggcggagcgccatgtggtggccctggcggagcacgagccggtacgcgaggtgctggcccgctacatcaaccgcctgtccgacgcggtatacgcgctggccaggcttcaagaggatctgacgcaggaggagcgcctgagggcgcaggtgactgcgctggtccggaaacagctgtccgccccggagggcggcctgcccccctttagcctggcatcgctccagaggatggcccagcgggccgtggagcgggccggacagctcggggttccggtggtgttctccgcggtggacagcggcggcaatctggtcctgctccagagaatggagggcgcgctgctgggcagcgtggacgtctcggccggaaaggcctataccgccaacgccttccagatgccgacccatgagctgggccaggcggcccggccggacggcccgctctacggcattgacgcttccgctcccgggaaaatcgtgctgttcggcggcggcttcccctacgtggtaaacggggaagtcgtgggcggcatcggcgtatccggcggtacggtggaacaggatatggacatcgcatggtacgcgatgtctctctaaggaggaacagcaaatgaacattgatgagaatgtggtcgaatccattgtgaagcgggttgtatcccaactgagcacggagaccgcttccgcccagacctgcccgtccggcggggactggggtgtatttgagagcatgaacgacgcggtggacgcggccgtggaggcccagcgggagtatctgaaccgctccatgcacgaccgggcctgctatgtccaggccatccgcgacgtggtgctggaccaggagaacctggagtacatctcccgcctggccgtggaggagaccggcatgggcggctatgagtacaagctcatcaagaaccgtctggccgcggtcaagacgcccggcatcgaggatctgaccaccgacgccatgagcggcgacgacggcctgaccctggtggagtactcgcccttcggggtgatcggctccatcacccctaccaccaaccccacggagaccatcatctgcaactccatcggcatgctggcggcggggaacgcggtggtgttcagcccccacccccgggccaagaaggtgtccctgcacctgattcagctcatcaacaaggccctctgcaaggcaggcgcgcccgccaacctggtggtcaccgtgtccgccccctcgattgagaacaccaacgccatgatgagccaccccaagatccgcatgctggtggccaccggcggccccgccatcgtcaaaacggtgctctccagcggcaagaaggccatcggcgccggcgccggcaatccccccgtcgtggtggacgagaccgccgacatcgagaaggccgccaaggatatcgtggacggctgctcctttgacaacaacctgccctgcatcgccgagaaggaagtcatcgccgtggactccgtggccgactacctgatcttcaacatgaagaagaacggtgcttacgaggtcaaggaccccgccgtgatcagccagctggtggagctggtgaccaaggagggcaagagccccaagaccgagtttgtgggcaagagcgccaagtacatcctggacaagatcggcattaccgtgggcgatgacgtgaaagtgatcctcatggaggccaaggaggaccaccccttcgtgcaggtggagctcatgatgcccatcctgcctctggtgcgggttcccgacgtggaccaggccattgagatggccgtccgggtggagcacggcaaccgccacaccgccatgatgcactcccgcaatgtggagaagctgaccaagatggccaagctcatccagaccacgatttttgtgaaaaacggcccctcttacgccggcatcggcgtaggcggcgagggctataccacgtttaccatcgccggtcccaccggagagggcctgacttcggccaaatcctttgcccggcgccgcagatgcgtgctcgtcggagggatggacgtcagataaacggaggtttgggccattatgcaagagaatctgctcggcctggtggaacaggccggtgtggtgggcgccggcggcgccggatttcccacccatgtgaagctcaaggcccaggcggacaccgtcatcatcaacggagcggagtgtgaaccgctgctccgggtggatcagcagttgatggccctccaggccggcgacctgctggacgccctcgatctgctcgtggagcaggtcggggcgtcccagggcgtggtggcgctcaaggagcactaccacgcggcggtggaggcgctggagcgggagctatccaggcatcccaagctgaggattcaccggatgggcgcattttatcccgccggtgacgaacaggtgatcgtctacgaggtgaccggacgcgtggtcccggaggggggcatccccctgaatgtgggcgtggtggtcagcaatgtggagacggccctcaatgtgctggcggccgtccgccatcaggccccggtgattgagaagtatgtcacgctgaccggtgcggtgcgcacccccaagaccatgaaggtgcccctgggaatcacagtggcggaggcgctggccctggcgggcggccccaccgtggagcactatgaggtcatcaacggcgggcccatgatggggcgtgtggtgagcaccggaagcgctattaccaagaccacaaagggactcatcgtggtcccggagggccattccctcctccagagcctgaaccggcccgtgccgcggatgctccaggatgcccgcgtggcctgtatgcagtgctccctgtgctccgaggtctgcccgcggggcctgctggggcaccgcatccagccgcacaagatgatgcgcctggccgcctatggcgccctctgtgacccggagtatacccccatgaacgccttcctgtgctgcggctgccgcctgtgcgagtacgcctgcgtgatggggcttcagccctggaaactgaacgggatgctcaagggcgagatgggaaagaagggtgtccgcaatgcgctgcacaaccagccggaggcggccgcgccgttccggcagtacaagcgatacccggttcacaagctgattcaccagttggggctggacggctatgatgtccccgccccgatggaggacagctcctgcgactatcaaatggtgaccctgccgctgagccagggggtgggcgcacccgcccagcctgtggtgcgcgcaggggacagagtggagaagggagccctgattgcggcggccccagagggaaagctgggggcaaaccttcacgcgagcatcgcgggcacggtgaccgcagtgaccgagagagagattaccatccaacaataaagattggagaggaactgatttatggatatcttggctctgatcgccgcatttggcggcggcattatcggcgcttacatgggcgcccttcccgcctttattatgactggtatctacgccctggtgggcggagtcctgacggctgccggcgtgggcggcgatgttgcagtcaactacctcgcctttggttcctttgtcggcccccacatcgcctttgccggcggcgtggccgccgccggctatgcgggccgcaagggcaagctggcctccggcaccgacatcctgtcctccctcaacggcctgggtgagcccgacgtgctcctggtgggcggcatcttcggcgtgctgggcttcctgatccactactgcatcggactgctgcccgtcatcggcagcgccggccctgccaccaccgacctgcccggcatcaccgtcttcattctggcggttgtcacccgtctggccttcggcaagaccggcctgaccggcaagtacaccggctccggaaagcgcgagtggttcgccaccgggaagggcttcgtctataacgtggtactgggcggcggcatcggcattgtggtgagcttcatcgccgcattcctgtacgagaatgagtttaccgccgcgttcagcatcttcccgatcgtgtgcttcggctttgcggccatcacgctgatcttcacccagaccggcttcgccacgcccgcgactcaccacattttcctgccctccgggctggctgccgtggccggcatcaccgcctggggccctgcgggcgctctgctgggcgtgctcttcggcatcctgggctccctgctgggcgacctggtgggcaagagcttgaacagccactgcgacacccacatcgacccccctgctaccacgatctttatcctgacgattgtgatcaacgctgtcagcagcgtgatcaatgcctgagccaacagaggaatccataggaaaagaggccagttatgggaaagtccatcggattactggaattgaaaagcatccccgtcggcattgaaaccgccgatgcggtgctgaaggccgccaatgtggagttgctgaccgcgacccccacctgtccgggtaaatatgtcattatcatctgcggcgcggtaggcgctgtgaagagcgccatggagagcggccgccagacagcgggcatctatctggtcgggcaccacaccatcaacaacgtgcacgcttccgtcccggaggcgatcgtgggcacgtcggaggtaggacacatcgcctccatcggcgtgatcgagaccatgacggctttgactgccgttgaggcgggggactatgccgccaaggcggcgaacgtccgcctgatggagatccgcattgcccgcggcctgggcggcaagggctttgttattctcaccggcgaggtttccgcggttcgctctgcggttaaggccgcgatgaatcaactggaggagaccggggatattacaagcagcagcgtgatcgcatcgccccatccgggattgattgacaagctgacgaactaagggaaacaggaacagacgcggaaaggagggccatcagtatggcttcacaggattgtcccaactgccactatccagcacccaaccgcaaaaagcctggggagggggagcgcgtgccccggggtatgtaccacgcccccgacaggagcggtgagccggaagagtgcccccagtgcttttaccagccggaggcagtggaggaaaggccggaggaggagtgtccccagtgcttctaccagcccgaggacgggcagaagcgggaggaggccaaggaggacgactgctctcagtgcttctataagccggataaataagaattggtaagaaaggattgtgagctctgtggaacgactcattggaaagcaggcgccctatttttccatggaggcgctgtcggcggacggagaacattttgtgcgcgttgcgctgccggactatgccgggaaatggctggtgctgttcttctaccccatggacttcacctttgtctgtcccacagagctcacagccttctcagagcaccgggaggccttccgtgcggccggagcggagctgctcagcgtgagcacggacagcgtctacacccatcaggcctggcagcgcaacggcctgggcgggctgggttaccccatggcggcggatcaaactctgcgggtctgcgccgattacggggtgctgctggaggaggagggggtggccctgcgtgggctgttcctgattgacccggagcaaaaagtgcgctacagcgtaatccacgacaacaacatcggccgcaatccggaggaggtgctccgggtattggccgcgctgaaaaccggcggcctgtgcgcagccggctggaaggccggggaggaaaacctccgcccggacatatcggaacgcgaggctccggcgctgtcgggtacggcacccgtgcgcatctatacgatgcccggttgcagctactgccgcagcgtaaaggagtttttgagacagggcgggatctcctatgaggagatcaacctcgcggaggataaggccgggcaggcctttatggagagccgcggctacacgggcctgccggtcacggtgatcggcgcggaggagattgtaggctataatatgcccagaatcaaggcggcgctgggcctaagcggagcaaatgaggtgaaataggatggatttaatggactttggaaccgtgcaggaggggaagatgcggcttgtccaggagatggtgcctggcaagcaggtcactctggcccatattattgcaagcccggatgagattatctatcagaagctgggcctcaatcccaatgtggactaccagcaggccgccatcggaattttgagcatgacgccctctgaaatttccgtaatcgcgggcgatattgcgaccaagacctccaaggtggagatggggtttattgaccgcttcagcggaaccctcatttttaccggacgcatttcaaacgtacaggccgcagtgtccagtatcctgacctatctgaagaatcacctggggtttaccatctgtgaaattacgaggacatgaagaaaattattttaatgggccggagcgaatgcggaaagaccaccctcacgcaggcgctgaagggcgatgtgatccactatcacaagacacagtacataaaccattatgatgtggtgattgacacgccgggggagtatgcagaaaacgccagcctggcgaaggcgctggcgctctatacctatgaggccgacgtggtggggctgctgctgagctccaccgagccgtactcgctctacccaccctgtgtgacggcctgctgcaaccgcccggtgatcggcattgtgacccagattgaccatccggacggtgatccggaccgggcgcagggctggctggagctggcgggatgccacccgatttttcgggtcagctcctataccggggaggggatctggcagatcctcaactatctccgggagccgggagacatcctgccctgggattcggaacaggcggcggagcgtccccgggtggttctctcgaacaaatatgggaggctgcccgaagagggcggcggacacccgcaaacagtttaggaaaaaacaggagtgctcctgccgcgggagagactgcggtgggagctttgctgttatgatacgttaggcgatacaatttgcagaaggagggctgtccatggaagcgctgacctttttttccgcgatgaaccggggacagttccgggaggaacaggggattgagggcagctcttactgtatcttttttgccccgatggaggagctggtcacccaggaccgtatgaccggaagagaggaccgggtcgtgctggagctgctctacggcgatgaaatgctgcccggggccctgcgggtgaggcaggtggggagcaatgcggtcgttgaggagtccacacagggggcgtttcgcgccttcctggaggagaagccggtcaagtacatcggacaactgctgatgtacgcgctccagttcaaaatacaggatctctccctgcgcattgagggctgcacaggcgagatgaagcagttggaggacgccctggacaactgcatcgacaacagcggcacctatcgtctgctggatttccgcaggcgctacaccgagtgcgggaatatggtgctggcggtgaaggagatcctgtcgcggatcgacaagggctactatccgatgcagatgcagaacagctatgtgttgcagggcgaggtgctgatggagttccgcttcctggaggagcggtatgagctcatcaagagcacggttctcaaggactttgatacctatacctccatcatcaataacaatatcaaccggaatgcccggctgctgagcatcatctcgctggtgggggtggttctcaacttcatgttcggaagtctgctggccgccaatccacttctgggaatcatcggcggcctgtcggttgcgggcctgtctgtgggggccacggcggtctaccatgtcagccgccgcggcaatgcgccgcttccctccgggcgcggtccgattcaggcgtttccctccctgccgaaattccacaggaaagagaagcgggagcgggatcagtgggaaaaatgaatatggagcggtgacagagggggtgtgccaaacccgtgccgccaaagaccggaatgggccggagaggacgaatgtcctctccggcccattttggtttcactaggaagcagatgttccgggttgccgccgtttttccggcggcctcagtccatcacctcgccgccgggcgcatcatgggcgtcggaccagactcgctcaagagcggcccaatcgcgctccgtcagcctgccggtccacgcctccgtgtcttccccttctgtccagatatagtcatgggagttggtggcttcctgcatggctgcgtagtaccaggcggaggtattgttgtccggccaggtgagcatctctccgcggggcagcaggtgtgcttcatgaggggcccggcccagggtgcggttgacgatggtgcacgcctcggcccgggtgatgttgtccagcgggtggaaggtgccgtcgggcatgccctcaattagtccgtactccaccgctgcggccaggaaggtcacataccactcggttccctccacatcggagaatcggccgtcgtatgtgaagtccccttcggtaaactcgaaaaagctcactgcaattttggtaaactcagaccgtgtgatgggttcggtagggcggaaggtgccgtccggatagccgtccagaatacccatgctggtcaaggtggatatggcgttgttgtaccagtcgccggaagccacgtcggagtatggattggtctgactccaataggcctccctggcctcgtcggtgagcaggcggaaaaagatagtggccacctcgctgcgggcgatatcgccctccggccgcacagtgccgtccgtatagccgatgatgtaggccacgtggtcctcggtattcagagactcaggctcgtcgtcgcggtccgggcggtgggaggggcggccggggtcgggacggctggtctgaatggtgtaggacacggttggcctgcggaagttctccggctggccgggccggctgttgctgtccaccgggtacagggtcgcgctgttgttggtgtaaaggccgtcgtagttcttgctgccgtccgcatcgtactggccatatgtgccatcggtctcctgcggattggtcagcttgacggtgtaggtcagttgaaccggggcgaagttggagatgggaacattgattttccagacaaagcactcgttggagacaccgtcccgccccttggcgtagtagtagagctcaaaatcataggcgccgctttccccagctccaaacccataggcgctggtgatatagggatcgctgaacgagggatcaatcaattcggtcttgtcgagaacctctccgcccacggtcagggccagccggtctatgtcgttgacaaaatcaaagtcgtacccgttgcttttgttgtcggtgccggagccaatttcatccaccacatagctgcctttatcaagcaggtagtagatgtcgttctggatgtcggtaaaatcaacggtttcgccgccggccaggtagtccatgaaactgatgccaaagccataactgtcgacaccgctctcagctttcagcgcataacaatggtactctttgctcatttcctgatagagcgcattactattgtagagagacagatcaacgttgattggatagccgttcctatttacataagggatggagccttcagaatccaaatcacttgtttttggacgattcggatcgttcaaagaatattcatatttggtgtattcactatccaatacgccttttactgcatcaaagtagctggcccaattttccgggacataatcagaggaatatttacattcccacgcggacaatccgtcatttggctgttcgttccttccgcccgttccggtatcaccgccgtttctggaggaaattgtgtatgcctgatcgtagtttccgcctttacaataataatacgttaaaccatcactgacaaggattaaatatttccgagagctatcaacacttgtatctgcatccagcattgccttgccagccagcagtccggcgtgcatattggttccactctttagtgtctgctggatcgcggcttcaatgtccgcatattcggtagccagatcaaaaaattcaccattattggcgacattggcaaccgcattaaaaataactacaccgacattgatcttcgcgccagtgttctcaagctgatcctttagggaacgaagcatctccagagacttggcctcaaccgctgcactcgtagatttgtccaatacaaagaccacatctgtaacgagctgttcctctgccgcgggcagggacagggtcacgtcggacccaaaattgctgtccagattggttgcggtcttggatttggaggtgtcccatccggtttcttcgccgggctccagagggctcaggccatgggctgcttttagcgccgtaagtccggttgcagaggcaaacccggtcagcggctcaaaatccgtgaactccaccgcgtgatagggctcctcatgcgcctcccagcgggcgccctcgctgtcgtcgtaccagccgtctatggcgtcgatgcagtctccctcccctccgtcaagggtccagccggagcccacttttccgaaggagagagagggcccgctgacaccttcggaaacatagatatcatcgcctgcaacaagtgcatgattgttgcagattatggcatcggcgggcagaattacagtcgggtcatagttattgccatagccgacataaattccgccgccgtagccatccagcaggctgtgcgaaaccttgttgccggtgatcttgaggacagccccgtcctctaccgtcagattgccttgccgcacatacagtccggtgttgttgttatcctcaatataaagctcgctggtactgtccactgtgaatggatagtcgttgtagagccgtacagcggcataaccatagctggaattcccggcgtttccggtcacagtaacaatggaaccgttctcgacggtaaaggcgttgtttacggtaatccccataccgttgttattttttgtgttgacggtggagttatcgatactcagttcaccggcagaaaggccatgggaaccgttgttgttgaaattgacttcggaatcctcgataataaagtgagagccattggagccatttccaaggctgttgacaacatccaccttagaattggtaatcgtggcatagaatgtacccgtgaagccggagcggttgtggtcggagatgaaggtagaattagtgatattgacgttatacccgccatcaccgccgtcccactccagagcatcgttcgggtagtttttaatcgtcaggacagagccgtttgtcagattcagcttattgttgctacagaagtaaatcgcatggggggaaccggtgctaccggttgcatccatggtcatattgacgttgtccagcgcgagaacggcatctttgctggcgcagatcgtcatccaggtccattctccatacggtgtggaaccaaccccgttcatgacaacgtcgatgcccttaaaggtcagtgtcttgccccacagggcaatgccgtccttttcaaaggttacggtcggcttttccgccagatccggggccgacgtaatggtaagactcttggttaaattccatcccttggtcgtggcatcggccagaagttcgatggttgcaccgtcctccgctgcttccaccgcttcgtccagcgtggggtactcgttttcctcaattttcgccacattgtcatccgagaggagagtggttgattgattcgagggcgcgtcctcggccgccagggcactcacgggtagcatgctgaggcacagggccagcacacagaacaaacccgtgaatcgcttcaagattcttcgcatacttatcctccttttttcaaatatgctgggactctattgttcaaaaagacctgctgcaatcacctcgctttgtatggcaaaataaatcttttgtcctaggttcacctgtgtgttccggcaggatgcggcataaagggcgataaaaaagccccgtgccgaggcacggggctaaaaatgggcgcagaagatgggccggtgaagcataattgcttgccccggtctgcttttccatgtccaaaacaggctgcacttcttgaaagagagcaaaagatgtggtaaaatgaataccgttctatgtactgaacatttgcttttcaagccgtatataggacaaaagatttattttgccgctatgatatcagccccagacgggcaagctggcgggcgtgctccgcgccggtggagagcaggtagatccgggtggtctcgatggaggagtggcccagtacatcggccagcttgaccacatcccggctggcctggtagaaggctctggcaaacaggtggcgcaggttatggggaaacaccttgctgtctgccactccggccttccggcacaccgctttcatctccgcccacacctgctttctggatatgcctctgccgcttctggtgagaaagatctcgccggaggcgattttttgtgcccgcccgtattgcagcagcttgcggcacagcttaccggggatcaggattgtgcggattttccccttcagcgacacctccgcccggccgcggcgggcggcctccatggtcaggtatttcacctcactcacccggattccggtggcgcagatggcctccatgagcaggcccagacgctcacggcccagtccccgggcggcggagagcaggcggccgtactcggcccggctcagttcccggtcgggggagcggaaaagccgccgctggagccgcagtggtttgaccgtgcagtccatccagcccaggaaacgaaaaaaacggttcagcccggccagcttgctgttaactgtggcaggggagaggccccggcgcagcagctcggccttccagccgcccgccgaaccggcggccacggtctccggtgccagccaggcggcaaactgacgcaccgaccgcgtgtactgtttgatggtctctgtgcagcgctcctctgcccggagcgcctgggcgaatgcagccagcgtttccacggtaatgcttcgcagttccatatggttctgccccccattgaatcaaatattttttattttacccaactacgcgggatgatatgaagcggcggaggcgggttcgggagaagggggggccgctgccgcgggaattgtgtgccggaacattttatggtatagttgtaaaatagaaaaaacaggtgtgccggcggagcgctcccgaggagagcaggctggcgcgtgatttccggcgaggtgatgcctgtgatagggaaatggctcaactacatgtccagactgcacgatggtgtggatgcgattctgatcgcagaccggcatgggaccatcgaatactccgccatgttctccgagcaggaaaacgggctggccgacgagggctttatcgggaagaatatcctcgaagcctatccgcaactgaccgaggagacctccagccacttccgggtcatgcggacgggggcgccggtgctcaatgaaaagcaggaattgacggacttttatggccggcggaccatcttggtcagctccacctttccgctggagtacagcggcgagctgattgggacgatggagacctcggttttctaccacaaggacgctcagttggatgggaaaaaccactggctggccaatccgcacaaggggctgttccggctggacgacatcattacccaaaacccggagatgctgacgctcaaggataccgttcagcgggtggcggccaacacctctcccgtgctcatttggggagagaccggcacggggaaggaactctttgcccagtcactccatagccacagctccagggccagggggccgtttgtggcgcaaaactgcgcggccatcccaaccaccttgctggagagcaccctgttcggcactacgcgtgggagctataccggggcggaaaaccggaagggactgctgaaacaggctgatggaggcactctgttcttggacgaagtgaactccatggatctgtccctccaggccaagattctcaaggcgattgaggagaagcggttccgccctgtgggcggggaacaggatgtgcacagcgatgtgcgtattgtctccgccatgaatgtggatcctatcaccgcagtacgggaggggctgctgcggcgtgacctgttctaccggctgggtgtggtgcagttggcgctgccacccctgcggaagcggccggaggacattccgctgctcaccgatttctatgtggagcagtacaaccggaacatggggcgggcgatctccggcgtgagcgagctggtgcgcaatgccctgctggcctatgactggccgggcaatgtacgggagctgcgcaatgcggtggagtcggcgttcaacctctgtaccggggccacggtacagctcaatgatattccccgctatatcttttaccacgaggaggaggcgggggagaggcaggagccgtggcctatgccggaacatatggggcttcaggaggcggtccgccgctacgagaaggggttgattgtccgtgcgctggagcagagccggacggttacggaggccgcggagaagctgaggctgacccggcaggcacttcaatacaagatgatgaagtaccatctcaacggataggactgtagaaagcaagaatttttgcattttgcgcaaaaattcttgctttctttttgccgggcctgtcccgcgaggcggccgcgttccgcgcaacccctggcagtgcaggcagttctaactatgtttgcctctcttgacaagctggcatccggcttgcttattctaggggcagtggttatgcgtggaccacatatctgaagttaggagagggttaaagatgacaccaaagaaaaaaggtatccgtatcccccacatgttcacgctgctcctgctcatcatcgcggtatgtaccattctgacctatgtgattcccgcgggccagtacgaaacctacgtggatgagaacggcgtggagatgctggtggacggcagctaccaccgcatcgagcagaccccggtgaccccgatgaaggctttgatggccgtacaggagggcctgatcgaaaccgcttatatttccgcctttatcttcatcattggcggcgccttcggagttgtggcggagaccaaggccgttgaggcgggcatcggacgcatcatcaagaaaacctccaaacggcaggagctgctgatccccatcatgatctttgtggtgggcttcggcgccggctcctttggcatgtttgaggagtgcctggtcttcatccccttcctggtacccatctgcatcgctatgggctacgactccatcaccggcctggcggtggccatcgtgggcagctccagcggctacgcaggctcctttgtccaggccgccaacgtgggggtttcccagagcatcgcgggtctgcccatgtactcggccatgtggtaccgcctcatcatcctggtggtcatgctgaccatcgcggcggtgtatatctatttgtatgcccagcgcatcaagcgggacccgacccgcagcctgatgtacgagttcgaccgccagcgggaggagaaggtggatctgaacgatcttccggagctgacgggcacccggaagctggtcctgctggtcatgggcgccaccttcgccctgctgatcgtgggcgtgctcaagtggggctggtatatcaacgagctttctgccctgttcctgggcatgggcatcgtcgtgggctttgtggcccgggtgggcttcgacggctttggccgcctgttcagccgcggcgtggccgacttcgcggccggcgcgctggcggtgggctttgcccgcggcatcctcatcgtgctggagggcggcaacattctccacaccatcctgtacggcgcctccggcctgctgacctcgctgccctcctctctgacagtgctgggtatgtacgtattccaaaacttccttaacctcctgattccctcggccagcgggcaggcggccacctctctgcccatcctgctccccatgggcgacatggccgacattacccgacagaccacctgcatcatcttccagatcggcaatggcctgtccaacatcctggtgcccacctcgggcaccttcatggtggccctgaccatggcaaaggttccctacggcaagtgggccaagtggtttattcccctgctgggcctccagttcgcggcgggcgcggtgctggtgctgatcgccaacgccatccgcctcgggccaatgtgagcagaaagaaagaaggtatttcgatgaaagagacaatacaaacagcggcggagagcttcctccccgcgctctgggccatgtcccgtgcgatgtacgaccaccctgagctggggctggaggaggtcaactcctcccgcatgctgcgggagtggctggcggagcagggcttcaaggtggaggagaacttccacggcctgcccaccgccttccgggcagtctacggctccggcaggccggtgctgggctttctgtgcgagtacgatgcgctgcccgaggtgggccacggctgcggccacgacctcattggcgtcgtctcggcgggagctgcggctgtcctgcggcagacggtggacgccgtcggcggcaccctgattgtctacggtacgcccgacgaggagatcacctgtaccaaagtacagctcaccgacgaaggggcctttgacgagctggatgtggccctcatgctacacccctatcaaaagacctgcggccggatggggagcatcggcatctatccggtgcagtacgagtttttcggaaagaagtgccatgccaacgaggccgggccgggcagcgactgcatcaacgccctggacgccgccgttgccgcctacctcagcgttaaccaggtcaagcagtacctggacgccaacatctacggtatcctcaacagcggcggcaccctgcccaacatcatccccgactatgccagcctgcgctactacatccgctgtgaccaggagtggaagacccgtcgggcggtggagcgcatcaaccgctgtgtccagggggcggcggacagcatgggggcggagctgaagatcacccagtacctgtgtcccacccagccgctgctgctcaacgagccgctgctggatgcctatgaggcgaacatggcggcgctgggtgagccggtcgtggtggaggaggccaaccgcctatctaccgacgcgggcaacgtgagcttccggatacccaccctccacgcgatgctcggcattcacggatgtgggggtgtcgatctgcatacagaggagttcgccgcccgaaccgtgaccgaggagggccgggaggccacccggctgggggtctgtgccctggcgggcgtgggatacgacctgctcacccggcctgagctgctggaggctgtccgggccgacttccagcggggcatccgggaacaggacgagaaaggagtttcatcatcatgctattgaaaaatcctatcacggaggacaagactatctgggctggcctgaaccacccggagctccccctggaggaggccgacatagctgtgttcggtatcccctacgacggcggggtcagcttccgctccggcacttgtgaggcgccccaggagctgcggaaaatcacccacaccatctcgcccaccaccgaggatttccgggatatctcccctgtgaaggtcaaggatctgggtgactgcgtggggaaggaccgggacgagatgttcgccgaggcggaggagctggcctatcaggccgtgaaggcgggaaagttctttaccatgatcggcggcgaccactcggtgacgatccccgtccaccggggcgtcaaccgggcggtggaggaggacttcggtatcatccacatcgacgcccacttcgatctctgccacgagatgcacggggacattctgtcccacggctccaccgagcggcgggccaccgagctgtcccacgtgggggacagtgaccacctctacttcctcggcatccgctccatcgagtccgacgagctggagttctaccagaacaacaagatcaacgtcctctccgccgctgatgtggaccacctgggggtgccggcggcactggagcggatggtgtcccacatgaagcggttctccaaagtctatatcactctggatattgactgcctggaccccgcctatgccgccggtaccggcacgccccaattcggcggcctcaccgcccggcagcttctggacctgctgaagggcctttttgacggcctcaacatcatcggcatggacgtggtggaggtggcccccagactggacccctctctggcggcgctgttcgcggcccggaaaattattaccgagtgctgggcccaccactacttcaaaaacctcgcccgtgcgtaagcagagagaagaagaccaatcgcataaaacacggcctccggttcaggcggaggccgtgttttatgtgctcagaaaaacttttcagaccgttcatccgtctaatgtttaacagccactgcggcggtatacgtttggatgaggtgagcttaatgaagcgaataggtgcgctgttgctctgcggtattctgctgctcccggccgccggagcttccggcaccccttggccggcctgggcagccgaggcgctggcatggggacgggaaaagtcggtcagccgggcatttctggcctcgccgggacagcgtttgacccgcggagcggtggcccggctgctctatgagtcggcagggcagcccgctgcgcatgaggagtgccctttctctgatgtgtctgaaaaggatgccgcagccgtgggctgggcagcagggcagggctatctcactggcgtgggagatggaacctatgagccaggccgccctgtcacccggcaggaatttgccgctatcctctggagacaggcgggaacacccgaggtaccggtccaaggactcgagcgttttggggatgccggcactgtgtcggaatgggcgagggatgctgtgctctggtgccagcaggccggggtaatggcaggccggagcggggataaactggccccagaggataccatcaccacagcggaggcgctggtcatgctggagcgggccgccgggctgcccgatgtcgggcagctccgggacgatctggagatccttgccgcacaccaccggccggtgggctcccagggggaggccgatgcagtccggtatctgagggaccgctttgaggaaatggggtacagcgtcactctccagccctataccgacggccagggccgcaccgggcacaatgtcgccgcggtaaaggcggcctctgttcccgatgcggatatcttggtgctgtccgcccatcacgacagtgtgcccactgcctatggggcaaatgataatgcctcgggtgtggctgccctgctctatacggcggaggcgctgaggaatgtaccgactgatacggaggtgcgcttcctcagcttcaccgatgaagagaacggtaagaatggatcccggacctacaccgcctctctgacagaggaggagcggactcggatagtcggtgcgatccagttcgatatgctgggcgggctcggttccacagggactctggtgtgtactgtagacggggaggcgaactgggtcagcgacctgcttcagaaaaagaatccggggttggagagcggagtggagaccgccagcgaccatacctcgtttcagctctccggaatacctgctgtcctgctgatgcagagggggcggggctacctgtaccactcggcggcggatacggcggaacagttggatctgtatgccattgcggctgccgctgacagcgcagcagccgcggcggaggagatctgctcggccgataccccctcctaccgggctctggcccgggagcagggagagagaagcgcctaccgccagaccagacagaatatgatctatttcggcagttccagagcggatactgaggcgtacatcggagcggcgggagagcccgtaggcgccagtgagatatccggggaggggtggaccgacacctatgagacctaccactactccatgcgctggtttgacagcaaagttcctatgagtacctattaccagtaccgcaacggttttctagagcgcattgagctgcggccggaggaaaccggctatacagaggaacaggtacgggaactcattgaggcgatgtatggctcccccgtatcagaggaggggggacagaccgactggtccgaccccatttacagcaaatatatcacgctgtcccgtgacgaggaggggtgtctcgtcacggtgggaaattactccgtgggcatcaccaatgtgctggcctcctatctggtgagcggcggtcaagccgtcatcagcgatccggaggatgcggcggtatggaactatctgtgttcgatcctcccgctggaggccagacagaagctggccgagttcaacctgtttacggacggtaccagtaatgtcctggcctatacctctcccattcgggaggagggcgttacggacaacacccgcttttccatcagcattgactacttcgatgtgtatgatgaaaacggggagaagcgggactggagcaaactgacctacacgattttgcacgagtatggccacgtcctgctggaggacgagacacaggtagacctgaccgtgggcagggacactcatgacccggcgggatttgtggagggggccttccgcagagcgttttacgatgcgttttggagggagcttggagtcagcggcgcgggtgattacgacagatcgcctactcactatgtgagccgttacggggccaactacttccatgaggatatcgccgacacctttgccgtctttgtgttgggtggggagcctggaaaaaacactgtggcagaggagaagctgcgctttttctggagggacccagatatgacggcgctgcggtccgctgtccgggaaaacctggggttggagtggccgaagcgagctgacaccagcagctccagccccacgccgccggtggccgctgctctggaggaattggaacagaagctgatggaagcgattgtagcggtggagcagccgcccgccttagcatgtgcggcaccggtcggttcggcggagctgtccatggctgttaaaaacctgtactacagcatcttatccgaccatccggagtacaagtatgcctatgatctcacttcagaggtaggggaggacggactgctccgctgtaaagtgtcctatatgccctaccgtaccggcgcgtatcccgctggatttcagggaatagaggtggatggcctggatcgtctggtggaggtggcgcggggtggactgtcacaggagagtattcccatccggattaccgagcccactctgacagtggatgccatgaaccgggcgcttcagcaggtgggcggcggttggctgttgtgccagctcagccgtgacggcaccgctatcacggtcacgccccagggtggcctgagtcgagaggaggccctgaaccggctggctcagtcagagtgcctggcaaggcaggtttatgaggaaatcgtcacggcggagatggggaaggctgcacaggctgaggcgctgtatgcttacttgacggaacaggtacgttacgacttccgctactacagccagcccggtgagatgccctacagcgctaccaccgcatacggggcgctccatgaccatctagccatctgcggcggctatgcccaggcgttccagatgcttttacaacaggcggagattccctgtattaccgtcagtgggaagatgggtggagagaaccacatgtgggttctggcccaggtggacggccagtggctctattttgatcccaccagcgaccggggcagggttgattacggttttcagtacttcggagtgggagaggatgctctgttccgctatacctgggaccgggagggggcgcgcagcttaacggaggcgctgtttccctaatcgggaaaattggaaaacggcagtgacgcatacccctgtatacgtcactgccgttttcggctgcccggcgaatcatcgtcatggcctcggcgcaggtgataggcatcgcattgagcaggcgaaagaagcgtgtggcggtttcggcttggatgatgttgtccagagcgcgtactgcgccgccccatcagccgggctgagggcttgtctcccgaagggatcagcgcatgcctgctgtgcaatatgcagatatgtggaatcaccattttgacttccccactgggacagtgctctccgccggactctatattgatcacatccggggcaaaacgcagccaaatttctgattttgggtatgcaaattaagaccgagacgtttgctctatcccggcccctgtccttttgcatcccggcagtcctcccaatccgggagacgaaataggcggttgaggacagcccgcatctgccgagagagtcaagctgccatggctcaaagcgccgtgcccctcttggggacggacaggcgggagagctccacgccctcgtgctccagcagccggagcttggcggcgatgccgccggcatacccggtgaggctgccgccggagcccacgacccggtggcagggaatgatgatggagatggggttgtggcccaccgcgccgcccactgcctggctggacatggagggccttcccatctgcgccgccagcgcccgggcaagagctccgtaggtcgtggtttctccgtagggtatttggcacagcagactccatacccgctgccggaactccccgccgatggggcacaggggcagttcggagggcatcggcttttctccagcaaaataccgggccagccagtcccgcgccgcgtcaaagacgggaagcccgtcccgctcctccagcgcctcccgcacggctccgccgaaatacttctgtccctccagccaaaggccgatcaggtgctccccatcgctgcccagcgtgagcatccccagcggggatgggcaggccgcagaatagtacatccaattcctcctttttgatcaatcagatggatttcacagcggcaccgcaggccgcctgtcaatgagatcatagcacaaaacgcaccgattttctcctatgaacgttccaagccaacaaaagggggttgacaggagcggggaatatgtgtatcattacactaacgctttaattcgttagcgagatagaaggtgattcaatgtcgcagtttctaaacggggcgctccggcggctcaccccctatacgccgggggaacagccccggaatcaggcatacatcaagctgaacaccaatgaatctccctatcccccgtcgccgggggtactggcggcgctgaaccgggcggagggggagaacctgcgcctctactccgacccggaagcggtggagctgagggaggcgctggcggcccggtacagggtggagcgtgagagtgtgtttgtcgccaacggctccgacgaggccctcagcttcgcctttctggcctatgccgccgacggccggggggtggcctttcccgacatcagctacgggttttacgccgtgttcgcccgcctgtacggcataccagtccggcaggtgcccctgcgggcggacttccgcctggtgccggaggactacaatcacctgcatcgaaccattgtgctcgccaaccccaacgcccccaccggcctggccctgagtcgggacgaggtagaggggatcgtccgggccaacccggatgcggtggtggtggtggacgaggcctatgtggacttcggcggggagagcgcggtgcccctcaccgcccgctatcccaacctgctggtggtgcagaccttttccaagtcccgctccatggcgggagcccggctgggctacgccatcggggatgcggccctgattcaggatctggaggccatccgcttctccaccaatccctacaacgtcaaccgcctgaccctgcgggcaggggccgcggccctggcggagcaggactactacgacgccaactgcgcggccatcgtggacacccgcgccgataccaagcggcggctggaggcgcttggcttcacctgcaccgactccagggcgaacttcctctttgcccgccatccggcagcggacggcggggacctctaccggaggctcaaggagcgcggggtgctggtgcgccgcttcgacgccccccgcatcggggactatatccgcatcaccatcggtaccagggcccagatggacgccctgctggaacggctggagggactgctatgagaaccgcccgcattgcgcgcaagaccaatgagaccgacatcaccctcaccatttgtctggacggccggggggtgagcgccattcagagcggcgtgggctttcttgaccacatgctcaccctgctggcccgccacgggcggctggatttggagctcacctgccggggagacactcaggtggacgaccaccacagcgtggaggatatcggcatcgctctgggggacgccgtggcccaggccctgggggaaaagcggggggtgcgccggtacgcctccctccacctgcccatggacgaggcgctgattctgtgcgcggtggatctgtccggccgggggggctattacgatgccctggacatcccggcccagaagatcgggcgcttcgacaccgagctggtgtacgagttcatgaacgccttcgccgtccacgccggcctcaccctccacctgcggagggtgtgcggccgcaactcccaccacatcgtggagggggccttcaaggccctgggccgggccctgcgggaggcggcggccattgatccagagggccgggacgaaattccatccacaaaggggatgctttgaccatgcaggagcggctgaaccggctctatgagcagtacggctaccgaaaattcaaaatgtcccggtttgaggattacgacctctacgcccagaaccgggattttctgcggcaagaccgcattatcacctttaccgacgccgacggcgccctcaaggccctcaagccggacatcaccctgtccatcatgaagagcaacggaggagacagcgaaaaggtgtactacaacgagaacgtctgccgggaggtggggggcgccttccgggagatcctccaggtgggggtggagtcggtggggcagattgacccctatgccgaggcagaggtcatcgccttggccgcccgctccctggagcagctctccccgaagtacgtgctggctctgtccgacgtgagcttcgtgggcagcctgctggaccagatggggctgtccgcccccgtgcgggggaaggtgctgggcctcgttgcccgaaagaacgtcccaggcttgtgcgtcctggcggagcggggggagctgaccggggagcaggctgacggcctgcgggagctggtggagctgtacgcccctctcaaggaggggattggccgggtggggcggctggccaagagcaacgccgcctgggaggccctgcggcagctctccctcaccgccggactgctggagtcgtttgggctggaggagcgggtgcggctggatttctccctggtgaacagcatggactactacaatggggtgatcttccagggctttctgcccggcctccacaccccggtgctctccggcgggcggtacgacaacctgccccgtaagatgggcaagcaggtgggggccatcggctttgccctgtccatgggcttgctggaggaaagggcggacggcggacggtttgacgccgacgtgctgctcacctatgggcccgacgcggagctggccgggctggcagcctttgccgaggccctgcgggcctccggccgctccgtccgctgtgagcgggcggggggctccgcccagctccgctgtcggactgagctgcgctaccgcagcggcatgacaccggaggaggtgggactatgatcaatgtggcgctgcccaaggggcggctgggggagagggcctacgaggcctttgcctccgccgggtacgactgccccgcgattttggagaaaaaccgcaggctgacctttgaaaacagggagaagggagtgcggtatttctgggtgaagccctccgacgtgagcatctatgtggagcggggggcggccgacgtgggggtggccggccgggatatcctgctggagtacgagcccgacgtgtacgagctgctggatctgggcatcggccggtgccgtatgtgcgtggccgggccagaaaacttctacgacgcgcccggccgaaccctccgggtggccaccaaattcccccacatcacggcagagcactacacggccaagtcccgcgacatcgacatcatcaagctcaacggctccatcgagctggctcccatcctgggcctgtccgacgtgattgtggacattgtggagacgggcaagaccctgctggaaaaccacctggcgcctttggagaccattgtggacatcagcgcgtggctgatcagcagtcgggtgagctatcaattcaagcatcaggagatcgccgcgatgcaggcggccctggcgcggaagctgtgaggcggtcatgatcaaaatatatgatatcgaaacgctggaggagcgggagatcctgttccgcggcggaagcggggcggacgtgtccgccccggtggcggagatcctccgggccgtgcaggagcggggggacgcggccctgcgggagtataccctccgctttgacggcgcagcgccggacgccctggtggtgacggcggaggaggtggaccaggcggcggcgcaggtggagccggccttcctggccgtgctggaggaggccgcggagcacatccgggcctaccacgcccggcagaagcgggagagcttcgtgatgaccgagcgggagggcgtggtgctgggccagcggatcatccccttggcgcgggtgggtatctatgtgcccggcggcaccgccgcctacccttccaccgtgctgatgaatgccattcccgcccggatcgccggagtgggggagatcattatggtgacgccgcccgggcgggatggggcggtgaacccccacatcctggccgcagccaaaatcgccggcgtgacccggatctacaaggtgggcggcgcccaggcggtggccgccctggcctacggcaccgggaccatccctcaggtggataagatcgtgggccccggaaacgcctacgtggcggaggccaagcgccaggtcttcggccgggtaaacatcgacatgatcgccgggccctccgaggtgctggtactggccgacggccgctccaatcccgcctgggtggcggcggatctgctgagccaggcggagcacgaccggatggccgccgccgtgctggtcactgactcccgccccctggccgaggcggtggctcatgagctggagcggcagttggccgccctgccccgggcagagatcgcccgggcctccctggaggccaacggcaagctcatcgtctgccgggatctccgggagggcatcgcggtggccaaccgcatcgccccggagcacctggagctgtgtgtggacaaccccttcgactacctgggggagattcagaacgccggctccgtcttcctgggccgttataacccggagcccatgggggactactttgccgggcccaaccacactctgcctaccatgggcaccgcccggttctacagtcccctgtcggtggatgacttcgtaaagaagtcccagttcagctactacacccgggacgccctggccagggactaccggaaggtgagcctgttcgcccgcaaggagggcctggacgcccacgccagggcggtggatatccggtttgaggggggagaggcatgatcgccatcatcgactacggggtgggtaacctgttctccctcaagagctccctggcggccatcggccgggaggccgtggtcaccggggaccgagcggtcctccgggcggccagccacgtgatcctccccggcgtgggggctttcggcgacgcggcggcccggctgcgggccgccggcatggcggaggcggtactggaggccgctgccgcaggcaagcccgtcctgggcatctgcctggggatgcagctcctcctggagcgctcctttgagtacggggagcaccccggcctgggcctcattccgggggaggtgcgccccatccgggacgtgattccggtggggctggccgtgccccacatgggctggaacgccctccgcttcccggcggagcggccccgcagccccattttcgcggctctggaggagggggagcacgtctatttcgtccactcctacgcgggctttgcctgcggagaggggctcaccgcctggaccgagtacggcgcgcctctgacggcggcggtgcagagaggaaacgtgtacggaacccagttccacccggagaagagcggggatgtgggactgcggattctcaaggcattctgcggattggagggtgaagcatgattctgcttccggctattgatctctatgagggaaaggtggtccgcctgaccaggggggactacagccggatgacggtctaccgggaggaccctctggaccaggcgagggagtttgaggccgccggggcggcctggctccacaccgtggatctggagggggccagggacggcgccacccccaatttccgggtggtagcggagctctgccggtccaccggcctacaggtggaggtgggcggcggcatccgcacgctggaggccgtggcccgctacctggacgcgggggcggcgcgggtgatcctgggcactgccgccgtcaccgaccccgtttttctccggaccgcactggaccgcttcggagatcgggtggcggtgggggtggatctgaaggacggggccatcgctatccagggctggcgggagaccgctccagagccggcggaggccttcttccagcgcctggtggactggggggtgcggaccgtcatctgcaccgatgtctcccgggacggtatgctgggggggaccaacgtggcgctgtaccagtccctggcggagcggcttcccctgcagctcatcgcctctggcggcgtgtcctccctggaggagttgaggcggctgaaggcgctgggcctgtacggcgcgattctgggcaaggccctttacaccggggccctgtcgctgcgcgacgccctgggggaggtggagtgacatggtgaccaagcgtatcatcccctgcctggatgtacgggacggacgggtggtaaagggagtcaattttcaggggctccgggacgtgtccgacccggtggctctggcggagcactactcccgctccggtgccgacgagctggtgttctacgacatcactgcgtcccatgaggggcggaagctctttaccgatattctgaccaaggtggcctccgccattttcatccccctcaccgtggggggcggcatccgggggctggacgacttcgagcgggtgctggcctgcggggcggacaaggtttcggtcaactccggggctgtccggaactccgctctcatcggggaggcggccaggcggtacggcgaccagtgcgtggtgctgtcggtggacgtgaagcgggtggacgggagctaccacgtatttctgaacggcggccgggtggacaccggactggacgccctggagtgggtgcgccggggagtggacgccggggccggcgaggtggtggtcaactccatggacaccgacggggtgaagggcggcttcgatgtggagctgctgagggccgtaagccgggcggtgtccgttccggtggtggcctccggcggcgcagggagcgccgccgacttcgcggccctgttccgcgccctgccggagctgtccgccgggctggcggccagcattttccacttcggcgaggtgaccatacctgcgctgaagcgggtactggcggaggaaggggtgtgcgtgcggctgtgattgatgtgcagacgctgaaatttgacgagaaggggctcatacccgccattgtgcaggatgcggagacggggagggtgctcaccctggcctacatgaaccggcagtccctggccatttccctggaaaagggcctgacctgcttctggtcccgttcccggcaggagctgtggctcaagggggaaaccagcggcaattaccagcacattgtggagctgcgggctgactgtgaccgggacgccctcctgatccgggtgcggaaggaggggccggcctgccacctgggcaccgactcctgcttcgacggagcggtcttctttgtaagggaggagagatgacatggacgagcagttcagttatgaggggctctaccgcctgctggaggagcgccgggccaagcggccggagggctcctataccacctacctgtttgaaaagggcctggacaagattttgaaaaaggtgggcgaggagtgcaccgaggttatcatcgcggccaaggaccgggatcacaaggagacggtctatgagctggcggatctggcgtaccatgttctggtgctgatggtggaggcgggtatctccctggacgaggtgagggccgagctggccggccgccacgtcatcgaccacaaggtgaagcaggagaagatggcctccgaccaggtggagtgaggagaatttgcacacagagcgaaggagcccctggagccgcaaagcggctccaggggctccggttcatttgtaccggcccaactgccagaaggccacggcgctggccgccgccacgttaagggaattcacgccgcgggccatggggatgcaaaccgtatagtcgcagtgggccaccgttcggggggaaaggccgtccccctcggtgcccaggacgatggccagcttttctgcggacaccagccgggagtcctcaatggagagggctccggggctcagggccatggcggcggtctgaaagcccagggcccgcaggcgggcaagtcccggctggggccagtcggcggagcgcgtcccgatataggtccacgggatctggaacacagtgcccatgctgacccgcaccgcccggcgatggagggggtcgcagcaggtgggagtgaccagcaccccgtccatgtggagggctgccgccgagcggaagatggcccccacgttggtggggtccacgatgccctccagcacggccacccgcctggcgccggcgcacagttcctccacggcgggcagagaggggcggcgcatggcgcacagtaccccgcgggtcagctcgtagcccgtcaaggcggccagggtgtcccggccagcagtgtagaggggcacgtccccgcagcgggcgagaatgtcccgggcggggccctccagttggcggcgctccatcagcagggaaacgggctcatatccggcgtccaaggcgtggccgatgactttggggctctccgcgatgaacagggccctctccggcgcgcggcggctgcggagctgggcctcggtcaggcgggcgaatacgtccagttcgggggcggagaggtcggtgatctcgatgatgtggggcatggtgtccacctcgcttattcttgcttgccttcattataccgccgtccgggcggaagggcaacggaaaacagccgcgccgcctcccggcatgggaggcggcgcgtgggttacaggagcatcccggcaaagcactggcaggccagaaacaggatgccggcggtgaccaggggggccagccgtccggatgggccggaggcgaggcgctcccgcagggaggtaaacaggaaggttagagcgccgaaggccgcgccgcccaccacagcaaagcgcacggcctctgtctcggcggtgagcccggcggcccaggggagcaggccgaaggtgagggcgcccagcaggagagtaagcccccagttccggcggggaacgcccttggagagataggcctctgcggccagggccagcagggagcaggccgccgccgcgggcaggcccacggcagggagcacggcggcggacaggaagacgcggtagagaaccgccgccaggcagcccaagcccaccacggcggccagggcggtattcagggtatatttctcttgcatggcttaacctccccactcggttgcgctggagctgacgtccgcgccggtgacaaaggcggaggcggagttgaccgccttgaccaccgccttggaggtgacggtggcgccggtgagggcgtccacgttgtcccctacggccagctcgccccggctccagatgagctgggagagaaagcctgcgtcggacagggcttccgccccaaggccgaaggtctcctccatctcccgcaccaccgcacccaccacggcgccgtcaaagtccacggccaccagcatggtgatatctccggcgtagccggcggtgacggtctcgacaatatagccggtggaaccccggtggacagcggcgatggcggtgtcctcaccgttgtaggcctcctcggtgaagggagcgccgccggggagaagggtgtcgaagagcctggcctgttcggctgcggcgttctccgccgccgtgggggccagtcccgccgaaagggccaacaggagcacaaagacggcggccaacacggccacgggcttgatcagggctttcacattcatccggcctttcctcctctcacagcgccgaagcgcaccggcggcagggccttgtccagcgcccaggcgcaggcgttcatcagcagaatggcgtaggtgaccccctccggatagagcccgaagtagcggaacagcacggtcagcgcgccgcaccccacgccgtaaaccaattgggccgcgggcagggcgggggaggtggcgtagtcggtggccatgaacagggcgcccagcatcacaccgccgcccagcaggctgtagagcatccaggcaacggggtcctcccccttataaaataccagggtgaggaaggctacagtacctaggtaggcggcggggatacgccaggagatgaccttccgcccaagcaggatggcaccgccgatcagcagggccagggcggaaacctctccgatgcagccgccaatgttccccaggagcatgtcggccggggaggccgcgggcagggcgggcatcaccatgtcgtggagaggggtggcggcgctcaccacatcggcggtggagccgaagaggggcagctccgccccggcgggggcgtagcgtaccagccaggcgggccacagtagcatcaggaaggcccgggcggccagcgcggggttgaagatgttctggcccaggccgccggacaggcccttgaccactacaatggcgaatacgccgcccaccgccgccagccagtagggggcagtggcggggagggtgagggccagcagcagcccggtgacggcggcggagccgtccgcaatcgagccgggggacttggtgacggcccggaaggcccactcggaggccacgcaggaggccacgctcaccaaggttagcagcagggcccggagaccgaagaaccataccccggccgccagggtgggcagcagggcgaggagcaccgtgcccatcagacggcgggtggtctccccgctgcggatgtggggggaggaggatgtgatcagcttcacggacgaattccctcctttaaggcttgtttcgccgcccggaaccgctccgtcagggggagctggccgggacaggtgtaggagcagcagccgcactcgatgcagtcggtgacgtggagggcctggagggcgtccagattcccggcggcctcgtagcgatagaggtacaggggctgcaggtgcatggggcaaacctccacacacttggagcagcggatacacaccggacgctccggtgtgggattggcgctggtgaggcagagcaccgcgttggtacccttgagcaccggggcggccagttcaccctgggccgtacccatcatgggaccaccggagagcaccttacaggcgtcctccgtgaggccgcctgcggcctcgatgacctgggcaaagggggtgccgatgcggacaatcaggtttttgggctcctttacgccctcgccggtgacggtgacgatgcgcttggttaccggcttgccctcgtacaccgcccggtagacggcggccacggtgcctgcgttaaacacggcacagcccacagagaagggcagatggcccggcggcacctgccggccggtaacggcctggataagctgtttctccgccccctgggggtagcgggtgggtaggacggccagctccactcccggccagtcgggcaggtgcctgcgcaggatggcgatggcctccgacttgttgtcctccacggcgatcacccgccggtcgggatggagagcggcatccagcgcagccagtccccggaaaatctgctccggatagctgcacagcagggcgtcgtcggcggtgatgtagggctcgcactcacaggcgtttaccaggatagtgtccacccgcccctgggcggtgacagccttgatgtcggtggggaaggtggcgccgcccatgccgacgatgcccgcctcccggatgatggagagaatatcgttgggggagagcccctcgtgggtggcgtgaggctccagtgcttgggcgggggtgtcctggtagtcgttgtcgatgaccaccgacagtacggcccggccggaggggtgggggcggggctctacggcggccacggtgcccgacaccgaggcgtggatggtggcgctcaggccttcggcatcgccgatcttctggcccagcttcactggctctcccgccttgaccagaggggtacagggcttgccgatgtgctgaaccattgggatgacgacctggcttggaaggggggcgggggtgggggccgcgccgcgggagagctccttgcggccggcgggatgtacgccgccccagaacagatgtctcatgctttcacctcatttttgaagtcaggtgcggagataggcggaaaaaccggggctgaatacctcgccgccggaggcgtccacccacatggcctcggccccgtagcggtccagaagggcctgcccctccgcctgggggagggtgaacagggcggtggagagggcgtcggccaggccggaatcggcgcacagcacggtgaccgcccgccagtaggcggcggggcggcaggtggtggggtcgatgatgtggtggtagcgcacgccgcccacggtgtagtagcgctggtagtcgccgctggtgaccaccgacacatcgcggacgtagagggtgtggaggaacgctccgctctccccgtcgggggcttggatgccaactacccagttctcgcctccaggctttgggccggtggcccggacgttgccccccacgctgagaagcagcccatccggcgcggcgcggcatacctgctccacggcatagcccttggcaatggccccaacgtccagccggagggcggggtcggtgatctgcacggtggaggcggcctcatcaatgatgacagaagagaagtcggtgtggcgagcggcctccgccagagcggcggcgtcggggagggcggcggaggcgggatcgctgatgccagcctcccgggcgtcatgccacagggccagcacgccccccaaggcggcattgacctggccgccggtgccctcgcagaggtcccggcagaagagaagcaggtcgatgattttgcggtccacaaccacgggcgccccgccggcggcgtcgtttaccgccttgaggttgaccacgccgtcatagtcgctgtagatgtcgtagagctggtggtactccagcagcgcgtcatggagggactgggcggtggcctgaaagtcctcctcactctccgcatagcccaccacggtggtcacggtgtcaaagagggtgagaaaggtggcctcataccgcttcgcaccctcctcctccggcgcggcaggggatgcgcagccggccagcaggaggacggacagaagcagggggagcaggcgacgcatctcaggcccctgccttttccaccagggtcaggaagtcgcccacgccgatggtgacggaggcggcgaggtcggcgtcgcccgcattgccctcctccgtgacggcgataccagtggcctcggccacggtcttgccggtaacataggaagcgaaggcggcggcttgctcgtcccactccttgccgatggagctgaccttccccatgccgtagtcggcacccagttcattcttggagggctgcgcggcggagaggtcggtgctaatggtcccggcggcgttaaaattcacgttggcctgtaccgcgtcgatgaccatgctggtgatggtgtccccgctcagggtgagggctcccacggtggcgtaggcctgggccaggccatcggcatcgctagtagcgtccgtgctcttggcggcattggtggtggtggtcagcaccagccggtcgcccttggaggcccccaaatgggaggcattggccgcagcctgctcaatcgcgctgatgtatcctccgatggacatggtgacggaggcggtgaggtccgcgccggtgggcttgccctcttcactaatggaaatgcctttcacctcagggatggtcttgccaaccacatagtccgccagggactgggcctgctcgttccactccctgccgatggagctgatcttccccataccatagtcggcgcccagctcgtttttggaggggatcgtgagagtgaggtcggagagaagcgcgccagaggtgtcaaaattgagcttggactggatggagtcgataacgcagtcgtaaatgatcccgtcatcgcccactgtgacggccaccacggtgatgtccgcctgtgccaggccgtcggcgtcggcggtagcgtccttactgctggacacagaggtgagaagggccaggccggtcttgacgggctacgagctgacccgcggggtactgtgcg

SEQ ID NO: 338 - DNA, 784576 bp, Flavonifractor plautii
  source 1..784576: mol_type = genomic DNA
tatgcggacccaccatgccacggtggacgagtcgatcatcaaccgggtgctgcggttcggcacagcggatattcgggaggactacctgaccaccatccgggaaaccgccgcagagtatgtgggcgagattttccgcatcctgcgggagcatgagtacacccccgctcttatgcggctccatgtgctgggcggcggaagctgcctggtccgcaacttcggggcgtatgacgccgaccgcgtaacgatctacgaggacatctgcgccaccgccaagggctatgagttcctgtgtgagcaggctttgcacagggggacgagagaatgaataccaaacggttttcgctccgatttaaccttgaccgggaggatgaccgcagggcgtgggaagccctgcaccgcatggacgcccgatccatcaatcaggagatcatcgccaggatcaacgcaaaagagcaaaccaatgtgttgaaagagctgatccgtcagaccgtatctgaagaattggagcgaaccgcaaagaacggctattaccggccagcggcgcaggcggaagccagcacggaggacctaaacgccgtgtttgacttcctgaacagtttttagcggcatcacctatgatgccgctttttcccgcccgtcgaggggtatggcatcacctatgatgccgcaaaaatcataataggaggttgtcactccatgagtgaaaaggccctttgtgaagtcaatatgacctatgcaaccatgcgaagttattttcgcgcagcagaacgtgcccgccagcatctgtccggcttcattgtgttctctccggccagctttgacaaggagtattccgtggaaagccgtacctatgcggtgtccagcgacaacaaggcgtttcggcctaatatgggcggatattccatctatgcttcgtccctggatggctccgatccctgtgtccgcctggaacagtatatggcatcggagtacggcggcaagaacggctggcaaattgagcggtgctatatgatgtccgatgaagtggagcgggcgaaggccctcatgcgaaccgaaaaagagcatgagcgataacgaagaggccaagcccgcacgctctcacgcgccgcaggcgcggaggatggcggtattgtcttagcaagcaacgaatttgatgggacaaattccgcttgacaggggtctgccgcccctataaccccgcaaaaaggccgccaactgaatagcagtatcagttgacggccaccaccgcgcatcatagtttagttgtcccgccgataatgcggctccggtgtgtaatgctcccggtggtatttttggtatttctcagactgctgggcttcggactccgcatccagcgccagttcgtaatccacaggatcagcacagacagcatccaatagtatccgttccaaatgctcatattcggaaaactgatccagggaggccatgacgaaggcatcccgcacataaccggcgctctccgctaaaaggtcctggtctatgtggtagccataatgttccacaaaaaaggtcagcagcatcacgacggtcctggtattaccctcacggaaaggatggatctgccagatctttgtaaagcaccgaacaatagtcgatacaaattcttctctgggcattgctgcccaattctggtgctgaatatcttgaaaggctgcggccaaatcatctgcaatcgcgtcatcgttgctgtaccatacgctgcggcccgcaagtagcttttcacgctttgcgatattgatgatccggtatttgcccgcccactggtaaatgtcaccgaacagaaaacgatggatgctccgtaggccctccggtgtaaagtcacagaagccctgctcatagagcagcatcatatttgcgcgggactgttccgcttcaatcagatccagcgtcttttcatccctgatgtccaacgtgtttcgtaggacaggaatatcctcataaaaatatggatcaaccatgtttccgcacctgtgctgccagctttgcgtgggagaccaaaagtgccgctttcatctgtgcgccgctgatctctccccgcgcccagctttgagaaagtgcctgggcatagcgggaaaccggagcaccttcaatcgcattgatggcatcagccgttttgaccgccgctattcttcgcttgtgttgtgccgtcatatggaccacctcggtgttcagtataacacacggccagctaaatgaaaagatatgccaaccagtaaattctaacctgacaaaatcaaggaggatgttatgagaaaaagaaatcaccgcgtggagatctacttcactaaaaatgaactggaaacactgacgaaaaaggtccgcaagtccggcctgtcccgtgaggggtactgccgccgcatcctcaacggtacggcggtgaaagaggctccacccgccgatgtgcctgtgctgatccgggaggtgcggcgtgttggggccagtctcaaccagatcatgaagcgggccaacgccgtcggcctgctggatgtgccccagctccgcaaggctctggaggacaaccggaccgtggagaagttgatcgtggacatctacactaccccttccgaatgatatggctgtgaccgccatctggcctatcaaggggcgtgtggacaaggtgatcaattacgcccggaacccggaaaagaccaccgaggcaggtttgccggaactggcgtctctccacacggtcaacgacctggtggagtatgccgccgatgagatgaaaacggagcgccgttcctatgtgtcctgcctgaattgccgggaggacactgctgccgcgcaattcatggagacgaaacgcttatggggcaagctggatggccgggtgtgctaccacggctatcagtcctttcaggcggacgaggtaaatgtggagaccgcccatgagatcggcgtcaaactggcagaggaactgtggggagatcgctttgaggtggtggtggccacccattgcaacaccgaccactatcacaaccactttgtcatcaattccgtgtcatttatggacggctacaaattctacaattctcccgccaactacgcccggatgcgggaggtatcggaccgcctgtgccgggaatacgccatttctgtgatccaggccccaggcaggcagacaaagaactacgccgaatggcaggccgagcgcagcggcaggcccacccaccgggggagcatccgggccgacattgaccgggctatccgtgccgccaccacggaacgggacttcctgcgggtgatgggcgaaatgggctatcagatcaaagtccatgggaaggacggcaagcccctgaaataccctgccttgaagcccccaggcgcaaagggttattttcggtttcacaaactgggcgagggctacacgctggatgagatccgggagcgtatcctgcataatatccacaagcaggcccccttcccggagcctgtgcatcgccagccccagcgttaccaagtgaggggaaagtcccgggagaaagtcaccggcctgcgggcgctgtacttccgctactgctatgaactccacatgatcgtcaagcgtccggcatccgtcaagcgggtgtcttttttattacgggaggacatcgctaagctgaaccgtctggatgccgaaacccgctttttggggaaacaccacatagggacctttgaggaactgactgcctaccgggaaacagcattggcggaggtggaggctctgactgcccagcggcaggtacttcgaaaagacctgcgccgactcaccaggcggggcaatcccacaggcattgacgaggtgaaacagaatatccggtccctgtccggcaggctcagggcggcgagaaaggaggtggccttatgtgaaggcatcgcccagcgttccgggcaggtcagagagaacctgggccggctgacaaaacaaaaggatcttgaacgaaaggagcagtcaaaaaatgagttattcaggcgacgcggcagagcaagtcgtgaggatgtcgctggaaacaggtgaggtagcagtcaggctggccggctccggggcaaaacagcttgccattttgctatatgccattctgcgggagcagaaaaagacggcgggtaaggtccgcttgaccaatatgctccgcagcggcaaggagttgaaggtgtttgctgtcaaggacagcgaccttcagctcttttgccgggaggcaaagaaatacggcatcctctactgtgtgctgaaggaccgggatgccacagacggtctgacggatattatggcaagggcggaggacgccagcaagatcaaccgcatcattgagcggttcggccttgccaccgtggatatggcccaggtcaaacaggagatcgagcagagcagagcggagcggcgggagaattccccagaagcgcccgcggtggagccggtagccaagatgggcagtccccaggagcctatgaccgaacaggaggtggacggactgttggatgccatgcttgccccggcctcggaaaccggacaggctgtaccggagcgcaccgatccagaccgggatctggatgagtttttgaaggcggtgcggagtgcgtcccctaccagagaggaggacaggactggaaaccccaccgagggccggaccgagaaatcccgtccgtccgcgcctacctcaaagcccaaagagactaccgcgccgggtatccctgatccactggagcgttcccgtccgtctgttcgtcaggcactgaaggagatcaaggcggaacagaaacagcgggcggaggataaagccagagagaacgctggacggcagaagccactccagcataaagcgcccccaaaaaagaaaatcaaaaaacaaaaggagcgatgatctatgccgaactatgatgatctgtttactggtcagcccgcccagcaggaagagaagccctttgataagacggtttgggcggcaaagaaacagtcggagcgcgagggtgtctatgccatgatcgacagctatgtgcagaatatgggcaaagaaggcgggctgttccaagcttacctggatgtgcaggcccgctttgacctctactccgtgagtaatgccatcctgatcgcggcccaatgcccggaggcgaccaaattggctgatttcgatagttggaaggccagcggcatttatgtcaagcggggtgaggattctatcactatcctggaaccgggcaaggagtatcaacgggacgatggcagcgtgggtgtgtcctacaatgtgaaaaaggtctttgatatatctcagaccaaggccaaccaacgccctgctcccaccacggtacgggatgagcgtctgctgctgaaagccctgatgaacaacgccccctgccgctttgccatctccaatgaactgccagagggcaccaatgcagcctatcatccaaagaaccatgttatctatgtccgacagggccttgacgcccccaccatcttccggggactggcgcaggagttggcccgcgtccacatggaccggggcgggatcacctgcgaaagtcccgacttcacggcgtacagcgtatcctatatgctgtgcaggagaaatggtgtgtcggtggagggcttttcttttgaccgtctgccggagagctacgctgagatggacgccagggcgctccgggccgaggcgggcgtcatgcgggatgtggcaggcagcatcaccgctgatatgaaccggctctttgccgcccaggaaaaggcacagaggagccgggatgatgctgcaagataggagggtgctctatgcgtgatgagaagcgtgtggtcgcgctgaacgattacgaacaacggcttatggtgcggggcctgaccgatttccgcaacgatgccatccgggacggcaagcccaccgaggatgtggaggacctcattctcaaagtcatagacgcgcccacaaaacaggaaaaacggaggtctgaccgtgaggcaagataagttttccaaagcccatcttaccctttacgcctgtggcatcatccccgttgtctggctggccctgctgctggccccctatatggacggcggactggtgaggctggtgcagtatggcggggcggcgctggagcatccgtttcgcatgatatggtgtgaggacagtttgaaaactgtcctcatttttctgctctgctacgggctggggatcggtgcctacctctccacagaccgcaattaccgcaggcgggaggaacatggcagcgccaagtggggcgtacctgctgtgttgaacaaaaaatacgcggacaggacacctttggacaataaaattctcacacggaatgtgtctattgggttggatggaagaaagcatcgccgtaatctgaatgtcctggtggtgggcggcagcggtgcaggcaagaccaggttttacgcgaagcccaacattatgaatgccaacaccagcctgatcgtgctggattgtaaaggcgaactcttgcgcgatactgggggcctgctagaagccaatggctacgacatcaaggtcctggaccttatcaacatggagaagagccattgttacaatcctttcgcctatctccgcagtgacaacgacatccaacggctggtgacaaacctgttcaagaacaccacgcccaagggcagccaaagccaggaccccttttgggaccaggcggcgcagatgcttttgctggccctggtgttctatctccactacgaagccccggaggatgagcagaatttccctatggtgatggagatgatccgggctggcgagatccgggaggacaacgatgagtatcgctctccgctggatgaactgtttgaccgcttggagatgcagaaccctgaccatattgccctgaaatattaccgcaactaccgctccggcagtggaaaaactctgaaatccattcaaatcacgttggtggctcggttagaaaaattcaacctggaatctctgactggtatgacgcagacagatgagatggagctgtggaatttaggcgagaaaaagaccgccattttcgcagttatccccgacaatgacagcagttttaacttcatcgtcggtatgctctacacccaactgttccagcaactctactatcaggcagatgtggtacacggcggacgcctgcccgtccatgtccactttgtcatggacgagttcgccaatggtgcgacacgttcctaactgaaaaggttaggcgtgaagctgagaaaaaaataagaaaattgaaaggagtttcgagaacaaatcagtttcatagaactgatattccgacaggtggaatgatggggtaacgccctgaaacgcctgccctaagactgcgccgggcatggtgcaagcgcaaagacgcactgtgtccgagagcgcgcggaagtcggcggaagtctgccctaacaggtcaagccgaggaaagcgccccagcggtggggtgtgcagatgatacgccgggggtctataaaatgcccatggtgaggatgtgcggtggaacgcactgacgaagccctgaatgtacgggtcaagacgaatgagccgcagaaatgcggttgccgcctatggcggtgtgcgtggggacgagtaagagttgttagtatgaaactccctgcggcgttacaggcgccgcccaagcgcactggcttaaaggggccacctaaaggtatatgcacagataggaatattggaacgtggaaaggttggagcatggagtgcattgcggcgctgtgaagtgctagcacggaaagcagactgtataacgtgcctttatccaactgagagcggtgccgcgaccgttgaagctgctgtaatggcggtggaggaacaggcaccagtcggctttgaaagcaagaataaaagaacagtattcataggttcgagtatgactaagaaaggcacaccccaaaggaggtatgccgactatgacagtgaagaaattgcaaaagaaagcgaaactgcgcaacgctgaatacttcggcttgcaggaggtattggataggctctatgcccaaagtgcggaaaacaaacgctttaccgtgctgatggagctggtggccgctgatgaaaatatcttacttgcttaccgaaatatcagcaaaaacaagggtagcaaaacggcgggaacggacggaaaaactgtccgctacctgtcaaagttcacaaacacagcactcattcactatataaaaaggcggttggagcagtaccagccccagccggtgcgccgggtggaaatccccaaaggagacacagggaaaactcgccctctgggaatccctacgattgccgacaggctgatccagcaatgcttcctgcaaattctggagccgatatgcgaagcgaaattccatgagcggagcaacggtttccgtcccaacaggagcgcagaacacgcgctggcacagtgttatgcgatgatacaaaagcgcggtctgcattatgtggttgatattgatataaaagggttcttcgataatgtcagccacggaaaactgctcaagcagatgtggaatatggggatacaggacaagcgtgtgctgagtatcatatccgccatgctgaaagcagaagttgcaggaatcggttttccgcaaaaggggacgccgcagggcggtatcatttccccactgttgtccaatatcgtcttgaacgaattggattggtggattgccagccagtgggagaatatgccgacacgcaaaaaccgtgaatatgcgcggtctgacaatggggttattgacaaaagccagaagtatgaaatgctccgaaaaggctctgtcctaaaagagtgctacatcgtccggtatgccgatgacttcaaaatcttctgccgcaagcgaagcgacgcagtaaaactctttgccgctacaagagattggctaaaggaacggctggggctggacatcagccccgaaaagtccagaattgtcaatttgaaaaggcaatactccgattttctcggcttcaagctaagagctgtgagaaaaggcgtcaagagcaacggcacagcaaagtacgcggtagaatcgcacatgagcgataaggcagtcaagaaagtgaagcggcaaacgcgggaaatggtgaaaagaatccaatccccggcaaatgtgaatgaggaatacaaagccattggagcctataacgcctatgtttcaggtgttcacaactactatcgttatgctacccacatcagcaaagacattcgtaaaattgccttcggcatcactcgaaccatgcagaacagattgagagagcgcttgcaaaagcaaggaaaccctctgcccgcctacattgcggagcggtatggaagaagcaagcaaattcgctatgtgagtggtcaggctgttatccccattggatatatccaagccaaagcaccgctctacaaacggcgggaagtgaaccagtacacggaacaaggccgcagaagtattcacaaaaatctggaatccgtaaatatgagcattttacactacctcatgcggaacccggtacagtttgcaagtgtggaactgaacaacaacagactggcactgtattgcgctcaacatgggtgctgcgccgttaccaaacagccgcttgaaatcggggacattcattgtcaccacaagctcccgcgagagaaaggcggtaacgaccaatacgggaatctggtgctggttacagagaccgtccatattttgatccatgccactgatagcgaggtaattgcacgccttgttcaaacattgcggttaaacgtaagacagcgtgcgaagttgaacactttgcgcaaaacagcaggcttattctcaatctaaacgcaatcgctcactgaaaactgtatctatttacaattttttcaaagtcgatggaacgccgtgtgcggtgaaagccgcacgcacggtgtggagcgggggaaaagacggaaagcggcgctgacgcgccgctcaggtcttacctatcgctattcgccttacctgatgaatttgacaagctgctggccactatgcggagccgggagatctccgtgagcatcatcatccagaaccttgcccaactcaaagccctctttgagaagcagtgggaaagcattgtgggaaactgcgacgaatttttgtatttgggtggaaatgagcagtccacccacgagtatgtgtccaaactgctggggaaagagactatcgacatgaacacctatgggcagtccagagggcggagcggcagctactccaccaactggcagctagcgggccgggaactgctcatgccggatgaagtgcgtatgctggacaaccagtacgcacttctttttattcgcggagaacggcccgtgcgggatttcaagtacgatgttcttaagcatcccaatatcaaacgcactacggatggcggggcggaaccataccagcacggtgaggatgcccacagcatcgtgtctatccgttttgacaaggaactgttgaaacaggctgcggaaaaggatggtcaggacgcgccgaaacatcacttcattcttctcactgaagaggagctggagcaaaaattcattgaactggaggaacaagaaaatgctgaacaacaaaaagggaaataagcggctccctatgcccgacaaggtgaagcggggtttccgtttctactgcacattggtgatggccgtggccctgctgggctgctgttctatgacagcctgtgccgccgatgatccgctggaagtggtcaacaatttgtcggagttcattttcggtttgatccgggcagtgggcctgatcctgctgggctggggcatcgttcaggtgggcctctccctccagagtcacgacccctcccagcggtccaacggcttcctcaccctggctggcggcattgtcataacctttgcaaaagaaattttgaccctcatcactgggtaaaacacaccaatagcacaaattttgcttgtattgtaacggcgtttgcgttacaatataggagaaaggagtgacacacgatggataagtcggcaacattaaatttgagggtcaatcccacggtgaaagagcaggcagaaaatgtcctccggcagctcggtattccgatgtctactgccattgatatgtttctcaatcaagtgacgttggtgaaaggaattcctttccctgtcacgctgccccaggctccagggacaatcaatgcagacctgatggacgcacgagagatccacgcaaaactccagaaaggactagaggatgcggagcagggccgggtaaaggacgccagccgtgccttcgaggtgttccgaaatgagcggtgaaatagagcggtttgtcgtccaaatcgcggacagcgccttgaacgatatggaggagctgcaccgttatattgcagaaaagctgggatcgccgcaaaatgcggctgggcaatatgatcgtattgcggatgaaatattgtccctggatattttcccggagcggtatcgcgttgtggattttgagccggaacgggcagcaggtctacgccggatgttggtagataactactctgtgttctatgtgattcgggatgataaggtcattgtgacggatgtgctgtatagcgcggcagatattgagcagcgactaaaagagaagcaccaataaggacaaacaacaatgcgctggagcgatcaatgctccagcgcattgttgcgtaatttaggaactgaggtgagaataatcggaagtgataattgggtcgttcagaaccttgaaaacgcgctggaggtctggaacggcaaactgagtgagatatggcagctcattacgcaatccccgcaggacttcaagggtggagccatctggaccgtgatagaggacatccacggcgcgctccaggccatcggttacgccctgctggtactgttcttcgtggtgggtgtggtcaagacctgcggcagctttgtggaggtcaaaaaaccggaacacgcgctgaagctgttcgtccgctttgcgctggcaaaggctctaatcacctacggcatggaactgatgctgtctctgctggacattattcaaggcgtggtgtcctcgatcatgaacgcggcaggcttcggcgcgccatcgtccacgatcctgcctgcggagatcgtgacggccattgagggctgcggttttttcgagagcatccctctatgggcagtgacactgattggtggactgttcatttgggtgctgtccttcgtaatgatattgagtgtctacgggcgctttttcaaaatgtttatgtacgctgcgctggcccccatccccctgtccagttttgccggggaacccagccagaatgtgggcaaaagctttctcaaaagctacgccgccgtctgtttggaaggggccgtcatcgtgctggcctgtatcattttctccgtgttcgctagttccccgcctgacgttgacccggacgccgcagcggcctcaatggtgtggagctacattggtgaactcatttttaatatgctcattttggtgggcagcgtcaaaatgtccgatcatgttgtgcgggaaatgatggggttgtaaggagaatacgaatgaaacggttttatatgttcaaagacgggacgcagaagggcagcacggaaacaagagaggaggcggtagagatgatccgcctgtggcagagccgcgaaacccatccctttctacgctcggagtttagtgtcattgagggcgaggaagaatttatcccctacccttcccgccaaaagccgttcagaaaaaaagaagagatggaacggtgagtattaggaggaatctgttttggaagttaaaatcaaccgtgagatccgtaattacacggagagtatgtttttcgggctgtccctgcggcagctcgttttttctgccctggcggtagctgtcgctgtggggctgtactttctgctaaagccctacgtcgggacagaaactgtgtcttgggtgtgcgtcctgggcgcggcccccttcgccgccctgggctttttcacctaccacggcatgacggcggaacaattcatctgggcatggctgcgctcggaggtactggaacccagagaactgcgctttgaagcgtccaccctctattacgatctcttgaagcccagcatagacaagtgggaaaaggaggaatacaagcgccatgattagaagtatcaagaccatcatgcggcaggaccgggagccgtaccgcatcccccgcaggatgcaggatgtgatccccattcaatgcgtctggccggacggcatttttaaggtaggcatcaagttctccaagacctaccgcttcaccgacatcaattacaaggtggccggtcaggaggataaagaaaccatgtttcgggtctactcggaactgctgaacagcctggattgcgccgctaccaccaagctcaccatctgcaaccaccgtcaaagtcaggcggactttgagcagtctgtcctcatgcccatgcgggaggacggactggacaagtaccgcagggagtacaatcaaatgctcatggacaaggcgaccggagccaacggcatcacccaggagaagtatgtcaccatcacggtctacaagcgggatattgaggacgcccgcgcctacttcacccgcgtcggagcggatttggccgcccgcttcgccgccctcggctccaagtgcgtggagttggacgccacggaccggctccgtattctccacgatttctaccgggccggagacgagggcaattttcattttgatatggcggatatggcccgtaagggccacgacttcaaggactacatctgcccagacgggatcgagaagcacagcgactatctgaagctgggcgaccgctattgccgggtgctgttcctgaaggactacgccaactatatccaggacgagatcgtgacgaacctgactgacctggaccgcaatatgatgttgtccattgacatcctcaatgtgcccacggacgaggccgtgcgggaggtggagaaccgtctgctgggtgttgaaaccaacatcacgaactggcagcgccggcaaaatcagaacaacaacttctccgccatcgtcccctacgacatggagttgcagcgcagggagagcaaggaatttttggccgacctgaccacccgcgaccagcggatgatgcaggctgtcctcaccctggtcatcaccgccgacaccaagcagcagcttgacaccgacacagagaagatacgctccctgtccgggcggtgccagctggcggtgttgaaataccagcagatcgacggtctgaagacggtcctgcccatcggaacccggaagatcaacgcctttcgcaccctgaccacggaatcgctggccgtgttcatgcccttcaaggtgcaggagatcatggaccggggcggcatctacttcggggagaatgccatctcccacaaccttatcatgtgcaacaaggccaatctgctcaatcagtcctccttccggctgggcgttcccggctccggcaagtcgttcagtgtgaaagaggaaattgtgttcctcattctcaatacggatgatgacattctcatagcagacccggagggagaatacgcccccctcattgaagccatggacggtgtagggagcgtgatccgggtggccgctggggggaaagaccggctcaacgctatgtatatggtggacggctacggcgaaaacaaccccattgtggtgaagtcgcagttcattatgtctctggtggagcgcatcgaccccaagggcgtgggggccaagcagaagtccatcattgaccgctgtacgggggacttgtatgaagaagcggaacagaactgcactgtacccactctcgccgccctccgagaaaagttgatggaacagccggaggcggaagcgcgggagatcgccctggcgctggagctgttcaccaccggctccctggacatcttcggccacgacagcaccgtggacctggacaagcgggtggtggtgttcgacatccacggcctgggcgaacagttgaagcccatcggccatctggtcatcaccgataccatgctcaaccgcgtcaccttaaactggaagaagggcaggcgcacccatgtctttatcgacgagttccatgtgatgtttgagaacgagttttccgccgcctttttcaactccgcgtggcggcagttccgcaagcgcaacgcctatcccaccgccattacccagaatgtggagtatcttttggactccgtacaggccagcaccatgcttagtaactccgagttcatcgtcatgctcaaccaggcggcgggcgaccgggagaagctggcccatctgctgaatatctccgaggagcagatgagctatatcaccaatgcggacgccggatgcggcctgattaaatacggttctgccctggtgcctttcgtcaaccgttttccgcacaacacggagctgtaccgcttgatgaccacccggcccggcgagggccgcttttccgggggacgggactgatgcccgtccctcttttgattggagggatggaaatgccattgaacatcaagccatgccacctgcgggctgcaagggactatgtgggctggtatcaccggcacagcatcccacccgtgggcggtaaatttgccgtggcctgctatgatggggaccgtctgtgcggcgtcgccatttgtggccgtcccgttgcccggtatttggatgatggcctgacgcttgagattttgcgctgctgcaccgacgggacaggcaacgcctgttccaagctctacggggcctgctgtcgcatcgggtttgtcatgggctatgatcgtatcatcacctatacgctggcatcggaaacgggggcgtctctgcgggccgctgggttcacttttgacggcatagccggaggccgggcgtggacgggccagcgccgcagggactactatgtggccccagcagagcggaaacaccgctggatgaaaagatgggttggtgtgacgccatgagcaaaagcaaaattaaaacccgtgaaaagggtaaaaacattaaggtgctggacaagtccgctgttgtaggtcaacgcatgaaaggtgccttcatccgttctaaaaagaacgcagaggccctgatggatgaccggcaggccacccccggcgaatatgctgtggacaagacagaacttgccgccgatgaccttgcccacgacgcggcgaatgtggccgcgtccggcacgaaaacgacggtacggcagggccggaaactgtttcagcgacagcgggaaaagcgggcggcggaacagcgccgggagcatacgccccccgctgaacagccccactcccctgaaccgcaccagggcgcagtcccagaggggcggctgccccgccagcggactaacacggccccggagcgcccgtgcctgtcggggcatgggcacatggcggagcatttgcccacccagaccggtgcggagcgcccaaaggataccgcaagtccttatgtagagagagggtgggcctttgccaagaagcagaccgagcggaaacggcaaattagagatcgggctgttcagtctgaccagccatcgcggattaagacctcaaacgccacacaagcgccccggcaggcagaactccccgtaaaaacggcaaaacagcccgcccaggctattgggcaggccgcgaaggacaccggcatgggcacgaagaacaccatcaagcgcacccagcgaacgataaaaactgcccagcataccgccaagactgccccacgcacggcaaaaaccgccatcaagacagcggactacgcggcaaagacggcgcagaggaccgcacaggccgcagccagagccgcgagagcgaccgcccaggccgcccgcgtcacaggaaaggccaccaccaccgcaaaagccgctgcaaaaggcgcatccgttgcggcaaaggccctgcttgcgtccattaaggcgctggtgaccgctatcgccgctggaggatgggttgccatccttgccattgtggtgatctgcttgatcggcctgatcgccgcctctccctttggcatcttcttttctggtgaggacagcggcacgggccagaccatgcctaccgttgtccagaagatcaacttggaatacgagagcaagctgggagaaattgagagcagcgccgcccatgaccgcctggaactgtccggctcccgcgctgtctggcccgaagtgttggccgtctatgccgtgaaaactaccaccgacccggacaatccccaggaagtcgccacgatggatgatggaaaaaaagaactcctgaaagagatattttgggccatgaacgagatcagccactggacagaaaccgcgaccaccacccaaaccgtggaaactgatgatggaaagggcaacatcattgtggaagaagtagaggtaacggctacgaccctttatattaccgtgacccacaaaaccgcggatgaaatggcggacatctacaattttaccgctgaccagcgagagatgcttgcggagttactggctgaagaaagcaacggtatgtggagtgctgttctatacggcattggcacaggtgatagggagatcgtaacggtggccctctcccagctcggcaatgtaggcggtcggccctattggtcctggtatggcttcgagagccgggtggattggtgcgcctgctttgtttcctggtgcgccaacgagtgcggctatctggacaccggcgtcatcccaaggttcgcaagctgctccatcggcatccagtggttccgggagagaggactgtggcaggacctcagctatgagccgcgccccggcgacctgatctttttcgattgggatgatgaggacgaaggccaggacggagctgcggaccatgtaggcattgtggaaaaggtggatggcgggatcgtctataccgtggaaggaaactctggcgatagttgccgggaaaatcgctatgccataggccattatgagatttacgggtacggcacaccggcttattaaaagggggacagcctgtggctgtccctacatagtgcaataatatccctacttatatttaaaaaattatcagcatttgtcatctactgtaactgaatattatgtgatacaattcttaagggtgggccagggcaatttctcaaagacttttaccgccatccaaacaggccggcaccgcccgcaaccgcttttccacggtgtgatcttttctcatgacggaacctcccgtctcttgtctggaggttctgtcatgatacgccttcacccagtccaatacccgattttccgagcacagttgatacttttccgcaatggacatagaactgccctggcccgacagatattcccccaccaccctgcgctttactccccaactgtactgacacttggcctggtttccattttcccacagcccggaagcaccctcggaacgataccggctgatccagttttccatggtggaatggcctaaccctgcctcccgcgccgcctcccgcatccgtagccgtcctgcaaggtattcctccaccagcgagaccttttcttccgatgcaagctctttccgctttctcatctgtgctctctccgctgtgatttccttgtctgtcttattgggagcatatcaaagtgttccgcagctgtttgcgatattttgaaactcagtaccccaaaatgaaccattggatatagtaaacaaaatagcaggattatgtttatggtgaaaataaagggagatctttctatgtttatctacctggctatgatcgactctccagaggagaaactaaaatttgagatcatatatgagcggtacaaaggcctgatgttctatacggcaaatagcgtgctgggagatacacgggattctgaggatatagttcatgacgcttttttaaagataatagaaataattgatgagattgatgatccaaagagtccccaaacgagatatttaatcgttactataactgaaaacaaagcaatagacttgtaccgtaagcgaaagtcaaaaacagttgttccttttgaagaagagtacataggtgtcccagagcagtctgcaattgatcaggttgaggaaaccgatggactggttaaagccattgcattgttaccgggaagataccgtgaagtactcctgttgaaatacgcccgggggtattctatggaagagatcgctgtgatgctgtccatgtcgaaagaaaatgtaaaaaagaccatacagcgggccagaaaaaggttggaagatcagttggacagagaggaggcgtagcatatgaaaatcacagaagaaatgctatataagtgcgctccgaaagcggaaaagctttggctcagttcacttccgcctgataatcaaattccggagcataaattctcccggcgctttgagcggaagatgagacggctcattcgggagcagcgacgctcactgccaatgagaaaggctctgcaaattgcccggcagacagccgctgcgatcttaattgcagcaacccttagtttctcttgtctgatgacagttgaggcctatcgagccaagttcatagaggttattactgaggtgttctacgacttgacacacttcagtttcttctcttcctggcaggatgacacggaattggccgaaattgagtttagctatcttccagaaggaataaatgaagtccgccgcgagaccttgtccgaaccacaaagccaaacgatctattttgaaaactcagagggccggcaattaaaattcagccagcagttagtcactgacagtaccggcttggatattattctggataccgaagatagtacgacaacaacagttccctttggcgactacaacgcttctcttattataaaagaagatatttcaattttgatgtgggaagatgatccatatctaatgcttctgactggtgatttcccgtcagaggaaattatcaaaattgctaacggaataaccatatcgaaataattcctacttttgagaaaaaacaaattttgagtgtccccaaatcgcctccttcttcgttactgtaattggaacaggaaggaggtgattcttatgttcaaacaggtttcaaagcagttgctctgtctgctctgcgctgttatctgcacatgtgcgctttcctccctgtgtatggcagctgatatatcttcgatagaagatggtgttatcgagcttaggatgacgaatatcaatgatgctcaatgcgcaatttctgttaaaaacggaacagctgctgcaagcgccaatgtaggtggtaaacgcggtgctgaaaaatgcaaaattgtcctgaagattcaggaacagcaagggagccgctgggtcacattggattcgtggacggtcgaagaagatggacgcaacgcttcgattaacggatcggtcgatgcaaagagcggtaaaacctatcgggcacaggctacggttacagtttggcttgatggcaaagcagaaagcaagaccattaccacaacaggcaaaacagcataaaccaagcaattttgaaaggtgttctgcatgtatgcagaacaccccagactgtcgataaagtatatttcttcgatttatgctgcaagagcctcgcagagttccgccgtccgcagacggcggaagagggtcgaatcgtgttttccggcggcgtgtacgtcggaaaacacacttcccaggccacaagtgtgcgagcgaaagcgagtgcgcgcagcggcctgcatcccctcgaaaaaatgcttgcatttttgagaagcgtgtcgaagtttttcgacacgctgaggtgttctgcatgtatgcagaacaccccaagggcaagcccttggggtgtttgatgttcagctggccatctggcgcttgataccttttgaaataagcatcaaaacaaaaataactatcaggaggttgagcaaatgcaaaagagatgggtgcttaaaatgatgctttccattgtcctatgtatgtccctgttattctcagcaacacctgtttcagcagtagacgtagaaagcgaaaattatgaaggcgaaatgattgaagccgttgcacttacggcagataatataccagaagttatttcggcagcgagcattgaggaaaacaatcatattgcacggatcttttcggaagaaaaggatatgaactctattgttttcctcaatgatgatgataccgccaccctctattattttgaagaagcggtaaaattcatcgacgaggatgggcatatcaaagataaaagcaatcagttatatagtgcctttgatgatccgcagtttgcattagattactcgtatgtcaacaaggataacaacattcgtacttactttcccaaaacactgtctcaagagtctggaattcttttgaaaactggagaccaatatatagaaatcgccccgcttatgactggccagagctcggcttcaaaatctgacagtgattctggtgatacggttcattactccgatatatttggaacaggaacttgggtagaatattcacctacatttggaggattcaaggaagaaatcgtccttcacgaatacaccgacaacgaatttagcttcattttagatgccggtggcttgacccctgtatgccaaaataatcatattatccttacagacgcttcgggcgaaactgtttttgtcatggacccaatctatgtatatgatagctatgtgggtgaagttgatgaggcaaccgacggttactgccataacacatggagtaatattgttggtctccaattcctcagtgatgatcagtacaaaatcacgattacagtggacgagagttttttagcggatagcagaacagaatatcccgtatatatagacccatcctttactgtaagcacatctggtagtgggagcagcaaaaccatacaagatgttcccatttataatggtgctgatgcaaagaatgttgcgagcggcagtaatacttatggactcctagggtacgttgggcagtctggaggaaaagaatacggagttggccgacttctgatgaagttccccggactcttgaataaccaaacatacaaagcattgggtgcgaatgccattacaaaggcgacgctttctattaaagaggcatcagggctatcaactcgaactactatttatgctaatcaatattctgggtcaacatggacagaatcgagtgccacttacaacaatacctcttggaatggatacacctctccaagtaccagttcgactgtgggtagtagtagccaagcgacggtttcttttgacatcaccaagattgtgcaagaatggaaacgcaatacgaccaatgctaataagggaatcatattaagaaattcaaacgaaagcaatgcgtcatatcggaaagatatccggtctacagaaagtagcaacaaacctgagttatctattacgtataatttttatggctgtaagccctatatttctcaagctagcaggaacatcaactgccacgggtatgcttgcttcacaaacaactggcctcagtttttgacagcggatgacgctaggtatgttcagaatcagtctaccacgacggcgcaagcccttgcacgcaccaagacacgaatgactacttggctcaatagtaacttccgaggccgttggaaggaagtgagtggtccgaatgttacactcgcttccaatcagtggatgatcgttatgagaatcggtaagcagggagtaaactacgactatcattactggtatcgtacaaacgatggtccatgggctaataaacacggacagacaccatccgtccttctgcctgcatctgatatgccaacaactaattcttcgtctggatgggcattaaatggaaaaaccggattttacaatagcagtatcgtatattatgtgctgacacagtgaggagggttcgcggtgaaacatacaagaatcaagatgatttgtattgtcataggtatgatacttctgctgagcacggttgtaaatgcagtttctatgggcggcttctccttgctgcacgcagcaggagatgctgaaacgggggaacttcctaaaggtaccgcgttgagcattgcagaagcaatccctgaagaatattctccagaagagctaatcacgaacacctatcatgaagatatgctttctgatttaggcattgataagacaggagaaatattggatttcaactttgctgcaaggtctttgacagctattaacgaacgatatccgatggaatgtgtacggcgtgtgacagatcagttgatctatgcagtatatcggatcgaaggtgaaggaaaagaatttaatgcatacttcttctttgagaagttaaatccggcagagacagcggcgaccaaaggggcggaagtctggtggcttactgggcgggtcctgttttctgaaaaagaactatcacttgaggacttcgcaactatttcggtcggatcttcagttaaagatgtcgcgaaaattgatccgatgacatcggattttgttccagaagatactggccctataactgttcaagattttgactttgaattgaatgattatgttgagcgcatctataccccagagccggttttggagtacaaggattaccatctgctaacagatggaattttatgtgttatgtattctcgttcaagtgcagatgatgatttcgttgtcgcttctatgggcgttaacccctactttgaagttgaatcgaactactcccgtggaactgttaggcaggaagttgcaccaatagactttcccaattaactgtcctacgatgcaagcgtgaggtgttcctacgttttaaagacaatttcattggtcaggcatgacaaaacggccccaggatactgtaacatcctggggccactctgggaagcataaaacatccttatctgggtggaaccatgcccgcaaacggctttttgtgtaatgcgatagctcttttttatctttccggttttgtctgggcatttgcagcgttcctattcagagccaaacatatgttgatcagaattttacacctcctgcgcccagacctcagacaagatcggctgcggctgtggcagatcctatgcgggttctaatggcggagcttggcggattaggattaccttcggcggtactttactctttgaatgccatgggtgcaggcatggttgcagcaattgctgatggtcctctccctgtcggggatattctgcttgctgctacaacagccagtgcggttttggttattgctgcgcactgggatgtcgtatctccaaaattcaatcaaattaccagagctttccaaaaagcattttcaactgcggcatctaatattttgtcggccttttctaagattaaaagcgatgccaaaaaagaggcagataaagcagacaaaaaagaaaaggagaaggctaaagccgagagtaagaagcggattgaagatgtcctgaaaggaaaaactaaagaccataaaacaaaagggaacacaaacatttataccgggcgcggtgggaaaaatgccgctgaaagggatttcaacaaattgaaccaaggaaagaccacaaccagaaatggaactaaggttggacaattgccggatggaacaaaaataaatgttcggacccacagtaaagatggccggattactcttgaaattcagggtaggggtcagtaccacataaaaattcgttatgagtaggagagagtatggacaataagcatttcataaaatggattccgcatagcgatgttgtggcggtatatgatatggaagacatcggatggcgtaatgagggatttgttttgacattgtttccggatgacctcgaccctgctaaacgatccaaatataactttgaaatggtctggcaggaggtactttgctatcaagtaacagacgagaggtatcgaccagacttgtgggtgtccagtcccgatgaagcatggactttttatacgagtgaatcgtcggaattcttagagaacttccgaaaagacaacgaccttgttcctgacactgtttatcattttattgtgggaggaacaaatttcgtgatcgatatcttatccaccgaatatccaaaagttcgatttgcaaatcgggcttagataccaattcgttaacctaagaaacccgtgaaagagttttgaactccttcacgggtttctccttgttaccttactacaagcacaaaagcctgcaaaatgatttcctccgccataagtttcaaatcattcaaatggcgtgtacgttccaaaatatcatccgtcgccggcataggattgtcaattatcatttgctgagttaaccgctcgatacgctccgtagcctcctgctgaacttggtgcatcgtttccataagcattccatccattttcagaatcatataccgatccgggtgattatcacgcagataagtgagcgccattcttccgtaccgccctagcggtcggtcatcctctgcgtagtcggaaatctgtatgttcggcattaaaattccatcttgttcatggtaggataagttaagatccggctttttcattttgtgtgcctccattgatttggattttgtcacaagtccatgaaacctatctgaatcacactttatcaaaagactttgttaatatccttatccatacggggcgaactgctggaactctatttatctagcgcaaaacgttcctgcacaagcagcctgtgtgagaagtacaggctgagtgatcgagctgttcaaaagcggaaagcggcctttgaaaaattcgtcttagatttatgatacagctatttatagttctttttgggggaaacactccattagctgggagaatatctcagcttcctctacttgatcaatcggatactgaccgtgacattcagcaatatctgggacataggatgggatgaccagggtgattggtacatcttcgtctcgaagatatactgtccaactagaattaccgtcccgcttgatactttcgatatttttttttgaatatagtcttgctggcgtctctattccttggagatctatgggagttacaataaacatagcaagcgttggaatacaagcgattgcataattgcaaattgtccatgtgcaaccatcccaatctatagaatacccatatactgctgtgtacgcgactggtgtatctaaagtctttaacaatgcttcttgaatccggtcacggctttttagattttttgggggcgaaacctcaaagagccgtcttatattactattattattcacactggactgacatttcctttctggttcacataagtgtttatctccctgtatcaccttgttggacacagcgctttaaatctgatccaggagtgaattttacagtattccgcgccggaatcagaatagtttcctgtgtcctaggattccttcctatccgttccttagatactgacacagaaaaagtgccaaatccaactagctgtatcttaccgccgctttccagctcttcagatactgctttgcagaaagcatttaatacaatttgggtaacctttgtgggcattcccgatagttctgcaatacgtttcgataactcatctttgttcattttatggtatcctcctttttgtattatcacaatccatattactaaacgagtttccctgagaaacccggatttgtcggtccatttgcggtatcagttcatgtatcttatttataaggtaagtgtccaataaagagttttcttcacgcttcacctatccgtaaatgtccaaaaagctttgttatatattctctgatggtgcagagtctctcagctccccatccttttcctccacataagccttcaatgttttcccaggacggaatacgatccttcttcggaacgaaccacgcagtttgggtctgagataaaagcttccaaatcccgatattttgacggataccccagaactaatctcttccatcaatatatcaaacagtgagtttgtcaaacgctttgcctccacctgcgtaagattcatacggtctgctaatacaagacccagttctttcttattcattctgataccctctctttttgactttttttattatcgggtcatatatagggcaaaaataaaacgagataacttataactactttaatatagttaattatattacggtacaactcaaatgtccagataaaaatgacctaatattataaatagtcataacaagaaagtgacctttggctatctatacgctcgataaaccatactcatccaaactgtcaattttatctatttataagaataaaacagttcacattctcaagtatatctattataataaaagtgataccagttcggaggaatcgatatgccaaaaatattttcagatatagaaaaagacatacaacgaaatacattatttgaaaaagggttgcaaatgattgtcgaacgtggctataaaaatgtcacggtagatgaactcgtcactttaattggagcttccaaggggtatttctaccgactctttgaatcaaaagaagaattctttttgcaggcaatcagttggcagatgacacgaaaccttgaaatcctgacggccgcccacagtaacagggcctcaacggatgaactcagccagatctataaagaactctttatccaggccagtacaatcaactatatggacatgttttatattcattccaaagtgagtgaggcgcagtggaagcagttccgggattttgaagaatcacattatattcgagtggtcaaactgttggggaaagaccccactatctgcgacccaaaggtactcagcaacctatccgctatgatctatctctcttacggaatgatacaatacgcgccctatctgtttgaggaaaaaaatgacgctgttctagatattctgcttgccaccatgcaccgctatgtaactgaacattgaaccagtctatactgtcatactgtaatataaaacagctccatgccaatagtggcacggagctgttttatggtgcaaaatgaacgtgatttcagaacagttcccttgattctagcttacaggcatccacatatttgggtatgcttcattcaacaggacaccaccctatcttttctagaacctaacatatctggaaaggttgtgcttgcaaaagcattatatctccatagattctgtttactaatgcagtataaacccagggataaatccctgggttccctgcatatgcagggaacccttcttgctgtttccttacagtacagacattactattacttcaatttgatccaccgctcatggaccccatcttctttccgctcaaatgaatgactattggtggcctcctgaacggtcagataataccatgcactggggtctgcattatccggccaggtcttcataccagagagcaaatctttttcgctttctggcagccgacccaagacacggtttatcattgccatggcctctgcgcgggtgattgtggcgttagggtggaatgtaccgtccatatagccgttgacccagcccagtgcggcggcatgctcaatgaacgtctctgcccaatgtccatgaatatcgaagaagctcttatcactttctacgctggaatggtcaaaacgggcacagactgttgcaaattcagcacgagtgattggcgcatttggatcaaagatttctgcggagcggcccttcacaatgcccagtctggcaattgttgaaaccgcggtattaaaccacatgccattggtcacatccgagaaagagttgctatcggtttcatttgctgcacgcacatcttcatccagcagccggtagaagatcatagccacttcggcccgggtgatcttagcatttggacggactgtaccatccgtatacccggccacataggcaaaatggtcatcaccattgagcatatcagggatatgcagctccgaggcgttcttttcccagcccgcatacacggttttattcttggtcatctgaatgcggtcgatcttgtccgtgaggttcttgtctgcgtaccagccggtgaaatgatagccttcgcgcacgggagttttgctgagcttcaccgtggtgccggagctataccgctcagctttatattccgtgccgccattggacacataggtgagagtataacgtgtactcccaccgtggccaccattccctccatggccgccgtctctgtggaacgagtaggtataaagcaagttgccagtcacggcatccgcagtggtatcgggctgccggtcccatgtgccgccggtatagccgctatcggctttcatgccggtgggaatgtcggcggcatccagcgtacccttaccctcgtgtagaaggatgagtatttgcttatctgccgtagagccatctgcccaggtaccgttagcgattcggaaggtcaccatagcagttgtagccacatcctttgtccaaatgcccttcaatacaacatcggtattgggcatagtcaggatgcccttgtcgatcactgcacctgcggtgtccgttgtccagccggagaacacataacctgccagtgtggggggctctgcaatcgagacattggctccataccaagagtccacctttgccggtacagttggagccccatccgggactgtcccctcatactggtatgttactgtatgcggtgctcgtttataataagcacagagcggtgtctgctttccggcgttttcaacaatatcagacaatctgttcttcgcattatctgcatcaaatacatattctacacctaatgtatctccccaggcggttttctgaccgtcaaacgccgtcaagtccatccgcaccgtagtatttgctttggcaaagccaccatggccataactccaacgactaaaggtaccgtctgggttttgcagatagatttcctgataccacaaaactttaccgccactgttcttcgtatactgtgcggtgtaggtgccgcctgttacggtttccgcctctccgggcagttggggattccacagctccgcgccagacttggcggtataaccaggcttcgccgtcactgcaggagccgctatcttttcccaggtctggccggcctttacatcgtaggccacctttaccttgtcctggccaccggcataggtcccaaaggttccgtgttcaccggactcaaagatgacgcgcacgaatccctgcggggttttctggctgttgttcccgtcatccgcattctccgggttgaagggctggtccgggtccttcggggtcacttcgatgatctcccggctgtccgcaaaggatgccgtcaactgctcatctgcggtgaactgtccattttcagggaatccatcccatttgctgaagatgtggtcagccggggcctccaggttatccgtcaccgtctggaaatctgccggggtgacctccacatccttctgtacatagtagctgctgggcttggtgccgtctttccagcttccctggccggggtcgaatgtcaccgtcacatatccgtccggcacggtaccgggatgattcgggtctaccgggattaccttatccagcttcgtatactgtgcggtgtaggtgccgcctgttacggtttccgcctctccgggcagttggggattccacagctccgcgccggacttggcggtataaccaggcttcgccgtcactgcaggagccgctatcttttcccaggtctggccggcctttacatcgtaggccacctttaccttgtcctggccaccggcataggtcccaaaggttccgtgttcaccggactcaaagatgacgcgcacgaatccctgcggggttttctggctgttgttcccgtcatccgcattctccgggttgaagggctggtccgggtccttcggggtcacttcgatgatctcacggctgtccgcaaaggatgccgtcaactgctcatctgcggtgaactgtccgttctcagggaatccatcccatttgctgaagatgtggtcagccggggcctccaggttatccgtcaccgcctggaaatctgccggggtgacctccacatccttctgtacgtagtagctgctgggcttggtgccgtctttccagcttccctggccggggtcgaatgtcaccgtcacatatccgtctggaacggtaccgggatgattcgggtctaccgggattaccttatccagcttcgtatactgtgcggtgtaggtgccgcctgttacggtttccgcctctccgggcagttggggattccacagctccgcgccggacttggcggtataaccaggcttcgccgtcactgcaggagccgctatcttttcccaggtctggccggcctttacatcgtaggccacctttaccttgtcctggccaccggcataggtcccaaaggttccgtgttcaccggactcaaagatgacgcgcacgaatccctgcggggttttctggctgttgttcccgtcatccgcattctccgggttgaagggctggtccgggtccttcggggtcacttcgatgatctcacggctgtccgcaaaggatgccgtcaactgctcatctgcggtgaactgtccgttctcagggaatccatcccatttgctgaagatgtggtcagccggggcctccaggttatccgtcaccgcctggaaatctgccggggtgacctccacatccttctgtacgtagtagctgctgggcttggtgccgtctttccagcttccctggccggggtcgaatgtcaccgtcacatatccgtctggaacggtaccgggatgattcgggtctaccgggattaccttatccagcttcgtatactgtgcggtgtaggtgccgcctgttacggtttccgcctctccgggcagttggggattccacagctccgcgccggacttggcggtataaccaggcttcgccgtcactgcaggagccgctatcttttcccaggtctggccggcctttacatcgtaggccacctttaccttgtcctggccaccggcataggtcccaaaggttccgtgttcaccggactcaaagatgacgcgcacgaatccctgcggggttttctggctgttgttcccgtcatccgcattctccgggttgaagggctggtccgggtccttcggggtcacttcgatgatctcacggctgtccgcaaaggatgccgtcaactgctcatctgcggtgaactgtccgttctcagggaatccatcccatttgctgaagatgtggtcagccggggcctccaggttatccgtcaccgcctggaaatctgccggggtgacctccacatccttctgtacgtagtagctgctgggcttggtgccgtctttccagcttccctggccggggtcgaatgtcaccgtcacatatccgtctggaacggtaccgggatgattcgggtctaccgggattaccttatccagcttcgtatactgtgcggtgtaggtgccgcctgttacggtttccgcctctccgggcagttggggattccacagctccgcgccggacttggcggtataaccaggcttcgccgtcactgcaggagccgctatcttttcccaggtctggccggcctttacatcgtaggccacctttaccttgtcctggccaccggcataggtcccaaaggttccgtgttcaccggactcaaagatgacgcgcacgaatccctgcggggttttctggctgttgttcccgtcatccgcattctccgggttgaagggctggtccgggtccttcggggtcacttcgatgatctcccggctgtccgcaaaggatgccgtcaactgctcatctgcggtgaactgtccattctcagggaatccatcccatttgctgaagatgtggtcagccggggcctccaggttatccgtcaccgcctggaaatctgccggggtgacctccacatccttctgtacatagtagctgctgggcttggtgccgtctttccagcttccctggccggggtcgaatgtcaccgtcacatatccgtccggcacggtaccgggatgattcgggtctaccgggattaccttatccagatgcagcacttgaagcggaacacccattgccgggtttttaccattggggctgtaactaaccaggactactttttctcctgccactgcagtaagcgcatccttggccaaatcaatacgaaaatttccggcctgcagctggtcaaaaggaatgacggcactgccataaatgacatctgtaaaggtatttgtggtatcgtcatatccctgcagcttcacaagcgcattgcctgcctgctgggaggtgaccgggacctcaatgaccttatcccctggatcttgatagacgagctttggcgcggttccttcgatggtattctctatcccaccataaaggacagtgctgtctgtctgcggtgctgcagccttatagtctgctgcatcgaccggatcggtgctgtcatccagcagctcactgccatccggtacaccatcgccatccgtgtctaccagattcatgttagagccaacctgattttcaatgaaatcccacaagccatccttatcactgtcgttcattggaatataagcattcgcatagctgtctgtcagatgcttatagggtgcgccatgatccaacgtgcccgcatagacaaggccgtatccatccttttcatttggataatcagattccagccaggaatcaaacagcagctgattatcatgctccgtaatgtactggttcagaaaaatggcaaaatcacgaatcgaaacattttctcgcagggggtactggatggtaaaattcgcgttttgaccagtcgctacggagaaaaccgacttttccagtctgttacgggccgcgttcaacgcatcacgggtgtcactctgtgcaatgctgatcgcactgacacggctcgtatcgaccaatccattggagtcaatatcaatggtgactggcgtatctgttcggaactccgatcctggcttgtcgccccggccatcctcattcgtagccccaagccgaatatttgccgtatcaatataaggcagcagctccttgggtatctgttccttgatgtaaaccacccaatacaggtccgtggtactcatttttacatttggcttgaaactgtggatcgacttgattaccatctgtcctgtgagttggttataatccagactgatccggttgctcatggggccggttagaaatccggttttctgttcgtcctttctgttttggttattcgccagaataaaaccttgatcccagcttctgttgaccatcatgctgctcccaccaggattgccggagccggtcacagcaaatgtctcaaagctgatcggcgtattttccaactgaaggctttccagcgtctgcccattttttagcgtaatacggatctgtgaattcgtcactactccaattttaccagaagcccatgtccgggtattgatgggaacggtccacaatgcgccgtttgcttctttatcaaactcagtcacattgttcccactcacgatggaaacactttggatctgctcataaaactcaactctgtggaaattaagcagaaatctccctgcatagggttctgtattactcaggccccactggttggaacggtcggcaaatttactgccgttcagcaggatactgccgtccgtatcaaccttatcatactccattgaccaatagcgcacaccggcatcaatagccccatttacttgataatgtacctcattatcaatcgacttgtcccccgtgctggcagccatagcggtcgctggcagcatactgagcaacagcgcgaaggtcagtataactgctgaaagccgctcccattttttctggcttgttctcattcaatcacttcctcatttcaatttttatatatataaacagagcccgcaaatacagtgctctgagtatttgcttactggatagcgctttgtatgggatttagaaacccacaaataagccaagaaaattgaaccgttcttgtaatccaccttttccatcatggtctaaaacattttttcaattctgccatctgtatacaacacacttgtgatggccttccaaaatgacctatatatcaaaatggtcatatttcgcctataataaaatggtcattttatatgacctaaatatccatatggtcattatagttcatttgctatcccatgtccagaagaatatccaaataagcggtcgtttgcatagacaaaaccagggcaacctttcccaggaggagaccatcccgtctcaaaaagtagaatagcttcttgcacaattatgaatcctagatgtcctcagttctacattttttctacagcttatatttgaaatataggaatataagttccaacccagataaacttcacatatcatgaccggcaaaacaatatacaatgccccaaaaacaacgtgcaagtcaattgctaacttgcacgttgtttgctgactcattttcagcatcctataaaatcaattaccttttctgatacccacacttgggacaaacaccgttttcattcagtgcaacaccgcatagtgggcagcgatcaatttccaaatgagacgcatattcctcagacgctttgtttacgccgctggaaaatgtcagtttaacaatgttcagcttgtctttcaagaggtcatagacaatcttgatcatgccctccacagtcatcgtttccttggtaaccaccaagcggcactcggggtatgccgtggcaaactcggtctgaaacgcaggaccagtcatcgtattatttggagttccccccttgataccctgcttttcatacacatccagaattgcgggtagcagcggatcatctgcacgaagcaccaaggcgtggtcaaaattcttcaaaacatcccaagccgttttttggatttcgttgcaggggaaaatcatgtttacaccgacattgattgtgtcttccacctcaatggtcaaaacgcctgtatgcccgtgcagatactgggcttccccttgaaacccataaaaccgatgcgcatattgcagttcaagttgtgtgatacttctcattctaacctctcctttgatttatatttacaggtatgatgcgcctgtgtgcgcactgagttaattggctgttacaatgaaatgattcacagtctcttggtatatataactctgttgtgactaattatatatattagtcattttaagacgaaagcaatctaatgtcaaccctatatacagctagtttctgacaaaaatcaacagtaaaatgattgtttaactaaatatagattaaataatattaaatagcaaataatatgaaaagagttccttaaaactaatcatcatggggaacccttttatattatggactgataacccatcgtatcttgatgtcatatcaaataaatcaagcacataggtatcacagcggagttgacttatcccgtataaaacgcgggaaaatatcgatgctgtagaaggagcacatcagggattggtttcttgttaaggccgagctgttttgtcggtagtggcctgcggattgcttttgaagccggagatatacttcatccctagggaacgcttgtattctgatggagagaggaccccatcagcgttcaatagtatgtcaaagaggccgccgtaaaccgcattcaagcgggtttgcggcggcctctcaatcatccattttttgagaaatctgttttacaacagactacttcgctttataccgctatgttcttcagaaaatccaaatagggaatatatgggatattgagctggcgtcccatacggttcagttcgttcagcttgacaagcattagattgatatttgtttccatgattgaggaaagctgtaccacatcatacccatgccccataagatcgaacaattcctcattgttgatccgcaaatgggctgaaaaggcattggcctcgtattccatctcgtttatcatatcaaaaagagtaaactcctggagccccatcccaaccttggcccgctccctatggagggcatcgtggccgatttcgtggccgcataccatttgagttgtaatgtagtccatgttagagttcagcaggatgtgtctctccttgtgctgatagctatatatccccagcaattccttgaaatcatcaatgtggtgcacatagattccaatctcacaagcaatccgcagggtatcccgcgttccgcagcgtctcacaagttcattcgctttacgatagatcgtttccgctctttgcagcaaagtcattccacccccaaaaacacaagggtttctccgtatcacaaatcatacatagactactgtcctacaatcaggaatttttgaatttcttaggcgtgtacttttgcacattccttactttggattcccaataaatatcctgtaacgctttcatcacagcatccttatcctcttcggacagggcaccaccggcacacagaccagagaatccttcgatcacagcctgggcttgtgatgctccacgagtgccataccgtttagcggcactaaccacaaattcttcgtcctctgtcaaaagatagtttctttcaacattgagggcacttgcaagggctgcgtaggtttctcttttccggggatagctatcccccttttcgtaactgacgatagtacggagcgcaacatgggttatttcagcaagctgtttctgtgtatagcccatattgagtcttgcagctcgtaccttttcagcaaacttcatcgtaccacctctaatctatatgcaactaatttcatatcttgtgttgacatacgcaattaacctgcttataatatgaaacatgaaattcacctgcacatatagtacgacgagttgcatatcatgtcaagagtattgctcctttttgccgaaattcatcattatgaagataggaggctgcagacgatgagttacctatcccgaaatgaccttgaaaaaatagcaacccgtgttttcaatgactacaagcatttgcctcagcttgcagatcagccagttgagtatgttgacccggaaatcttggcttgtgggctttacggcctccatattgaccatttccatctatcaaaggatggatcaactcttgggatgaccgccttcaaggaggttggtgttgagctctacggcgatagtggacagccctgtttctatttcctggatggaaaaacacttctgatagaaacagatttgaagaacgatccagtgctgtgcggaaggtaccactttactgtggcgcacgaaacagcccaccagattttggccggtttgcatcccacgaatggagtgatccaaaatcgtgttttctattatcagggacgcagcccgcaatttccgatcctcgattggaatgagtggcaagctgataatttggcgtctgcgctcctgcttccctctgagattgtgcttggtgcgctccgcaaatttaatttagaacatggcatcgatatattgaacaaggtataccgaccgaaggaatacaagctattctgcgaaatggcggagtttcttggcgtttcaaaacaggctatggctatcaggttgaaaagacttgacctgctgaaagaggattatttgcagaacccatatgcgctggctgatgttgagaaggaggatgatggatgatggttgaatctataaatattgctgttaggtgccccgtatgtagctggcgcgtgatggataaaatatcgccagctacggggaaaatcgtgattaagtgcccccgttgtcataggatcgtggaggtcgatctagccctacgccggaaagcactatgccggagggtcagttagtttctaatcttatacacaaagaggaagtgacaacagaataaggtctaagagtaccgagcaacgggtcatcgtaccgtaaggtagatagtcaccaaatggccggacattaggaatgtgaggggatgtacccctctatttcctaatgcccggccattttttgttgccgctccagaaatggagtagggaatggatctgtttgcttggcaggcggcgctctgccgctatccgtgatctcctgaatttttggctctcaaaatccaaaaattcaaggagatcacaaatgaaaactacatatttagtttataaacaggtgaatggtgtccggcaacttgtcacagcaacgtcggaggaatgggacactattttgaaaggaaaccggggattgcccgccgagcagcgtcggtacttcataaaagactgttttgcggatggggatgaactggattgtatgtatatcgaaatgaccgccgtcgaataccgggagtggaacagcaaaaacacagttacccagcggaaacgcaaagctggttcgctctactcatttttatctttggacgctggtgtgccggaaaccggacttgaatcactgtacgaaagtgtcccctcggcctttgatctcgaagggcttgctactgaccaccttctgatcgaggaactgaaggcagccctgcgtaaatggaagccctgggcagaggaactgctggaactctatttatctggcgcaaaacgttcctgcacaagcagcctgtgtgagaagtacgggctgagtgatcgagctgttcaaaagcggaaagtggcctttgaaaaattcgttttagattttttgaaaaaataagttcggtttgaagtgtcgaaagttgtagtagggggttgagaggtccgcaggcccctcaatgctccttgataaccgaatacccattcgtcaagtacatcagttccgatgtgcgaaagcatgagccaccacaacagggtacgccacgaggcccggactgttggaaatcatgacctgctgaaaatgaggtcagcaaaaatatccaacccatccgagatgagcgagaattccctttgtaagtgccgggttgcccccggcatggcgatgacagtcggaatgacaatggtactcccgcccagccacagtctcaaacaatgggggcggctctgtcagaacgacagttggggtgaaactcccgtgaggtggtgagcaggccaccgcttgatgacttcccgggcttcggcctgcacacggggtgtcgaggacaaatagtgtgcattacatatctgaccgccaacacggggacggccaatcgccagctatgataataggagactctggatggattggcggtcagatgtgttttgcacactacctgggaagtaattgggtatttggctgcaagggcaaatcacataaaggtgaggtgtcctcatgaatagagaactgccagatgaagtgctgcgcggccagatgtactatgctgatttagatccggtgatcggctctgaacagggcggcaaccgccccgtccttgtgatccagaacaacatagggaatcgccatagcccgaccatcatcattgcccctatcacgaccagggtgaagaaactccatcagccgacccatatcggtgtccctccatactttggcctgccccaaaactctatggttatgctggagcagatcagaacgattgataagggcaggcttggcagctatgtaggctgcttagacgatgatgtgatggactatgttgacgaggctcttggtatcagtgtcggcctgcatgatcttgctgagaagaaacagaagccgtatgccgatgagccgcgtgatgagatgcatggcgaaatggtgctgactctttgtggcacctgccttagacagttcatctgttcgcctgaacatattgtgaggcggatcaaccacgcacaagctaaagaaccttgtatgtactgccacgtccgggacggctacgattaccgtatcattcacaagaaaaaacgcctgggcgatgacaggtattaaggaggcgcgaggtatgactgatgaattgatggagcagcgcatggcagaactcaacgcccgcaacacagaaaaagcgcctgcttttgacagcgaaaaaagggcctactccgtggacgatattatggagatcctggatattagccgttcgtccgcatatatcctgatcaaaaagaatctctttcggagcgtcaagattgggaaccagctccgtatctccaaagccagctttgataaatggctggacaatgggtgattgtcaactgtacgatttcaagttggtctgaacaatcgcacatttgaggaaaaaatgtctcccagctacaatgcagtcaaggcgaaagccttggctgcattggcaggctcatcaagtcgacatagggaggtatctaacggaatatgaacgatataattaaggaacagcgtgtgctagaacatcatgctcaaaacacagaaatggctccagtacataccaaagaaaaacgcgcctactccgtggacgatataatggacatcctggatattagccgttcgtctgcatacatcctgattcaaaaaggtttctttcgaagtcataaaattggaaagcagattcgcatctcaaaggttagttttgatgagtggctggatggtgtgtctcccacaccacgcgatatttgacttcagctattacaaaattctacataggaggaatatctgttatgggaaaaaccagcatctctgtccccgaaatgcggagactgcttggcatgaaaaaggtagaggcatattggcttgtaaaacagggacgcttcaaagttattcttgtcggcggcaaaatgcggatcatgctggacagctttgaggaatggtacggcagacaattccactacaaaaaggtcaacggaccggaaccaggccaactactccctgcgtctctgaccgtcccggaggcggctgacatccttgggctgaaccctggctccatctatgagctgataaagaaccatgacccctttgagacgttcaaggtcgatgggcaaactcgcattctaaaagaaaactttgagacgtggtatcaaggacagtcccattataagaaacgagaggacgcggcaccgcaagagctgttggacacaaccctttcggtgagcgacgtggcaaaactgctgggcatacaccgaaacagcgtttataacatggtgaacaagcgagatttgtttgtcacagtgaaagtggataacaagatccgcatttataaggacagctttgaagcgtggtataagtcccaaaatcgccataccatagttgctagctgaaaggaggaacaaccgtggcgtctatcatcaaacgtaaaaccaaatattccgttgtttatacctatacggacagcaatggcgccaagcgccaaaaatgggaaacctgcggctcccatgcggaagccaagaagcgaaaagcggaaattgagcatcagctagacaccggagtgttcattccgcccagtgccgacaccctatccgattttctggacgaatatgtatccctctatggtgtaagcacatgggccccctctacctttgatggacatacggctttgatcagcaactacatcaagcccatcatcggagatgtgaagctggatgacatcagccccagaatgataactaaattctataaagacctccaaaccgtgaaagcagttccccggtacgggcagcccgagggggaacttatctcccccaatacgatacgggagatacacaaactcctgcggaatgcgttcaatcaggcagtaaagtgggagctgatggcaaggaatcccgttcagaatgccactgttcccaaagccgagaagcatgagcggaatatttgggacgctcaaacactgatgaaagcgttatccctctgcgatgacccattcctctccctggcgatcaatctggcctttgcctgttccttgcgaatgggggagctgctgggcctgacatggagctgtgtggatattagccaggacagtatagaccacgactgcgcctatatctatatcgacaaagaacttcagcggatttctagggaatcactggcacagatcggggaaaaaggtatcatgtttaagttccccacgatgcgagggtgcaattccactgtactggccctgaaagagccgaaaaccaagacgagtgtgcggaaggtatttctgcccagggcggtagcggaaatgctggtagagcgcagaaaaacgattgatgaactgaaagaattgctgggggatgaatatagagattatgaccttgtattcgccagtacccaggggacccctaccgaagcaaattacatcaaccgggcctttggcaaactcatcgcggacaataatctccccaaggtggtatttcatagtctcaggcacaccagcacgacctacaaacttaaactcagcggtggcgacattaaagccgttcagggtgacaccggccacgcacaggctacaatggtcacggaacggtatgcccatatcttagacgatgaccgccgtgtaaacgccgcaagattccagaaagagttttatgggggtagcagcacagcggaaaccgcagcggtgaccgagccccacgtggaacagcagcccccggcaccagacccgcttcaaaaccttgacgcagcagccaaacagcagttgcttcttaaactccttacagaatccccggatatggcggcacttttgacagcccttgcaggaagaagcgcataatagagacggacaggaattgagtaccattcctgtccgtttttgcatagttgtgttcggcactctttgattgcccggaaagctgattttcggcactctttgattgcccggaaagctgatttgtggtataatatggacataaaatctgttgctaatacgagggggtgtcgcttatggcattggagaataagctaggtatcaccgactccactgaactggcaaaggcggaggaacggatcagcaagacaaaagcactggagatgtttcagcagggcctgctggacacatttgaagtcggtacgttccggggactttcccaaatccataaatatctatttgatgaaatatacgactttgcgggacaggttcgcacagtgaacatcgccaagggcggtttccgttttgcccctgtcctctatcttacctcggccctggaaaacatcagcaggatgccgcaatccacatttgatgagatcatcgccaagtatgttgaaatgaacgtggcccatccttttcgtgaaggaaacggacgcagcacccgcttatggctggacgctatcttgaagaaagaactgcgtcaggttgtggattggagcaaggtagacaaagacgactacctgttggcgatggagcgcagcccaatcaaggacaccgagatcaagctgctcctaaaagccgctctaaccgatcaaatcaatgatcgtgaggtttatatgaaaggcgtggatgccagttaccgctatgagggctacaacacatacaagaccggcgacatttgaattgaactggttgccattggtgttgcaaagatgagatgttttgaacgctgaaccgtcaagcgatttttcgcccacttgctaattgcttgctaattacggccccaaaaaatggccgtgattagcaagaaaacgtggcaaattgtgagtgatgggatttgaaaaaagtgagtatttgcaagggtttgatgggggttgtgagtgcccgtcacaaccgcgctgggccttctcctaagcggtaggtcggaggttcgaatcccctcaggcgtgccaaaggaaagggacatccgcaaggatgtccctttcctttggcctccggctgccgggaatgggtgtctcccaggcaatttcaaatatccgcgggcagatgcggtctgcgcttccattcgtgttatttctgggcggcgccggtaagcagggggcgggtcatagtattctttttcaaataaagttaatggcctatttttactgttactatagcctgtccaggtggctctttcaagtcctctgaataggattctttacaacctttcccaaagaaggtatatctgctcgggcaagtgttcttcccacatgtccaaggcatcctccgtcaccactatataactctttagctgtctattttcttgtgtttataggctctctatcaacgctgaagcgaaaaatgggtaatggatgcagtaaatggcatggtacaggctcaggagcaggcagaggctttaacaaagcacgcacaggctaaagatagactcactcctgcttgccttgttggatatgcctaaagcagtctggtatctggagcggacagatgttgtagtttccgttgcccctcgttctgattccccatggaatgacaccgcaactctatcacgtttttggaattttcagtaattaacagctacaaaaaatttccccatatcagaagcaaagagcaatgagtgcgttagtttaagcttcctcagttcttctgaaagaagtcctgcaatgataaagctattcgacttcatagtcatcatagtattactaccagcaaagtgctgtcctattgatctccagaagtttgcagcaaacaactgtagactagatagtatcaagtccatctcattcgtcacttctgtcccatagatcatttcggcaacgcgaagtagaaatgagctctctatacctgaaacaattgtaatctcgcgtgaatccaaactatataccattttttgatatacagcctttcccaaaaattctccttgatagctcctgcctataattttcgcatttgccgcaatatttaaagaagcggtcaacagcgtattgatcttttcttccagtcgcgcttcaaagtcactgttctttgcaggcgcggctagaataccctttcctatgatcgccatatctgctgttgctatatgctccaaaagccatccaattccgcttccgacaaaatcttgtatctcttctttactgcactcaccacgcttgacaatatcttgatatttttttagctggatattgcaaaattcatcgtgcaacatcttgtgtaatgtatacccagtgtagccgattttgcgcatgtattcctcttccgccttagcatgacgctcaaaatagctggttatataagttaaagtttcccgaacgaggaatatacgataatttgcctcatctcctcgttcccgtaacttattcaaaacctgatcggccatttggaatatctgctgatgttccttgtctaatttttctatacccgtaatataattgtcattccacctaatcatacctgttctccttcaatctattttagttacaaaataagtgagtcagcatatcctcctttaatgtttcagcagagcaatctttgggagctgttttcctgtttgactgcataacgcccgggcggagggatttattgcgcaataaagggaaatttaaaaatccaatagagtttataggaaaatgcggtggactgccaggaaaaatggacagggcactggaaaaaagcggcgaaagagggcgggattttctctgttgctttttccctgaggaaccattatactatatattatggaaaccatttatgcaaatggaggattacatatgaaaggaaagcgagttctctctctggcgctggccgcgctgatgacgctctccctgctggtggtgcccgcagcggccgtcagctttaccgacatgaccaatcactgggccaaggacgatgtggagtacttggccacccagggggtggtcaaggggaccagcgccaccacctttgctcccgaccagaagatgaccgcctgtgaagcgctgctgttttgctcccgtgccaccggcgtggacgccattgacaaggaggccatcgccgaggactgggaggacgagctgaaggagatcctgcccgaggagatgtacgcctgggcggcccaggagatggccgtctgcctggagaccggcatcatctcggagaccgagctgcgtgccctgagcagcgcgggcgggctggtgaagtccatcacccgtgagacgctggccatgtatctggtgcgggccatgcagctcgcccccctggcccagagcctgacctcctaccccatgagctttgcggacactacctctatttccgcctccctgcagccctatgtatacctgctgaacatgtacggcatcgtcaagggcaacgagctcaaccgctttctgccacagaactccctgacccgggccgagatggccaccatgctccgccgggccatcgactttatggacgagcggggcatctatgccgagctgcccggctacaccgactatgactgggtgggcggcaccatcgccgccgtgtctaccggcagcagcggcgttaccctgctgaccctgaccagcgtggtcagcggcacccgtagcatctctctgcccgccgacgcggagatctacgagaataatatgctctcctccgccgatgccctgaaggtgggcagttacgcccgggtgaacctggacaggaagggtactgccgagtccgtgcgcctgggcggcgcggtcacctcctataccggctccgtcaccggcgtggagcaggacagcctgaccgtgacggtcaacggcgcttccaaacggctggatatcgaccgctttaccgaggtgcaggtgggcaagaccgccggcgactacaccctgctggatccccaggccggatacaccacggccacctgctatgtggacgccatgggccatctggacgcggtgcagctctccggcggaacccgcgccgaggagggcatactggtgaaggtggaaaacggcaccggcggccagcggctccaggtgtcggcctttaacggcgaaaccaggcgctacaccctgcccgccggggcgggcgtcaccgtcaacggcgtggtgggcaccgtgtccgaccgctatgagggcgactacgtgagcctgcgggtatccaacgacgaggccaacgagctggtcagcatggcggtggacaccgtaaccgattacgtccagggctccgtcaagagctttacctacgccaaggatcaaaacgacatcaccctgaccaacctgagtaccggcaaatccaccacctacgacatctcctccaaggcagccatccgcttcaatggcgaggacatcgcactcaaggagctggagcggaactccttcgccacccttcagctctccggcggggatgtggtgacgctgctggacgcctatcctggctccaccaccaccgagggcgtcattgagagcatcacctacggtacccccactaccctggcggtcaagaccgccaatgacagcgtaatgacctttgaactggatctcaccgacctgcccgccatctaccgggacggtaagagcagctctctggacaagatcaagagcggcgacaccgtggtggtcaccgtgcgctacaacaaggtcaccaccctggagaccacgcctcaaagcgcaaacgtcaccggcactatcacccgggtggtgcaggatgccgccgggatcacgtttgatgtgaagctcaccgacggctccaccgcctcctataccgtgtccgagggcgtttccgtcacccagaacggcactgccgtctccctctacaccctcaagcccaacgatgcagtggccatggtggtcagcggcggagatgtggtgtccatcgaggtggacaggggctccggctccagcagccagcttgagggcacggtcctggtgcccaacaccaaggacaagaccctgatggtacagctcaccgacggcaacgtgctcacggcggacgtgtccgacgccagctttatgtccgccagcggctcctccaccagcctgcgccagttggaggtgggggaccgggtgcagctcttcggcgattacaagggagcccagtttgtagccaccctggtgctaaagctgtaagtattaaatgtaatgacatgaaaacggccccggaaccgctcggttccggggctgttaggctaacaataaaccttcctgcgtaagacttcggagggaaggatagtgtgaaagggaaccgtcagggttccctggaggtgaattggccgcaggccaagagaggccggcctgggccgttcacgttagatcaaacgactttttgaagctttctggaagcttcaaaaagtccagcatccagccgaaaagtcttttcggctggatgacggccccgggaccgctcggttccggggccgttttgcaggcctcacgccgggagacggagccgcgccggcagctcctccggcggcacacccaggagcagcagagtgcccgcggcggccagaaagggcaggggggaggcgccggtagagaaggggagcaccagctcctgctgctccaccaccgccccgcccagggtgaccagctcccgctggacggccaggcacagcctgtccccctccaggctggaaaaggtgagggtatcccggggggaggtgccgtagctcacggcctggcgggcgttgagggcccgggccagcggccctgccgtgccgggcagcagcaccgtcccgcaggggacggcccccgcgccggcccagccccgtgccgccggtgacaccgtcagcagctccagccgcgcaccggccagctccgccgggtgccgcccggcgcgcacctccgccgccagctctcccaacccggcctccacggctgtccgaatcccctcgtcccgctcccagattcccacacgcaagctccgccacctcccgctttgctgtagtgtgcggaaaatatgggattttatgcgccctttgccccggaacgcggcgcgggccttgacttttgcggcctgaatgcgtaaaataatacgaaccgattactttagaataaaggattgagatagagatggcacaggacaagaaacaggtggaacagattaccgatatggaggtggactttgccaagtggttcaccgacgtgtgcaaaaaggcggagctgattgactactcctccatcaagggcatgttcatcctccgcccctatggctacgccatttgggagaatttccagaagatcctggacgagaagttcaaggaaaccgggcatgagaacgtgtacctgcccatgctgatccccgagagcctgctccagaaggagaaggaccacgtggagggctttgcccccgagtgcgcctgggtgaccatgggcggctcggagaagctggaggagcgctactgcatccgccccacctccgagaccctgttctgcgagcactacgccaacatcatccactcccaccgggatctgcccaagctgtataaccagtggtgctccgtcctgcggtgggagaagacctcccgccccttcctccgccaccgggagttcctgtggcaggagggccacaccatgcacgccaccgccgaggaggccatcgccgagaccgagcgcatgttcaacatctacgccgatttctgcgagaactacctggccatgcccgtggtgaagggccgcaagaccgacaaggagaagttctccggcgccgaggccacctataccgtggagtgcatgatgcacgacaagaaggccctccaggccggcacctcccactacttcggcgacggcttcgcccgcgccttcgacatcaccttcgccggcaaggacaaccagccccaccaccccttccagacctcctggggcgtgtccacccgactcatcggcggcgtgatcatgacccacggcgacaacaacggcctggtgctgcccccccgcatcgcccccacccaggtcatcatcatccctgtcgcccagcacaaggagggcgtcatcgccgccaacgaggcggtcatggcccgcctgaaggccgccggcatccgggtgaagatggacgcctccgacaactcccccggctggaagtttgccgagtacgagatgaagggcgtgcccctgcgcctggagctgggccccaaggatatcgaaaagaaccagtgtgtcctggcccgccgggacagcggcgggaaggtctttgtctccctggacaacatcgaggagaccgtcaagaccatgctggacgcggtgcagcagggcctgttcgacaaggccaagcgcaacctggacgagaatacctacgcctgcgccaccctggaggaggtcaaggagaagatggccagccagggcggcttcgccaagaccatgtggtgcggcgagctggcgtgcgagctgaagatgaaggaggaggccggagtgtcctcccggtgcatccctctggagcaggagcacctgggcgacacctgcgcctgctgcggtaagcccgccaagcacatggtgtactggggcgtggcgtactgacgcttcaaaggggggcggcatgccgccccccatataatatcagatgattaactatgactaaccagaaaaaaggagggaactcatgcagtccattttatgggcggccacggggaccggcttcacttttttgatgaccactctgggcgccgccatggtctttctgttccgaaagcagctcaatgcgtccatccagcgtatctttctgggctttgccgccggggtaatgatcgccgcctcggtgtggagcctgctcatacccgccatggaggaggcggaggcctccggacttccgggctggctgccggcggtggggggcttcgtgctgggcatcggcttcctgctgctgctggatgtgctgctgccccacctccatgtggacgccaggcagcccgaggggctccactcctcctggcggcgcaccaccctgctggtgctggccgtgacgctgcacaacatcccggaggggatggccgtgggcctgtccttcgccctggccgcccagcacgccggtgagggggcggccctgtccggggccctggcgctggcgctgggaattggaatccagaacttcccggagggggcggccatctccctgcccctgcggcaggagggactgtccgccgggcgggccttcctctacggcagcgcctccggcgtggtggagcctgtcttcggcattctggtggtgctggcggcggggacgatccagcccctcatgccctggctgctgtccttcgccgccggagccatgatgtatgtggtggtggaggagctcatccccgaggcccacttgggggagcattccaacaccggcaccctgggagtcatggcgggcttcctgctcatgatggtgctggacgtggcgctggggtgagccgccctaccttgtgcggtaggggcggcccttgtggccgcccgcgccccaggcactctctggcgggcggggacgagccccgcccctacggagcagaggtatccagactcctcagaacccgctccacccaggccagcagcatccgatcggcgggggtctgccgccggagcgccgcccgcaggcggagcagcgccgggtagacctcggaccgccgcagctccgccgcatcccgcttccagatccgacgctcttccgcttcatccatcgtgctcacctcctgtttagaatatctgataatcagataaaatgcaatatctgaatttcagatattttaagatgctctgggtgattctatgcgaaatgaagtgctgcggtatgagcgcatccgcaatctgcgcattgaccgcaacctgtcccagcgggaggtggcagcgctgctgaacgtcagacagaatacgtactcccagtacgagatcggggtgctcaactaccccattgacgtgttgatcaggctggcatgctattacaacaccagcgtggactacctgttaggcctcacggacgagcggacgccctatcccagggcaaaaaaccgggatttttgaaaatttcccgttgcattccgctaacgatgggggtataatgacaccaacctgttaaagtgaggagcacagacatggcagaccgaaccctcacaactgcatccttcctgttttcctatggctgggctcgatttatgggcgccggcttttttggcgtggagaaaacacgggggatggaatgaatgggtggggcccggggaaggccccatagtacctgaacgtgcaggggcgctcattgatttcatcaatgggcgccctttttgcatggagagaaaggatgtaaaatcatggtagttgttatgaaacccggcacccggcagcaggacatcgacgccttggtatccaggcttaaggaactggatctggatgtgggcatcaccaacggcgtgggctgcaccatcctgggcctggtgggcgacaccaccgccgtggacatggataagatctccatcaacccccatgtggagcgggtcatgcgggtgcaggagccctacaagaaggccaaccgcaagttccacccggaggacacggtggtctccgtggggaacgccaagatcggcgggggaaatttctccgtgatcgccggcccctgctcggtggagagcgaggcgcagatctgcgccgtggccgaggacgtgaaggcctccggcgcggccctgctccggggcggcgcgttcaagccccgcacctccccctactccttccagggcatgggcaccgcgggcctcgacctgctgatggaggcccggaagcagaccggcctgcccatcgtcaccgagatcatggacccccgtatggccgagctcttcgagcgggaggtggacgtggtgcaggtgggcgcccgcaacatgcagaacttcgagctgctcaaggaggtgggcaagatgagcaagccgatcctcctcaagcggggcctgtccaacacctacgaggagtggatcatgtccgccgagtatatcatgtccgccggaaacgagaacgtgatcctctgcgagcggggggtgcgcaccttcgagacctacacccgcaacactctggatgtgtccgccatccccgccattaagcagatgagccacctgcccgtgattgtggacccctcccacgccgccggcatgtactggatggtggagcccctggccctggccgccgtggccgccggcgccgacggcctcatcatcgaggtccacaacgacccggcccacgccaaatgcgacggccagcagtccctcaccccccagaacttcgatgccctcatgcacaaggtctctgccatggttgacctgatggggaaaacgctggtaaaataaaaaagaagcgcggagcgcccgggagcagggcaacagcgaactgcgcagaccgaaaaacaggctggccgcaggccagcggcatgttcggcggagcagtgagcagttgcccgtcgcggagggcgcgtagcgtgacagagaagcgcgtagggtaggcgcataggggagctaagaggacatggaggcgaaaccgcagcgtgagcaaacgtgccggtggcacgtttgtagcggaggccgcagcggctatgccgcgaggaggaaccccggatgaacgctgcccgccgcggagggggcgcagcgtgacagcgtcggcccaagctttggatcattcgcttccgggcaggcccgaaagctcattcccgccgctgggcctccttttccccacgcgaaccgcttcgctgggttcgtgtaggggccccgaaagcggggcgtacgccgcaccagtatgtaggggcggtgcttgtccccgcccgcgggcgaccacgagggccgcccctacggtgagggtggaggatagttggcgtgggccgatgagggcagaaggtgaattgccccacaggggcaagagaggccgccctggggtgtcggcccctgcgttggggcaacctgcggagctgtcacgtaggggcgggtgcccacacccgcccgacggataccgtcgattttgaacagaggaggccgtaccatgaaaacgctgaccgtcgcccttccggggcgggaatataacatacagattgggtgggggctgctcacccgggcgggggaggagcttcgggccgtcctgcccggggcctcccggatttttgtggtgacagacagccatgtggtccccctgtacctggagcgggtgcgcgccagcctggagggggccgggttccgggtgaccgcccacaccgtccccgccggggagggctccaaatgccccgcccgtctggccgagctgtgggaggccatgatggacgccgggctgacccgcaccgacgcggtggcggccctgggcggcggcgtggtgggagatctggcggggttcgccgccgccaccatcctgcggggcgtggacttcgtgcagattcccaccactctgctggcccaggtggattcctccgtagggggcaaggtggccgtggatctggagcacggaaagaatctggcgggggccttctggcagcccaggctggtgctcatggacccggaggtgctggacactctgccgctgcctgtcttcatggagggcatggcggaggtggtcaaatacggctgcatcaaggacgcggcctttttcgacttcctggcggcccggccctcccgggcggagctgatggcggaaatggaacacatcctgtatacctgctgcgcgattaaacggagcgtagtggaacaggacgagcgggacacgggggagcggatgctcctcaacttcggccacacgctgggccacgcctacgagctggcggggcactacaccgagtggagccacggcgcggcggtggccgccggcatgtgcgccgccgcccggctgggcgtacgcctgggggtgacaccggcggagctgccggagcgcctggaggaggcgctctccgccctggggctgcccaccgccatcccctgcacggcggaggactacgccgccgccgtgggactggataagaagggggcgggggaggacatttcggtgatcctcctggagcgcatgggccgcgccgtcccccaccggatgcccaagtcccgactgctggaggaactgcgatgaacgtcaccatcacccccgccgccctgggcggcgccgtcaccccgccgccctccaagtcccaggcccaccggctgatcatcgccgccgccctgtccgacggggtgtgccgcctgtccaatgtggagctgtcccaggacatccaggccaccctgcgatgtatgcgcaccctggacgcggacgcctccgccgacggcacggtaatccgcggggccgacctggtggacggctttgagacgcccccgccggagatcatggactgcggcgagtcgggctccactttgaggtttttgatccccgtggccctggccctcaaggggggcggccggttcaccggccacgggcggctcatggagcggccccaggagccctatttccgcctctttacggagaaaggaattgcgtggtcgctggaaaacggggtgctcgccgtggaggggcggctgacgcccggcgtctacgccctgcccggcgacgtgtcctcccagtttatcaccggcctgctctacgccctcccactgctggagggggacagcgagcttgtcctcaccaccgcgctggagagccggggctatgtggacatgaccctggacgccctggcccaattcggcgtctcggcggagtacgacggggaccggcgcttccgggtgccggggaaccaggcgtaccgccaccgggatctggccatcgagggggactggtccaacgccgccttctggtttgccgccgcgttcctgggccaccgggtggacgtggaggggctgaacccccgctccgtccagggcgaccgggtgatcggggggcagcttgcccgcctgacccagcccggcccggcggagctggacgtgtcccagtgccccgatctggtgccccctctggcggccatggccgccctgcgggcgggggagacgaccgccatcgtcaacgccgcccgcctgcgcatcaaggagagcgaccggctggcctctgtgacgcaggtgctcaacgccctgggggccggtgtggaggagcacgccgaccacctggtgctccggggcagggagcggctggcggggggcgtcactgtctccggccacaacgaccaccgcatcgccatgatggccgccattgcggccacccgctgtcaggggccggtgaccatcaccggcgcggagtgcgtgaacaagtcctatccccgcttctgggcagactacgaggccctgggcggtcagatcgcccggacgtaggaggggcgggcggccacggagccgtttttacacgaatggtgtaggggcggggcttgtccccgcccgcgggcggccacaagggccgcccctacacaaaagcgcaaagcatccggccgcgttcgtatgaataccgtaggggcgagtgcccacacccgcccggaggccggggcctcccggcacaaaacctgagaaagcaaaggaagggaacccacatgcgacacatgattttcggtgagtcccacggcccggccatcggcgtggtgctggagggcgtacccgccggcctggagctggatctggaggccgttcagcgggagctggaccggcggaagcccggccaggaccccaccgccaccgcccgccgggagagcgacacggtgcaggtgctctccggcgtattcgagggcaagaccaccggcgcgccgctggccatgctcattcccaacgccgaccagcactcccaggactatgaggccatccgctacaccccccggcccggccatggagactatgccggcttcgtcaagagccaggggtgccaggactaccggggcggcgggcacttctccggccgcctcaccgcccccctggtggccgccggtgcggtggcccggcagctcctggccctacggggcgtgcgggtgggcgcccatatcagctccatctacggcatcaccgacgcctccctggaggacgccggcgcattggaggccgtggcggccaagcccttccccgtgctggacgacgccaagggggaggagatgcgccaggccattctggaggccaaaaatgagcaggacagcgtgggcggcgccattgagtgcgccgtgttcggcctgcccgccgggctgggggcccccgacttcggccgcaacgtggagggtatcttcgcccagcacctctttgccgtccccgccgtcaagggcgtggacttcggtgcgggggtggccttttccctcatgcggggcagcgaggccaacgaccccttcgaggtgaaggacggaagggtggtcaccaagaccaatcacgccggcggcgtcaacgggggcatcaccaacggcatgcccgtcacctttgaggtcaccatccggcccaccccctctatcgctctgccccaggagagcgtggacctccgcaccggggaggagacggagatcgagatcaagggccgtcacgacccctgcatcgtcccccgcgccgtgcccgtaatcgaggcggcggcagcattggcggcgtgcgaggtgctggggatttagggccgccgcctcgcgcgagcgggagcgagccgccgcggaagcggcgtccaagcgttttgccgggggcaaaaccttgccgaaggcgggattcactcccgccgaggagaataaaatgtggggtccccggagcgcgcgcagtgcgctctggggtgcggcggcagcgttggcggcgtgcgaggtgctgggaatttagggccgccgcctcgcgcgagcgggagcgagccgccgcggaagcggcgtccaagcgttttgccggaggcaaaaccttgccgaaggcgggattcactcccgccgaggaagataaactgtggggttcccggagcgcgcgcagtgcgctctggggtgcggcggcggcgctggcggcgtgcgaggtgctgggaatttagggccgcctcgcgcgatggcgcagaggcggggcagcggagcgtgcggccaggtttaaatgtaggggcgggtgcccacacccgcccgaaaggaagcgcccggccgccgcctcgaggagacaaaggagagagggaacatgaccgaattggagcaataccgccaagagatcgaccgcatcgacggggagctggtgcagctctttctggagcggatggcggtcaccggcaaggtgggggagtacaagcagcgggcgggtatcccggtgctggacgccgggcgggagaagcaggtgatcgccgccaagacggccctcaccgacgatccggcccgcaaggcggacgtggcggccctctacgaggagatcatggccatttcccgccgccagcagcgcaagctggtgcgggagggggcggaggagccgggctatgcggcctatgcggcggccctggccgcccggcgggagccggtggccgccccccgggtggtctaccagggggagcctgggtgctacagcgaggaggccgccgtgggcttcttcggcccggaggtgtccagccgggggctggcctggttccccgacgtgttcgccgccctggagcggggggaggccgactacgcggtgctcccggtggagaactcctccaccggctccatccggcaggtctacgatctgctggcccagtacaactactacgtggtgggggagtgccaggtgaaggtggagcactgcctgatggccctgcccggcgtggcgctggaggacatccagacggtctactcccacgagcaggggctgatgcagtgcgagaggtatctggacgcccaccggggctggcggcgggtgcccaccttggacaccgccggctcggccaagcaggtggccgggagcggcgaccgcgccgccgccgccatctgctcccgacgggccgccgagatctacgggctgcatattctggccgagggggtcaactataacgccatgaaccacacccggttcgtggtggtgtccccggtgctggagctgcggcccggccgcaacaagatcagcaccgtgttccgcctgccccaccagagcggctccctccacgagatcctcaccgtgttcgccgtccaggggctcaacctgctgaaaatcgagtcccggcccattcccggccggggctgggaatacctgttcttcctggactttaccggcgatctcgccgccccggagatggacggcgtgctccacgagctggggcagctggccgccgagttccgtatcctggggaacttccgggggtatgagccgtgaacaatctcatcctcatcggcatgatgggctgcggcaagtccacggtggggcggctggcggcggagaggctgggcctggccttcgcggacaccgacgagcgcatcgagcgggcgtccggccgcaccatcccggagattttcgcgtcggagggggaggagggcttccgggcccgtgagctggacgtgagccgggcgctggcccgggagggagggctggtcatcgcctgcggcggcggcctgcccacccgggcggaggccattgccgccctcaaagccagcggcgtggtcttctggctcagccgggagccggccgtgatctacgacacagtgtccatggcgcgccgccctctgggccaggggggaaaagaggcgtttctggagcggtttcgccagcgggagcccatctaccgccggtgggcggactacatcatcgagggccatacccaggccgccgaggcggccgggcgcatcgcgaccctttatgaaagggagtgtcaggcgtgaagtttctgattatcaacggccccaacctgaacctgctggggaagcgggagccgggcatctacggggagaacagctatgagagcctgtgccggcggctgaaggagttcgccgccgcccacgcctccacggcggagtgcttccagtccaaccacgagggggccattctcgacgccatccacgccgccgacggcgtgtacgacgccatcgtgctgaaccccggggcgtacacccactactcctacgccatcctggacgccctcaaggcggtggatgtgccctgcattgaggtgcacatatccaacgtccaccagcgggaggagttccggcacaggagcgtcaccgcacctgcctgcgtgggccagatctgcggcctgggcctgtacggctacgaggcggccatgtcctactttctctggaacgagaaggaaagcagagagaactcccatggctgactgggagacaagagtcgtccgctctgacggctgccggatcgcctacgactgccggcagggggaggggccggaggtggtgctcctccacggctacgggctggaccgcaccatgtgggcgccccagctcgctgccctggaggggtggacggtgctcaatctcgacatacggggccacggggactcccggccctgcgccgacttctccatccctcaggccgccgaggatctccgggccgtgctggtaaaggagcgctgccgcgccccggtgctggtggggctgtccatgggcggctatgtcgtccaggagtacgcctggcagttcggcggctgcgccggatacctggtggccggagctacccctattctgttggactgctatagcggctgggagcgggcgggcctgcgggcctccacccccttgctgggggtgtggccgtggaggtgtctcaaaagcgccatggccatggcctgctcttctacagaggaggggcgggcggcggtacgccgcatgttcgaccagctcacccggcgggagtttctccggggctggcggggaatcgctcaatgcctccaccccgagaaacacttctccttcgacgcgcccctgctggtgtgccggggcgagcgggacaggaccggcaccatcgcccggcacatggaggactggaagcgggcctggccggagacggagacggcggtgctccccggcgcggcccatgtggtcaatctggacgcgcccgaggcgttcaaccgcctgctgctggactttttgacccgctgcggcggatcgaggagggggagaagatgaaaagcgtgcccctgccgcgcatcggtatgcgggtggtcaagaccgccgtggcggtcatgctgtcctataccattttcgtgcccttcggcctcatctataacgaggcgctggggggcgtgtggggccagctcggccccctctatgcctgcatcgcctgcatcatctgcacccagtccacccttggccagaccatccagcagggcctctcccgcctcatcggcgtggcggtgggcggagccctgggtaccgccaccctgctgctgggcgccgccctggacgatccctgggtacgcatacccgccctgggggcggtgtgcgtggcgggggtgtggatctgcctgctgctcaagcggcccaccgcctgcggcatggcgtgcatcctgccctgcgtcattctcatcaccggcgtcaccggcgtgacccggtactactatgccgccgcccgcatcattgagacggtggtgggcctgcttatcgctttgggggtgaacgccgccctccccgatctgcggcccgaacccaaaaaggaggccccgcacatgcaggtggaagtgaaaaacagcacgaaaaagctctgcgtcatcggcgagccggtgctccactccaagtccccgctgattcagaacaccatgctggccgccctggggctggactacgtctacctctgccagccggtgccccgggggagatgccgggagtggctggaatgcgccaaatttgccggctatgccgggttcaacgccaccatgccccacaaggaggagctggtggagttgatggacgagctggacggggatgcccgcctcttcggcgcggtgaacaccgtctgtatccgggacggccgggcctatggctacaacaccgacggggcgggctttctccgcgccctgaacgacgagggcatcgaccctgccgggaagcgggtgctggtgctgggggccgggggggcggccaaggcggtgtgcctcaagctggcccaggccggggcggaggtggtagtgtgcaaccgcaccgcggacaaggccgccgccctctgcgcccacgagccggcccgcctgcgccccgccggcttcgacccggataccctgcggcgggaggcggcggagtgcgggctgctggtcaactgcacctccctgggtatggagggggcggcagggcagtttgaggagttctccttcctggacgtcctgcccgccggggcaccggtggtggatctcatctacgccccggcggagactgagctgctccgccgggccagggagggggggcaccagaccgccaacggcttcggactgctggtcaaccaggcggtgctctccctggagcacttcaccggcacggccatcgacgccgcggagatgaagcggcggctggcggacgtgctgctgccgtaaggcgcgccccggcgacccggttgacagaggccgccggggtgtggtatgctgtgcagcggtaaaaaatgccgtatgatgaaagaggtgtgattgcatgcgcaaagccgcggtgctgtttctggtgggactgagccccttcctgctgggatggctgctcagtctggggatgacgacaatttttgcccagatgggcgcctggttctacatcgtggtaggtctggccgtgctgacgctgtggatggtggtctccggcacgtttggcttcaagggctccaagaggggcatggcgctcaccatgctgtgcatcaaccttccagcgctggtggtgctggtgctgctgggggtgcaggagctgtcccttcacgcctactgggacaacgcagtgggcctgctgacccagttcttctatctgccccttctgcgcctgggcgctattgtggccatgtggaccggacaggtgttctggttctatttcggcgcattcctgctgctggtgctgtcctcctggctgggctgccgggccaaggacccagtgaagaaataaattttacgaaaaccggaaaaatctattgacaggacgggatttttcaggtattataacagagcgcctgtaaaggggcgcagtctgcgatgatgcgggagattgcggcgcgagccggtaacttccgcggagtatgtccgagctagaatcgggcggctgaggagtccgtgcacggcgtatatcgccgcgcagggagtaaaccggcctgcttgtgccggttttcttcatgtcacggagtgatacgcacggaaacgtgtactgaagatttctcaccgtacgaagcgtgctcaacccaccacttcgtatgtttttaaggaggaaccacaatggcagctcagaaagaaatgatccgcattcgcctgaaggcctacgatcaccagctcatcgaccagagcgctgagaagatcgtggagaccgccaagcgcaccggcgcgtccgtgtccggccccatccccctgcccaccaagaaggaggtcgtgaccatcctgcgcgccgtccataagtacaaggattcccgcgagcagttcgagcgccgcacccataagcgcctcatcgacatcctcaagccctcccccaagaccgtggaggccctgatgtccctggagctccccgccggcgtcgagatcgagatcaagctgtaacgaagcgcggagaagccgggagcaggcacgcagtgaatcgcgcaggtgaaaaaacaggcgacgccaaaggcggagcggcatttttcacggagcgatgaacagcgtgacgttgcgaaggcttcgcagcgtgacacagccatctcagacaattacctttgtgtacccgcagtccgccgcgcttttgaggcggacgggtcaagttggcacgaagcgcctgagccgtcgtgagcagcggcacagcggccgcgcagatgaaaaaacaggcgacgccaaaggcggagcggtatttttcacggagcggcaagcagtgacgcgttgcgaacaggcgaggcgtgacagcgtcaaccaataaccttattaaggaggaactatcatggaaaaggccattatcggcaagaagatcggcatgacgcagatctttgacgccgacggcaaggtcatcccggtcaccgttattgaggctggcccctgcaccgtggtgcagaagaagaccgaggagaaggacggctacaacgccgttcagctcggctacggcgacgtggcggagcgcaagctcaccaagcctgagctgggccacctgaagaaggccggcgacgcccgcaagaagaccctgaaggagttcaagctggccaaggccgccgagatgaacgtgggcgacgaggtgaaggtggacgtgttcgccgagggcgaccgcgtggacgtgaccggcatcagcaagggccacggctaccagggcgtcatcaagcgccacggcgctcaccgtctgaaggagacccacggctccggtcctgtggtccgccacgccggctccatgggcgccaacagcgatccttcccgcatcttcaagggcaagatcggcgccggccagatgggcaacgagcaggtcaccgtcctcaatctggacgtggtgaaggtggacgccgagctgggcatcctcgccgtccgcggcgcgattcccggccccaagggcggcatcgtgtatctgcgcaactccgtgatcaacgtcaaggagaagggcgccgccgctggtatctccagcaacccgcagaaggcttccgcccgcgtcaatccccagaaggcttccgcccgtaacaagtaagaaaggagagaaaccaaatgcctaaggcaattcttgtgaacatggccggcacgcaggtcggcgaggtggagctctccgaagctgtgttcgggatcgagcccaaccagaccgtcgtccacgaggtggtcaagaaccacctggccaactgccggcagggcacccagagcgccctgacccgcgccgaggtctccggcggcggcattaagccctggcgccagaagggcaccggccgcgcccgtcagggcagcacccgcgccccccagtggacccacggcggcatcgtgttcgcccccaagccccgcgactacagctacgtgctgaataagaaggtcaagcgcctggccctcaagtccgccctctccgccaaggccgcctccggcgacatcgtcgtcgtggacagcctgaacctggacgaggtcaagaccaaggccatgaagggcttcctggataccgtcggcgccaagaaggccgtcgtcgtcacccccgaggtgaacgagaccgtcatcaagtccgcccggaacatccccggcgtggtcaccaccaccgccaagatcctgagcgtttacgacatcgtgaacgccggcaagtttatcgttgacaaggcggccctggccgtcatcgaggaggtgtttgcgtaatggctaccaccgcttatgatatcatcaagcgccccatcatcaccgagcagtccatggcggagaccgaggccaagaagtacaccttcgaggttgccaagagcgcgaacaagatcgagatcgcgaaggccgtcgaggagatcttcggcgtgaaggtcgccaaggtcaacaccctgaacatgcagggcaaggagaagcgcaccggtcggttcccggctggccgccgtccctcctggaagaaggccatggtcaccctgaccgaggattccaagaccatcgagttcttcgaaggcatggtgtaaggaggataacgaacaatggctatcaagacttataagcccacgacgccctcccgccgccacatgaccgtgagcgccttcgagggcatcgacaagaaggccaagcccgagcgcagcctgaccgagaatctcaagaagaacgccggccgcaacagctacggccgtatcaccgtccgccaccgcggcggcggcaacaagaagaagtaccgcatcatcgacttcaagcgggacaagaacggcaccgctaccgtcatcaacctgcagtacgatcccaaccgctccgccaacatcgccctgatccagtacgaggacggcgagaagcgctatatcctggctcccgtgaacctgaaggccggccacaagatcatgaccggccccgacgccgacatcctgcccggcaactgcctgcccatcgccaacatccccgtgggcgagatgatccactgcatcgagctgtaccccggcaagggcgcccagctcgtccgcgccgccggcgacgccgcccagctgatggccaaggagaacggcatggctcaggtgcgtctgccctccggcgaggttcgctacgtccgcgaggagtgcaaggccaccatcggccaggtgggcaacaccgactgggccaacatccagatcggcaaggccggccgtaagcgccacatgggctggcggcccaccgtccgcggttccgtcatgaacccctgtgaccacccccacggcggcggcgagggcaagagcccggtcggccgtcccggcccggtcactccttggggcaagccggctatgggctacaagacccgcaagctgaagaaccgcaccgagaagttcatcgtcaagcaccgcaacgcgaagtaagggaggcagtaaaagatgagcagaagtatcaagaaaggccccttttgcgcccccgagctgctgaagcgggtcgacgaaatgaatcagaccggcgagaagaaggtcctgaagacctggagccgcgcctccaccatcttcccctccttcgtcggacacacctttgccgtgcacgacggccgcaagcacgtgcccgtctacgtgaccgaggacatggtgggccacaagctgggcgagttcgcccccacccgcaccttccgcggccacgccggcagcaagactggtaagtaaggaggaggagagaaacatggaagcgaaagcacatctgagatatgcccgtatctctccccgtaaggtccagatcgtctgcgacctgatccgcggcaagagcgtggcccaggccaacgccatcctcatgggcacccccaaggctgcctccgagctgctgctgaagctcctcaagagcgccgcgtccaacgcggagaacaaccaccagatggaccccgagaagctgtatgtttcccaggtgttcgcctgccccggccccatcatcaagcggatgatgccccgggcccagggccgcgcctatcgcatcaacaagcgcacttctcacatcaccatcgcggtggctgagcgctaagggaggaggaagaatatgggacagaaagtgaatccccacggcctgcgcgtgggtgtcattaaggattgggactcccgctggtacgcccgcaacgagaaggtcggcgacctgctggtggaggacaagaagatccgggactacctgaagaagaccctgtattccgccggtatccccaagatcgagatcgagcgcgacaatgccaaggttcgcatctacctgcactgcgcccgccccggcgtcgtcatcggcaagggcggcgagcagatcgagcagtaccgcctgaccgttgagaagatgatcggcaagcccgtcgccctcaacatcgtggaggtcaagcaggtcgacaccaacgcccagctggtggctgagaacatcgcccagcagctggagaagcgcatcggcttccgccgcgccatgaagaacgccatgggccgcgccatgcgcatgggcgcccgcggcatcaagactcaggtgtccggccgtctgggcggcgctgagatcgcccgcaccgagcactatcacgacggtaccattcccctgcagaccctgcgcgccgacatcgactacggcttcgcggaggctgccaccacctacggccgcatcggagtgaaggtgtggatctacaagggcgaggtgctgacccagaccctgcgcaccaccccccgtaccctggacaccaagaacttcaaggagcgctccgaccgcccccgccgcgaccggcgtgacggcgaccgcaagggcggcttcaaccgcaacggcggctttaaccgcaacggcggccgtccccagggtggcttcaacaacaaccgtcctcagggcggtgcccgtccccagggcggcgcccgtcccgctgctcccaaggaaggaggctccaactaatgctgctgcctaagagagtgaaataccgccgcgtgcaccgcggccgcctgaagggcaaggccatgcgcggcaacaccgtgacctacggtgatttcggcctgcaggccaccgagccctgctggatcaccagcaaccagatcgaggccgcccgtatcgccatgacccgttacaccaagcgtggcggtaaggtctggatcaagatcttccccgacaagcccatcaccgagaagcccgccgagacccgcatgggttccggtaagggctcccccgagtactgggtggccgtggtcaagcccggccgtgtcatgtttgagatcgccggcgtttccgaggagactgcccgcgaggccctgcgtctggcctcccacaagttgcctgtcaagtgcaagatcgtggcgaagcagaccgccgagaccgagaatggtggtgaatgaagatgaaggctactgaaatccgcaagatgagcgccgctgagctggagagcaagctgggcgacctgaagaaggatctcttccagctccgtcttcagcatgccaccaaccagctcgacaaccccgtgaagattgctgaggtcaagcgcgacatcgcccgcgtgaagaccatcatccgtgagcagcagctcgcaggccgataagaaggaggaacgagatcatggagaacagaacttcttcccgcaagaccagagtcggcctggtggtttccgataagatggacaagaccgtggtggtggccattgccgaccgtgtggctcaccccctgtataagaagatcgtcaagagcacctataagctgaaggcgcacgacgagaagaacgagtgtggcatcggcgaccgcgtgcgggtcatggagacccggcccctgtccaaggacaagcgctggcgcgtcgtcgagatcatcgagaaggcgaagtaaggaggtgccggaatgattcagcaggaaagctatctgaaggtcgccgacaacaccggcgccaaggagatcaagaccatccgcgtgctgggcggctccagccgcaagttcggcaacatcggcgacgtggtcgtcgcttccgtccgcaaggcacagcctggcggaaccgtgaagaagggcgaggtcgtcaaggccgtcatcgtccgctccgtcaagggcgtgcgccgctctgacggcagctatgtccgcttcgacgagaacgccgccgtcctgatcaaggacgacaagaatccccgcggtacccgtatctttgggcccgtggcccgtgagctgcgcgacaaggattacatgaagatcctgtccctggctcccgaagtgctgtaagggggtaggagaagacatgaataagatgagcattcgtaaggacgacctggttgtcgtcctgtccggcaaggacaagggcaagcagggcaaggtcctggaggtcatgcccaagtccggcaaggtggtcgtggagaagatcaacgtcgtctcccgccacaccaagccccgcaagcagggcgagcagggcggcatcatcaagaaggaagcccccatctatgcctgcaaggtgcagcgcgtctgccccaagtgcaacaagcccacccgccccgcccacaagctgctggagggcggcaagaaggtccgcgtctgcaagaagtgcggcgccgagatctgagagaggaggagtgaacaataatggctgataagaaagtgcccaacctgaaggcgaagtaccaggccgaggtcgctcctgctctgatgcagaagtttggctacaagtccgtcatgcagattcccaagatcgacaagatcgtggtcaactgcggctgcggcgaggcccgtgacaactccaaggttctggaggccgttgtgggcgatctgaccaagatcaccggccagaaggccatcatcaccaaggccaagaagtccgtggctaactttaagctgcgtgagggcatgcccatcggcgcgaaggtcaccctgcgcggcgaccgcatgtgggagttcctggaccgcctgttcaacgtggccctgccccgtgtccgcgacttccgcggcatcaaccccaacgcctttgacggccgcggcaactacggcctgggcatcaaggagcagctgatcttccccgagatcgagtacgacaagatcgataagatccgcggcctggacgtggttatctgcaccaccgccaagaccgacgaagaggccaaggagctcctgtccctgatcggcgctcccttcgcccgctaaaggaggagaacgaaatggctaagaagtctatgatcctgaagcagcaggcggagcccaagttctccacccgccgctacaaccgctgcaagatctgcggccgtccccacgcctacctgcgggactacggcatctgccgtatctgcttccgcgagctggcttacaagggtcagattcccggtgtcaagaaggcgagctggtaaagccagcccgcctcttggccggtaatttgaataaatcccccgccggcgagcaataggtcgcagttgcctagctgcgataccttgccgctgatacgggccctgcccgtaactctgataggaggtaaacatcatgcacatcactgatcccattgcggatatgctcacccgcatccgcaacgcgaacaacgccaagcatgacaccgtggacgtccccgcgtccaacatgaagaagtccatcgcgcagatcctgctggatgagggctatatcaagaacttccagctcatcgacgatggtacccagggcgtcatccgcgtcaccctgaagtacaatcccggcaaggagaaggtcatcaccggcctgcgccgtgtctccaagcccggcctgcgtgtctatgccggtgctgacgagctgccccgggttctgcatggcctgggcattgccattgtgtccacgtccaagggcgtcatgactgacaaggccgcccgcgcggcccatgtcggcggcgaggtcctggcgtttgtctggtaaggagggagagtagaatatgtctcgtatcggaagaatgccgatctccatccccgccggtgtggacgtgaagatcgaagccggtaacctggttaccgtaaagggtcccaagggtaccctgacgcagcagctgcatcccgccatgaccatcacccaggagggcgatgtgatccatgtgacccgtcccaacgacgagaaggccaaccgcagcctgcacggcctgacccgcaccctgctgcacaacatgatcgtgggcgtcaccgagggcttcaagaaggagctggacgtcaacggcgtgggctaccgtgtggccaaggagggcaacaagctggtcatgaacctgggcttctcccatcaggtcaccgtcgaggagatcgagggcatcaccatcgaggtgcccagcgccaacaagatcgtcatcagcggcaccgataagcagaaggtcggccagttcgccgccgaagtgagagagaagcgtccgcctgagccgtacaagggcaagggcatcaaatacactgacgaggtcatccgccgcaaggaaggcaagaccggcgtcaagaagaaataaggaggtgtgccactatgatcaacagacccgataccaacgctcagcggcttaagcgccacaagagagtgcgcggcaagatttccggcacgcccgagcgtccccgcctgaacgtgttccgcagcaacaccaacatctatgcccaggtcatcgacgacgtgaccggcaagaccctggtgtctgcttcctccctggagaagggcttcgagggcaagggctccgactgtgaggccgccaagaaggtgggcctggctgtcgccgagcgcgccaaggccgccggcatcgagaccgtcgtgtttgaccgcggcggctacgtgtaccacggccgcgtgcaggccctggccgagggcgcccgtgagggcggcctgcagttctaagggaggaggaaaacgataaatggctagatttgagagagaacccagcgagtttaccgagaagctcgttgccctgaaccgcgtgtccaagaccgtgaagggcggccgcatcttcaagttcgccgcgctgatggtcgtgggcgacgagaagggccgcgtgggcttcggtctgggcaaggccgctgaggtgcccgaggccatccgcaagggcatcgaggacgccaagaagaatatgtgcaccgtgactctgtccggcactaccattccccatgaggtcatcggtgaattcggcgccggccgcgtgctgctcaagcccgccgcccccggtaccggcatcatcgccggcggccccgtccgcgccgtcatggaggccgccggcatccgtgacatccgcgccaagtgcctgcgctccaacaacccgcagaacgtggtctccgccacctttgagggcctgaagtccctccgtggccccgaggaggtcgcccgcatccgcggtaagagcgtcagcgagatcgtaggttaaggagggccgtgaacatggctaatctgaacatcaagctggtcaagagcctgaacggccgtatcgccaagcacaaggcgaccgccgaggccctgggcctgcgcaagatcggcgacaccaccgtgcagcccgacaacgaggcgacccgcggcaagattgcgaacatcggctacctgctccaggtcaccgaggaacagtaaggaggtgcgcgaaatgaatctgcatgaactttcccccgctcccggttccaaccccaaggcctatcggaagggccgcggtcacggctccggcaacggcaagacggccggccgcggccagaagggccagtgggcccgctccggcggcggcgtgcgcgtgggctttgagggcggccagatgcctctgacccgccgcatccccaagcgcggcttccacaatatctttgccaaacccctggaggcgatcaacgtctccgccctcgagaagtttgaggatggcgctacggtcaatgtgtgcgacctgctggagaagggcatcctctccaagtgcgagtacggctacaaggtgctgggcaacggcaccctgaccaagaagctgacggtccgtgcctccgccttctccgcctccgccaaggagaagattgttgcggcaggtggaaagtacgaggtggtctaagtgatcgagaccatccgtaacgcctggaaaattcccgagctgcggaagaagatcctcttcaccgtgtttgccctgctgatcttccggctgggctccgtggttcctgtcccctttattgatagcaatatgctgggcgccaccctcaacaacatgggcggcatcttcaccctgctgggcgccatgaacggcaccgccttctccatggcggccgtctttgccctgggcgtgcagccgtatatcaacagttctattatcatccagctcctcaccgttgccatccctgccctggagcggctccagaaggagggcggcgaggagggccggaagaagattgcggccattacccgctatgtcaccgtggccatcggcctgctgcagggcttcggctactacaccctgatccgcacccagggcggcggaacgatgctggacaccgccggcctgcctggctggtgggcgggtatcgtcatcgtactgtgcttcactgccggctccgcctttgtcatgtggctgggcgagcagatcaccgagttcggcatcggcaacggcatctccatcatcctgttcgcgggcatcctgtcccgcggccccagcatgatccgcaccatgtatcagggcgtccgcaacaatctggacggcgttaccggcgagggaatctttaatctgcccgtgtgggccatcccgctgattctcatcggcatgctggccatcgtggttctcattgtattcattcagaatgcggagcgccgcattcccgtccagtacgccaagcgcgttgtgggccggaagatgtacggcggccagtccagccacatccctctgaaggtgaacatgaccggcgttatgcccatcatctttgcccaggccatcgcctctctgcccgctaccatcgccgcgtttgccggcgtgagcaagaacgacccgggcttctggggcggcttcctgcgcgtctttgacaccaccagcattttctatatcgtggtgtatttcctgctcatcgtgggcttcagcttcttctactccacgatgcagttcaaccctgtggaggttgccaacaacctgaaaaagaacggcgggttcatccccggcttccgccccggcaagcccaccgccgactttatccacaaggtgctcaataagatcaccatgttcggtgcgctctacctggcgattatcgccatcgcgcccattgtcaccggcgcggtgatcggcgtcagcagcctggccatcggcggcacgtccatcatcatcgtggtcggcgtcgcgctggagaccaccaaggccctggaggcccaaatgctgatgcgccactacaagggcttcctggagtaaggggaatcaggatgaaaatcattcttttaggcgcacctggcgccggcaagggcacccagtcggagattatcagccgcaagctgggcatccccaccatctccaccggcaatatcctgcgcgcagccgtcaaggagggcactcccatcggcttgcaggccaagagctatatggacgcgggcaagctggttccggatgagatcatcatcggtatcatccaggagcggctggccgagcccgactgcgcaggcggcttcatcctggacggcgtaccccgtaccatcgctcaggccgaagccctggagcgccacggcatccgctttgacgcggtcctctccctggaggtggccgacagcgtcatcgaggcccgcatgacgggccgccggacctgccatgcctgcggagccacctaccacgtcgtcatggcgccccccaagcaggaggggctctgcgacaagtgcggcggtgtgctggagcagcgcaaagacgaccagcccgaaaccgtcaagcaccggctggaaatctaccacagtcaaaccgagccgctgaagggcttctacgaggagaagggcgtgcttaagcgcgtgcccgacctgggcggcatcgaggagacaaacaccaaaatcatggaattgctggggaagtgaacgagatggatatgatctctctcaaatctccccgcgaaatcgagtgcatgcgccgggccgggcggctgaccgcccaggcccgggcgctggccggctccatggtgcggcccggcgtgaccacccatgagatcgataccgccgtgcgcaagtttatcgagagccacggagccaagccctccttcctgggctacagcggtttccccggctccgcctgtatctcgatcaacgaggaagtcatccatggcatacccggtccccggaagctgaaggagggcgacatcgtcagcgtggacgtgggcgcctttctggacggcttccacggcgactgcgccgccaccttcgcctgcggacaggtgagcgacgaggccatgcatctgatccatgtgaccgaacagagcttctgggagggcatcaagctcgcccgctccggcaaccgggtctatgatatctcccacgcggtgcagcagtacgtggaagcaaacggctgctccgtcgtgcgggacttcgtgggccacggtgtgggggccaaactccacgagccgcctgaggtacccaactttggcccagcgggccatggcccccggctccagcccggtatgaccatcgccgtggagcccatggtgtgcgcgggtgactggcgggtgaaggtgctcagggacggctggaccaccgtgtccgccgatgggagcctgaccgcccactatgaaaacaccattctcatcaccgacggggagcctgaagtgcttacccgggtggaggattgagtatgggatgcgcgtgtgcgcagattgtccgctccctggccgggcatgacaggggagggctgttctgtgtcctggacaccgacggcccctacctgctgctctgcgacgggaagcggcggaagctggagaaccccaagcggaaaaaggcggttcataccgcccccgccggtgatttccagcaccctgtcctggatcagctccggacaggcgggaacctatccaaccgagacatacggagggcgctggccgctttccgagctgaggaactaaggagggtatgacgctttggcaaaggacgatatgatcgaagtggagggcgtcgtgaccgagtcccttcccaacaccacgttccatgtggacatcggaaacggccatattattctggcccacatctccggcaagctgcgcatgaacttcatccgcatcctgcccggcgataaagtgacggtccagatgtccccctatgacgtaacccggggccggatcacctggcggtccaagtaatctgtcaggctggccggaccgtcactggggccccgcagcgcggggcgcgcctctggcgcgaagggcggtggaattcacttccgacgcccgcagatggagtcggggtccccgcacggcgcctgcgccgggtggggcgtacggtccagatgtccccctatgacgtaacctggggccgattacctggagatccaagtaaccggctgatttaacgcggcgaaatggaattgcgccgcctccccctgggagaacccatcaatgaccggagcgggtaagcggggccttgcctccgccgttccggggccatcaaggcattcaaggaggtttatcatgaaagtaagaccgtccgtgaagcccatgtgcgagaagtgcaagatcattaagcgcaagggcaaggtcatggttatttgtgagaatcccaagcacaagcagagacaaggttaataggaggtgctgaaacagtatggcacgtattgctggcattgacttgccgaaggataagcgggtagagatcggcctgacctatatctacggcattgggcgcaccagcgccaacaagatcctggccgaggccggaatcaaccccgacacccgcgtgaaggatctgaccgaggaagatgaggccaagctgcgcgagatcatcggccacagctacactgtggagggcgacctccgccgtgacgtggcgatggacatcaagcgcctgaccgagatcggctgctaccgcggcatgcggcaccgcaagggcctgcccgtccgcggtcagcgctccaagaccaacgcgcgcacccgcaagggccccaagcgcaccgtcgccaacaagaagaagtaagggagggagaaacacatggctaccgctaccaagggtaagaaggttatccgcaagcgccgcgagcgcaagaacgttgagaagggccaggtgcatatccgttcctccttcaacaacaccatggtcaccgtgaccgatatgggcggcaacgccctgtcctgggcctcctccggcggcctgggcttccgcggttcccgtaagtccacccccttcgccgcgcagaccgccgccgagaccgccgccaaggccgccatggagcacggcctgaagaccgtcgaggtgtacgtgaagggccccggcgccggccgtgaggccgccatccgcgccctgcaggccgtgggcctggaggtcactctgatcaaggacgtgactcccatcccccacaacggctgccgtccgccgaagcgccgccgcgtgtaagagaaggaggaagaacaaatggcaaagaatatgcagcctatcgccaagcgctgccgtgcgctgggcatttctcctgccgccatgggctatgccaagaaggagagcaaccgcaatcccggcggccagatgagaaagaagaagagcgagtatgccctccaactgaccgagaagcagaaggtcaagttcgtctacggcatcatggagaagcagttccggatgtactatgagaaggccgcccgtatgcccggcaagaccggtgagaatctgctgaccttcgtggagcgccgtctggacaacgtggtgtaccgtctgggcttcgccatgacccgccgtgaggcccgtcagctggtgggccacggccacttcaccgtcaacggccagcgggtggatatcccctcctacctggtcaaggcgggcgacgtgattgaggtcaaggagtccagccgctcctccgtcaagttcaagcgcctgaccggtgaggacgcccccactgttctggtgcccaagtggctggagcgggacaagaacgcgctgaagggcaccgtggtgcagatgcccgcccgcgaggacatcgatctgcccgtcgaggagcacctgatcgtcgagctgtactccaagtaacactgcttgtaccctcgattattggtgagctgtatagggctgcgggccttgtgcccgcagccgcgaaaaggagggtaacacatggtagaaatcgagaagccccgcattgaatgtgtggagaaccccggcgacggttcctacggcaagtatgtggtggagcccctggagcgcggttacggcaccacgttgggtaactccctgcgccgcatcctgctctcgtccctgcccggtacggcggtcacgtccatcaagatcgcaggcgtgcagcatgagttctccaccatccccggcgtaaaggaggacgtgaccgagatcgtcctcaatgtaaagagcatcatcgcaaagctccactccgagggcgtaaagacggtctatattgaggccagcggcgagtgtgaggtcaccgccggcgacatcaaggccgacggcgaggtggaggtgctcaacccggagctgcacatcgccaccctgggtcccgacgccagcctcaacatggagctgaccctgtcccacggccgcggctatgtgcctgccgaccggaacaagccggcccagaccatcatcggcctgatcccggtggactccatctataccccggtgcgcaaggtcaactacacggtagagaacacccgtgtaggcgacgccaccgactacgacaagctgaccctggaggtgtggaccgacgggaccatcaccgcccgggacgcggtcagcctgggcgcccgcatcctctgtgatcacttcgtcctctttaccgatctctccgagaccatgggctccaagtccacggtggtggagaaggcggagacccagcgggacaaggtgctggagctgaccattgaggagctggatctgtctgtccgctccttcaactgcctcaagcgggccaacatcaacaccgtcgaggacttgatctccaagaccgaggacgagatgatgaaggtgcgcaacctgggccgcaagagcctggaagaggtcatcaacaagctggccatgatgggcctgcacctggccgacgaggaaaactgacggccggaagaaagggcggcccgggggcacgtaacgtcccctcccgggtccggccggctcccacggagcgccctttcgggggaatctccccacggacgaatttaagagtaggagttcgccttggcgaacatccgttaggagtggaatctcatgtctcacaaccgtaagctgggcaagcccacggatcagcgcatcgcgatgctgcgtgccatgaccacctatctgctggagaacggccagatcaagaccaccgtctcccgcgccaaggaagtggctcccatggccgagaagatgatcaccctggccaagaacgccaatctggccaactaccgcaaggccctgtcctacctgaccaaggaggatgtggccaagaagctgtttgacgagatcggccccaagtacgccacccgcaacggcggctacacccgcgtcgtgaagatcgggccccgccgcggcgactgcgccgagatggccatcgtccagctggtgtaatcacccgtaaaagagcatcaaaaacgcgcccagccgcaggctgggcgcgttttttcgcttatggggggcgggacaggaaaagtcaaccttccccttgcattttgcaggaagctgtgctatactacacactaataaaccaaaaaggagacggtgagccctcgtggacgaacctccgcctagttgcaagtacataatggaatcggtcagggacagccttacccgcgggggatagggttgtccctttgcgcgttgatttcaaaactgaaagagttggagttgaatattttcttatgttggacagtgccagtatcgccatgatcgtgggtcttgtgttctgtgttatcatgtcaggctatttctctgccacggagaccgcctttacctccctgaaccgggtgcggctcaagagctgggcagacggaggcgaccagcgggcggcccgtaccctggctctggcggaggactacgacaagctgctctccaccctgcttatcggcaataacatcgtcaacaacgtggccaccaccatcggcgcggtactctttatccacctgattgatgaggtgactggacctaccgtgtccgccattgtgctgaccgtggtgatcctgatcttcggcgaggtctcccccaagagcctggccaaggagtcccccgagcggtttgccatgtttgccaccccgctgctgggggtgctccgtacggtccttaccccgctgaacttcctgtttacccagtggaagcggctgctgtccaaggtgttccgcaaatcggcggacggcggcattaccgaggaggagctggtcactctggtggaccaggcggagagcgagggcggcctggaccagcatgagagcaagctcatccgggcggccatcgagttccacgacctggaggtggaggagatcctcacccccagggtggacatcgtggcggtggaggacaccgactccatggaggagatcgccaagatcttcgctgagaacgggtattcccgcctgccggtgtaccacgaggacatcgacaacatcatcggcgtcatccatgagaaggatttccacgcggcccgctaccgcggcctgaccagcgtaaaggagatgctgggccccatgctctataccaccggcaacaccaagatctccgagctgctgcgcatcctccagcgggagaaagcccacatggtcattgtggtggacgagtacggcggcaccgagggcctggtcaccctggaggatatcgtggaggagctagtgggcgagatctgggacgagcacgacgaggtcatcgaggagttcaagaagcaggaggacgacagctacctcatctcctgctccgccgatctgaccgacctctttgacctgttcaagataaagggggagtgcgactccaacaccatctccggctgggtgatggagcagatcggccgtgtgcctgaggagggcgaccgcttcgtctccgacggcctggacgtgacggtgaccaaggtggaccaccgccgggtgctggagattcgggtggaggtgctcccggaggagacggacaacaaaaaataactgaaacgcccccgcaggcagcgcctgcgggggcgtgaggctgtcgatagaccctccggccgaaggtttcggagggaaggatagtgtgaaagggaaccgtcagggttccctttcgcgtcaaatcaaacaactttttgaaacttttttgaagtttcaaaaagttcagcagcctgtcgaaaaggctttttcgacaggctgactcccccgcaggccatgcctgcgggggagttttttcagcctcgggtgctggcccagtaggccgccatgctctcgccgggctggccagtgacctcgtgggagaggtaggccgtcagtgcctccggcggcgtccaggccagggcggcggcctcggtgtcaaactccacctcggcgtagtagaagccgctctccagggcgggatcgacttggttgacctccagcgtgaggccgccggggagggaatagcggcgctgctccttctcaatcatggggccggacagcatggccttgaggcggaggtagcgcccctcgtccacgtccacctccacctcctcccgggccaggcccgcgccccccttgaagcagaggacgtaacgggtctccccgcccaggacggcctcccggcggatgcggatggcggggcggacggcaaagtagccctggtccatttgaaggacggaggagggggtcagggcgggccagccctccaccagccagcggcgttcaatttccatacagaaggcctcctcagaagggcagggtcacgatggcgggcaccagaaggggaaccgccagggacaacaccacgccggaggtaaaggagtaaatggtaatgcgctcgtgggtggcgcccaccaccacggggagcaccgtatccatggccgccgcaccgggcagggaggcgcactccacatagcccacgtatttggccacgatggggatggtgatgatggcgaagatctcccgcatcacgttggacaggaaggccacggcggacaccgacagggagtagggggccagcagggtgggggccagggagtaccagcccaggccggaggcggcggccatggagtccttcacccccagtgggaggacgaggccggccagggcggcgaaggccagggagcccgcgcacaccgccaccggcaccagcagcacctggaagccagcggtcttgatgtcggccagcagggtgccctgcttgcccatgtccatgcccaccatgaagaggagcaggtagaggccgaagctgatgaccgtgccgcagtgggcggtgacggcggcggggagcacgaagcggcccgccagcattcccagcaccacggcaatgacaatgatgaaggtgagggagttgtccgccttgccgccgtggtgggcctcctcctcccgggcggcctcgctgccccggggcaggccgtagtggtccagcttgagcacgaaccgccgcagcagggtgaggcacagcagggagccggccatggccagcaccgtgatcaccagggccgccaggccgatctggcccagggaggagaccacctcgtcgttggcgcccaggttgacgcccagggtgacaatgaggatcatgagggccgcgaactggagcttgcccacccacaccaggggacggctgcgcagagccttgcgggagcccagaaaggcacccaccaccaccaggccgatgtagattgccagattgctcagggtactgagggtagttcccattcccatccatcctttataggtttatgaaagaactgtatcctattttagcatggacaaaggggaaagtctaccccggagcctttgagctcagagatccctggatatttgcagagagagggccttaagcctgccgccccggtatctgcgccggagtgcggccgcgcagcactccagggacagtccatcgggaatggcgcggcgcaggagaagaacggggaggttgcccgtcccgtttcctgacagggtgagctcgaagccggggcaccggcacagcgcctcaccacacggggtaccggtcagacgtcggagttccagcgcgatctcctccagtccggctggagcagtgccatgtgcagaatgggactgaagctgtgcaccaagggccgggtcatagaggcgcaggctaatacagtcacgagcgaggagaagctgcggggaggtatccggtggtagaaaaccgtaaagggtgagcaggggagtcaccgatgcagcatagaggtctgcgtcctgttcggcccagtcggcggttcccgccggacggattagtcgatagagtggccagggggcgagcaggaaaatagggagaaggagccacgcttcaaagtgaatttcaactaagtaaaggataccaatggcaattgcagcaagggatacggcgatctccaccctgactcacctccggttccagctcaaatctaaaatggtatctatttgaaaacattatagtattctaaatgaaaatgtgcaagggggaatattatctttaagatacccttatagggagctgatagaagtgagcatagagaaaagagcgcttggggaggcggttcgactggcccgaatgaaaaaggccctgacccaggagcgtctggcagagatgctggatataacgcccatccaccttaaaaatatcgaggggtcccggcggattccatccgtcccgctgctgtttcggatgatggagctgctggacttctcggtagacgcgctggtattcccggagcgggagagtgctccggcgattcacaccgacgggctgacggagcgggaggcggaggcgctggcccggctggtggacgcgatgaaggcaaaggaatagcggcggcttgcgtggatgcgcgggccgccgctgtgtgttcttgagagattgggggtctatggaaaggtctgtccgcggaaagagacctggagagcgggaaagggagagggcccgcaagacaagaacagatacgccctgggcggcctatggccgcccagggcgtgtcaaaatcgggggaaaggtcagttctgctccagggccttggagtccacctcgtccctgagcttggcggcaaaggcgtcgaagctcatgacggtctgcccgccgtggcggttgcgcacggccacgccgccggtctcggcctccttgtcgcccaccaccagcatatagggcaccttctccaactgggcctggcggatcttgaagccgatcttctcgctgcggtggtcggtctccacccggtagcccagcgcgtccagcctggcggccacctggtcggcgtactccgccgcccggtcggtgatggggagcaccttgacctgcaccggggccagccaggtggggaaggcgccggcgaagtgctcggtgatgacgccgatgaaccgctcgatggagcccagcaccacccggtggatcatgatggggcggtgcttctcgttgtccgcgcccacgtactccagctcaaagcgctcagggagctgggagtcgagctggatggtgccgcactgccaggtgcggcccagggagtcggccaggtggaagtccagcttggggccgtagaaggcaccgtcgccctcgttgatcacgtaggtcttgcccatctcggtgatggcctctttcaggatgtcctggttgtgctcccactgctccacggtgccgatgtgatcctccggcatggtggacagctcgatctcatagtgcaggccaaagacggagtacacctcgtcaaagagcttgaccacgttcttgatctcgtccttgagctggtcgggggtcatgaagatgtgggcgtcgtcctgggtgaagcagcgcacccggaacagaccgtggagggcgccggacagctcgtgccggtgcaccaggcccagctcacccacccgcagggggagatcccggtaggagtggggctcgttcttgtagaccagcatgccgccggggcagttcatgggcttgacggcgaagtcctcctcgtcgatgacggtggtgtacatgttgttcttgtagtggtcccagtggccggagcgctcccacagggagcggttgagcatgatgggggtggagatctccacatagccgtagcgcttgtgcacctgccgccagtagtcgatgagggtgttcttcagcaccatgcccttgggaaggaagaaggggaagccggggccctcgtccataatggtgaacaggcccagctccttccccagcctgcggtgatcccgcttcttggcctcctcaatgcgctggaggtaggcgtccagctcgtccttcttggggaaggcgatgccgtagatgcgctggagggtctggcggctggagtcgccccgccagtaggcggcgttgcaggcggtcagcttgatggcgttgcccttgacccggccggtggagtccagatgggggccggcgcacaggtcggtgaactcgccctgcttgtagaaggagatgtgggcgtcctccggcagatcgtggatcagctccaccttgtacggctcgcccttctcctccatgaacttgagagcctcttcccggggcagctcaaagcgctccagcttcagcttctccttgcagatcttacgcatctccccctcaagcttctccaggatctccggggtgaaggggaagggggagtccatgtcgtagtaaaagccctcgtcgatggaggggccgatggccagcttcacctccgggtacaggcgcttcaccgcctgggccagaatgtgggagcaggtgtgccagtaggtcttgcggtagctctcgttttcaaaggaaaattcgctgttcttgttctcttcggacattctgataacctccttttcgtctgtggggggcggcacacggcgcgcgccccggtaaaatgcggcggggttacagcaaaaaaagcgcctcacccctgagtgtgtcaggggtgaggcgctgtcatacgtcccacggttccaccctgcttgccagagacgcacagacgcccggcaggacaaccgcaacacgcgcaggccgaacaaacggtcgggcaaatgcccggcggcaggtccggcacagcgtggaacagctggccgccgcagagggcgcacagcgtgacaactggccgcttgtgacttcctgtaacgggaaagccccggcccggtcatcccgggcggctcgggagtggtacagccgccgcgtgtcgtggggcgcttccaccgtgtgcgcccctctctgtccgccgctgtgcgggttcgtctccgtcaaagccaatttgaacggacctactatatcactgagggggaggaaagtcaagagtccactttatcccggagcccgcgggcggccacgagggccgcccctgcctggctggaggttatatcggattccgcgcaatacgcggcattgtaggggcggggcttgtccccgcccgcgggcggccacgagggccgcccctacctagttggggtatatcgggttccgcgtgatacgcggcgctgtaggggcggggcttgtccccgcccgcaggcggccacgagggccgcccctacctggttgggggcatatcgagttccgcatgatacgcggcgctgtaggggcggggcttgtccccgcccgcgggaggccccaagggccgcccctgcctggttgggggcatatcgagttccgcatgatacgcggcactgtatgggcggggcttgtccccgcccgccgatctgaccgggtgacatcccgcctccaatacataaaaaactgatatttacagtttattcacattaaagacacgatttagtcttatttacacggtatgatacagacagattcagagatgaatcgaatgagaccatcctcccaaaccaattcctctcttatccctctccaacacctttgcaagacacacaacacacacccgaaaagccccggcctttggccggggcttttcggcggttttggaaaaaaggcttgacttggagtgtactccagggagtaaggtaaattgaaatcaatgtatgggagtgacattccgtgatctacaaggactttcaaaacctgcgcctgcccatgctgggcttcggcagcatgcgactgcccctgctgcccggcggtggggacggcgacgtggacgaggcggcggtggccgagatggtggccctggccatggagcggggggccaactactttgacacggcctatggctatcacaacggcaattccgagcgggtgatgggccgcgtgctgtcccgttatccgcgggagagctggctcctggcctccaaattccccggctacgacgtgtccaacatccggccggacagggtggaggccatcttcgaggagcagctggagaagtgcggcgtggactacttcgacttctacctctttcacaacgtatacgagcgcaacgtgggcccctatctggacccggacaaccgcgtgctggagtacctgctccgccagaaggaggccgggcgcatccggcacctgggcttctccgcccacggctccctggcggtgatccagcgcttcctagacgcctatggggaatacatggagttcggccagctccagctcaactacctggactgggacttccagggcgccagggccaaggcggaggagctgaaccgccgccatatccccatctgggtgatggagcccctgcggggcgggcggctggccaggctgtccgacggggacgccgcccgcctggccgccctgcggccggaggagagcatgccgggctgggccttccgcttcctccagggggtgcccggcgtgactatggtgctctccggcatgtccagcctggagcagctgcgggccaacctggacaccttcgaggccgaccggcccctgagtgaggctgaaaaggccgccctgctggacgtggccgccggcatggtgcgggagcaggtgcttccctgcaccgcctgccgctactgcgtggatcactgcccccggcacctggacatccccggcctgctggccctctacaacgagcacaccttcaccggcggcggcttcatcgcccccatggcggtggaggccctgccggaggagaagcggcccgccgcctgcatcggctgccggagctgcgaggcggtgtgcccccagcagctcaaaatctccgaggctatggccgacttctcccgcaagctggggtaaatccccggggcgggcgttgcaatccaccgcggtttggggtatcataaaggcacagatcatgatacgccataaggaggcgcctttctatgcgcgatggattcatcaaggtggccgccggcacgccccagatccgggtggccgactgccgctacaacgccgaacagattttcaccctcatgcgggaggccgataagcagggggtgcgggtgctggccctgcccgagctgtgcctcaccggctacacctgcggcgacctgttcctccaggataccctgctgcggggcgcggaggaggggctggccaccatcctggaggccaccaagcacctggatatgctcaccgcgctgggcctgccggtgaaaaacccctgggacggaaagctctacaactgcgcggccgccattcaccggggggagatcctgggcctggtacccaagacctggctgcccaattacggggagttctatgagcagcggtggttcgcctccggcaaggatctggacgtcacgctggagctgtgcggccagcaggtcagcctgtgtagcaggcagctctgggcctgcgataccatgcccgggctggtggtgggagtggaggtatgcgaggatctgtgggcctccacgcccccctccgtggccctggccgaggcgggggccaccgttatcctcaacctgtccgcctccgacgagctggtgggcaaggccgagtaccgccgccggctggtgtgcggccagtccgcccggctggtgtgcggctatgtctacgccaacgccggggagggggagtccaccacagacctggtcttcaacggccatgacatcgtggctgagaacggcgccctgatggccgagcggcggtttgccaccggactcaccgtcagtgagatcgacgtgcagcgcctggcctatgaacggcggcggatgaataccttcggcgctccggagcgggaccccatggcggaggcccactgcctgggggtatgccgggtatccttcaccctggagccgtgcaccaccaccctcacccgccatgtcaaccccctgcccttcgtcccggaggacggcaccgagtgcagcgaacactgcgacgagatcatcctcctggcggcgctgggcctcaaaaagcgcatggagcacagcggcgcacaggcggcggtggtgggcctgtccggcgggctggactccaccctggccatcctcatcaccagcgtggccatgcgcctgatggaccggccggccagcgacatgattgccgtcaccatgccctgcttcggcaccaccgagcgcacccgggacaacgccgtggagctggccgagcggctgggggccaccctcaggcgcatcgacatcggcgcggcggttcgacagcacttcaaggacattggccagtccatggacgaccacgatgtgacctttgagaacagccaggcccgggagcgcacccaggtgctcatggacgtggccaaccagtgcggcggcctggtagtgggtaccggagacctctctgagctggccctgggctgggccacctacaacggcgaccacatgagcatgtacagtgtcaatgcctccatccccaagaccctggtgcgccgtctggtgtcctatgtggccggggacaaggcggaggaggacgaggccctctcccatgtgctcagtgatatcctggacacccccgtttcccccgaactcttgcccgccatcgaggggcagatcgcccagaagaccgaggatctggtgggcccctacgagctgcacgacttcttcctctactatgccatccgctgggccttcccgccacggaaggtcctccggctggctgagcacgccttcggccgcacctacccccgggccgtcgtgctccagtggctgcgtacgttctaccgccgcttcttcgcccagcagttcaagcgctcctgcctgcctgacggacccaaggtgggctcggtcagcctctctcccaggggcgactggcgcatgccctccgacgccgtggcggccctgtggctggaggagctggaggggctggagtgacgtgaacatctatgccgacctgtttttgacctttgccaaaatcggggtttgcaccttcggcgggggatatgccatgctgcccatcctccagcgggagctggtggagaagcggggctgggccacggaggaggagctctccgactacttcgccatcggccagtgtacccctggcatcatcgccgtcaacaccgccacatttgtggggcacagccggaagggagcggcggggggcgtggtggccaccctgggactggtgttcccctgcctggtcatcatcatgctcatcgccgccttcctccagaactttgccgagcagcccgtggtggtgcacgccttcaacggcgtgcgggcctgtgtgtgcgccctgatcctgtccagcgtgctcaagctgcgcaagagcacggtggtggacgggccgacggcgggcgtcttcgcggtgatgctggtgctggcggtgctcggtagctttgtgtccttcccagccgggtgggcggggagcgtgctcagctttctctgttcccccgtggtgctggtggtggccgccggcgtggccggactgtgcatccgggcggcgaagggagggctgcggccgtgatctaccttcagctcttctttgagtttttcaaggcggggctgttcgccatcggcggcggcctggccaccatccccttcctcaccgacatcgggcagcgtaccggctggttcacctccggggagctggccaacatgatcgccatctccgagtccacacccggccccatgggggtgaacatggccacctacgtgggcttccacaccggcggcatcgcggggggcgttatcgccaccctgggcctggtgtgcccctccatcctcgtcatcctggtcatcgcgggctttttgaagaagttccgggagagccagggggtggacgcggtgttctacggcatccgccccgcctccaccgcccttatcgccgcggcgctggcggaggtttgctccatcgccctgctgaatctgagcgccttccagaccggcggcgcggcggccctgttccagtggaaggggatcgccctggcggtggtcatcttcgtgtgcctccaggtgaagcccctgaaaaaactccaccccatcgtgttcatcgccgcctcggcggtgatcggcgcggtcttccagttctaaaaaaatcccgtgcggtgtgtgccgcacgggattttctggtttattccgcaggggaggccaccaggaagaggaagtcgctgccgccctcctcctccgggaaagcgccgtacatggagaagttatacaggaagcgctccgccatcagcacgccgtagccgtcctgacagtggtcggtggtgtcgtaggggtcggccacgatgaacacgtcgtcctgctgggtctcggtgcccatggtgtcgtagccgatgatcacctgccagtgtccgccccagtcgttccagcagaccatgaccggcttgccctcggccagccagccctggatggtgtccatccagacctcggaggaggggtcctcgtagtccaggttggtggtataggtaaatccgcccacgccgtcaaagatatccatggcctgccgcagggtggtgccggggtagccggccagcccggtgccctccagggagtggcgcagggcggccaggctctcctcgttccagtcgcccagccggtcataccagttgagcaccatcagggtgctggtgacgccgcaggcccattcgctggtctgctgcatggtctggaagccggtcaggatcgtgagggtgtcgctggactgcatgtggtagtagtcggggtgggcaaagtagggggagtccgcgtggtcgcccagccgctccacggagtcggcgccgtcctcgggggagagatccacggcatgggggatcttcatctcgtcggtaaaggcggcgctctgcgccgcgctcggtgtggcatccgcaggggatgtttgggccgccccagtcggctggctcccgcccgtcgtgtcggcacagccggccagaaggccggccgccagggtgaggctcagcgccagagtgacttgttgtttcatttctcgatctccttcaatgtccgattctgcgcattgcgcagtgagtgacattatagggaaagaaggcgaaagatgcaagcataaattttgagggccccaaaggggccctcaaaggggtcagggcaacacgcagcggtcaccccggtcgatatagtgggcgtcggaccggagagtcagcccctccggtcccgcgccgccgggcaggtagaagcggatgccctctatccgcacgtcggcggggccgtcctcatggtggggcggcacggtatagagccgcgtgccccggagctgttcgccctccagaagctccaccgccagggccacccgccgctcgggcaggatatccgacaggcacagggagcactccacaatctgaccgccccccacctccagagtgcccagcgcacagacgaggagcccgccctccggctccagccggtattccaacatggtcagcacctccttcatacggcatggcagccgtatgtaccaagaagcgcggaggcgcggggcgcaggcgggtaagacccaaagcggagcgaacggaccggagggcccgaaggggccgcaggccggcttgcacagccggaggggcttagacaccgtcgcgcagccgccgcagcgtgacaagaagcgcggaggcgcggggcgcaggcgaaaccgcagcggctatgccgcgcggagggccgggcggccccctagaatcctatgctcaccggacctgtccggtgccgtagattacatatttggagctggtcagctcctccaggcccatggggccccgggcatgcattttttgggtggagatgccgatctccgcccccaggccgaactcgaagccgtcggtgaagcgggtggaggcgttgacgtacaccgccgcggcgtccacctcgtccaggaagcgctgggcggcaaagtagtcggcggtgacgatggcctcggagtggccggtgccgtgggcggcgatgaagtccaccgcctcgtcaaagccggataccaccttgacggccaggatgtagtcgccgaactcggtgtcccagtcggcctcagcggcgggcttgacccagtcccccaggatggcccgggtttccgggcagcccctcagctccacgcccttggtttggagcagctcccacgccaggggcaggaagtcccgcgccactgcccggtccaccagcacgcactcggcggcgttgcacaccgaggggcgggaggtcttggcgttgtggaggatgcgggccgccatgtccaggtcggccctctcgtggacgtagatgtggcacacccccacgccagtctggatgaccggcacccgggcgttctccaccacgctgcggatcagccccgccccgccccgagggatgagcacgtccaggtactccgtcaggtgcatcagctcgttggcgctctcccggctggtatcggccaccagggccacgcagtcccggggcaggccggcctcctccagggcgtcccgcaggacggccacaaaggcctggttggagcggaaggcctccttgccgccccggaggagcgccgcgttgcccgacttgaggcagagggctgcggcgtccaccgtcacgttgggccgggcctcgtagatgatgccgatcacccccagggggacccggcgctttccgatggtcagtccattgggccgggtgtccattttggtcaccgccccgatgggatcggggagggcggccacctgccgcaccccctccacaatgccggcgatgcggccctcgtccagcgccagccggtccagcagggcggggcggagtccggcggccatggccgcctccagatctgcggcgttggccgccaggatctccccctgccgggcctcgatggttctggcggccgcctccagagcggcgtttttcctggcggtacccgccacggccagcgcccgggccgcgtgccgggcggccagaccctgggtctccagtacagtcatgggattcctccttcttttctattgtagcgcgccccgccgggcagaaaagcgggtgcccacgttcttcccctccacgatgtcgtagagggcctccatccgcgccccgttggcgatgaccatgtccacccccgcctccaggcagagctgggcggcgttgagcttggtggccatgccgccggtgccgcgccaggtgcccgcaccgccggccatggcccgcagctccggggtgatggcctccacctggtggatcagccgggcgtcggggtgggtgcgggggtcggcgtcatacagtccgtcgatgtcgctgaacagcaccagcaggcccgcgccgcacagccgggccacgatggcggacagggtgtcgttgtcgcccagcaccttgcactggccggtttcgatctccgctgacgacaccgagtcgttctcattgaccaccgggatcacccccagctccagcagggcctcaaaggtgttgtgcagatgctccgagcggacgggggactccacgtcctcgccggtgaggaggatttgggccaccgtccggttgtactcggcaaagagcttgtcatagatgtgcatcatcctgcactggcccacggcggcggcggcctgcttcatccgcagctcggtggggcgctcccccagccgcagctttttggtgccgatgccgatggcgccggaggacaccaggacgggctgataccccatgccctccagatcggccaatacacgggccagatgctccatgttttgcaggttgaggctcccggtctcccgggtgagggtggatgtgcccaccttgaccaccagcctgcgcggattgcgcggttgtttcacgtgcttcacactcctcttccattcgcccttcatcatagcacatttcaccggcgcacgaaaggggcaataaaaagaaaaggaaggggctgcttccagaaagaaaactgaatgttttagcgcgtatttacacatttaaggttgaaatccttgctgttttggagtacaatagcctgcgctgaccaagtagtaaccgggagggggagacagggtgctcaatatcgtgctgtttgagccagagatcccccaaaatacggggaatatcgcgcgcacatgcgcggtgaccgggacccggctgcatctcatcaagcccctgggctttgacatcagcgacaaggcggtcaagcgggccggcctggactactggcatctggtggacgtgcgggtatatgaaaacctggacgacttctttcagaagaccggcgcggaggatatctggctggctaccaccaaggcgcccagatcctatactgaggcggttttccgggacgagtgctacctggttttcggaaaggagaccgccggcctgcccgaggcattccgcagagctcacgccgaccgctgcatccgcatcccaatccgggcggaggcccggtgcctgaacttatccaacgccgcggcgatcctcgcctacgaggccctgcggcagcttgactttcccggcctgaccggggagggcgcgatgaaaggagaggctctatgaactacaacaagaagaccgtaaaggatatcgatgtagcgggcaagaaggtcctgctgcgctgcgacttcaatgtgccccaggacaaggccaccggcgtcatcaccgacgacaagcgcatcgtggccgccctgcccaccatccagtacctgctggagcagaacgcggcggtgatcgcctgctcccacctgggcaaacccaaggagggacccgatcccaagttcagcctggctcccgtggccaagcgcctgagtgagctgctgggccgcgaggtcatcatggccgccgacgtggtcggccccgatgccaccgccaaggccgccgccctgaagcccggccagatcctgctgctggagaacacccgctttgagaagggcgagaccaagaacgaccccgagctggccaggaaaatggcggccatggccgacgtgtacgtgtccgacgccttcggcgccgtgcaccgcgctcacgcctccaccgccggcgtggcagcctacctgcccgccgtgtccggcttcctgatccagaaggagctggagatcatgggcggcgccctggctaaccccaagcgccccctggtggcgatcctgggcggctccaaggtgtcctccaagatcggcgtgatcaatcacctgctggacattgccgacaccatcatcatcggcggcggcatgtgctatacctttgccaaggcccagggcatcggcgtgggcaactccctgctggaggccgactggctggactactgccgggagatgatgcagaaggccaaggacaagggcgtcaagctgctcctgcccgtggacggcgtggccgccgcggagttttccgccgatgccaagccggtggccgtggacggcgcgggtatccccgacggcatgatgggtatggacatcgggcccaagaccatcgccctgtatgccgcggccgtgaaagaggccggcaccgttatctggaacggccccatgggcgtgtttgagttccccgcctttgccgagggcacccgggccgtggcccaggccctggccgagaccgacgccatcaccattgtgggcggcggtgactccgcggccgccgtggcccagctgggctacgccgacaaaatgacccacatctccaccggcggcggcgcctccctcgagttcctggagggcaaggagctgcccggcgtggcgtgcctgctggataagtaagaaagaatcgcggagacgagcggagcagccgcacagcgaagcccgcagacgaaaaagcagttgcgccgcaggcgcaaggtgtttttcgcggaggggtgagcagtgcggcgaccgcgccgccgccgcagcgtgacaacttccgtgccgggcagctcctccgccgagggccccgcacgaaccgctgcgctggggccgcgccgcccccttatagctattccaaaatcgaaaggattgtttgccgtgaaccgccgctaccgtaagacgattatcgctggaaactggaaaatgaacaaaaccctctccgaaacccgtgcatttgccgaggagcttaagcccctgctgggcaagcccaactggtgcgaggtagtgctgtgcgtgccctatgtgaatatccaggccgccgtgcgcctgttcaaagagtgccgcgtctccatcggcgcggagaactgccactatgagtcccacggcgcctacaccggtgaggtggcccctgagatgctgaaggagctgggcgtcaagtatgtggtgatcggccattccgagcgccgccagtactataatgaaactgatttcacggtgaacaagaaggtgcatgccgccctggaggcgggcctgtaccccatcgtgtgcgtgggcgagagcctggagcagcgggagctgggcgtgaccatggatctcatctcctaccaggtgaaggccgccctgtccggcgtgcccgccgagaagatgcgccatgtggttatcgcctatgagcccatctgggccatcggcaccggcaagaccgccaccgccgagcaggccggtgaggtctgcgaggccatccgcaccgtcatccgcaagctgtacggcgcccgcgtggcccgctccgtcaccatccagtacggcggctccatgaacgcaaagaacgcccatgagctgctggcccagcccgacgtggacggcggtctgatcggcggcgccagcctgaaggcccccgacttcgtggagatcgtgaacgcggccaaccaggagtaacgccgtccgcgtcgggcggcggttcgggaacccaacgagagcccagcgcagcacccgcaaggggtacgccgtattgtaaggcggcaaagccgccgacggcgatacagcgggtctcgttgggagaggaggagcaaggaagcggagtgaaatttttgccgggaggcggaaatggagcggagcggactttgcgacgacgaggacggcggcctgatcggcggcgcgtctctgaaggccccggactttgtggagatcgtgaacgcggccaatcaggagtaagaagcgcggagggcaggcgtacaggggagttaaggcagggcgcagacgaaaaaacaggcgacgggcgatagcctggagcggtatttttcgcgaagcccggacttaacgatccggacgtgcgcccaacccgcagcgtgacagcgagaagcgcagggccgcccgcgcccgtctccgttttggaaagagaagaagagattcgaggttattatgagtaagacaccgactaccctgatcattatggatggcttcggcgtatgggacgagcgggctggcaacgccatcgccgcggcccgcacgccgaacctggacaagatttttgcggaaaaccccggctgccgcctgtccgcctccgggctggacgtgggtcttcccgagggccagatgggcaactccgaggtggggcacaccaacatcggcgccggccgggtggtgttccaggatctgccccgcatcagccgcgccattgaggacggcagcttctttgagaacgaggcctatatcgaggccatggacgactgcaaggagcgggacggtgcactccacctgatggggcttctgtccgacggcggcgtgcacagccacatcacccacctgttcgccctgctggagatggccaaaaagcggggattaggccgggtgtatgtccactgcttcctggacggccgggacgtgccccccgcttccggcaagggctatgtggaaaagctggtggaaaagtgcaaagaggtgggcgtgggccaggtggccaccgtcatgggccgctactacgccatggaccgggacaagcgctgggaccgggtgcagcgggcctacgacgccatgacccggggcgagggcgtgcagaatcccgacccggtggacgcggtacagaggtcctatgatgccggggtgaccgatgagtttgtggagcctgtggtgtgcaccaaggacggcaaggtgaaggagggcgactccatcatctttatcaacttccgccccgaccgggcgcgggagatcacccgctgctttgtggaccccgccttcaccgacgtggagcgcaaaaagggctacttcccggtgacctatgtgtgtactaccgagtatgacgccaccatgcccaatgtgctggtggccttcccccaccgggagctgaccaatatcttcggcgagtatatcgcccgccagggctatactcagctccgcattgccgagacggagaagtacgcccatgtgactttcttcttcaacggcggcgctgagcaggtgttcccgggcgaggaccgctgtctgatcccctcccccaaggtggccacctatgacctccagccggagatgagcgcccccgaggtcaccgcggaggccgtcaagcgcattgagagcggcaattacgatgtgatcatcctcaacttcgccaactgcgacatggtgggccacaccggcgtgttcgaggccgccgtcaaggccgtggaggccgtggacgcgggggtgggcaaggtggtggaggctacctcccggatgggcggcgtgtccctcatcaccgccgaccacggcaacgccgagcggatgctggacgctgacggcacgaccccctacaccgcccacaccaccaacctggtgcccttctatattgtgggcgccgatgtcaagctgcgggacggccgcctggccgacatcgcccccaccatgttggatctgatgggcctggaaaagcccgccgagatggacggggaaacgctgattctgaattaagggcttttccaggcccatccccgccgcaggcgggcggcgctgtgcgccgtccaagtgttttggccgtcggccaaaaccttgatgccggggcaattcacttgccccgggcagataaaaagactcggggcccccgcgcggcgagccgcgtggggtatctggaaaagcccgccgagatggacggggagacgctgattttgaattaagggcttttccaggcccatccccgccgcaggcgggcggcgctgtgcgccgtccaagtgttttggccgacggccaaaaccttgatgtcggggcaatttacttgccccgagcagataaaaagacccggggcccccgcgcggcgagccgcgtggggtatctggaaaagcccgccgagatggacggggagacgctgattgtcaactgaccttcccgttcaagggaatggcggcgaagcggtaaccggcggggatgaacccccgccctaccatagagccccggcgggccggagcccgccccccacacgaaacacccctgtaggcgggagtctgctcccgccgccaatacgaaaggagttttcatcatgaagcagatcattgagatcgttgacgtgctgggccgcgagatcctggacagccgcggcaatcccaccgttgaggtggaggtctacctggaggacggcaccgtcggccgcgccgccgtgccctccggcgcatccactggcatctatgaggcctgcgagctccgcgacggcgacaagagccgttacctgggcaagggcgtgctcaccgccgtgaagaacgtgaacaccgacatcgccgagtgcctggtgggcatgaatgtgctggatcagaccgccatcgacaaggctctgatcgagctggacggcacccccaacaagaccaagctgggcgccaacgccattctgggcgcttccctggcctgcgccaaggcggcggccgaggccctgggcacctccctgtacaactatatcggcggcgccaacgccaagattctgcccgtgcccatgatgaacattctcaacggcggcgctcacgccaccaacaacgtggagatccaggagttcatgatcatgcctgtgggcgcctgttgcttccgcgaggccctgcgcatgtgcgccgaggtgttccacaccctgaagaacgtcctgaaggagaacggcacccccgccgccggcgtgggcgacgagggcggctacgcccccaacctgaagaaggatgaggacgccctgaaggtcatcgtcaaggccatcgaggaggccggctacaagcccggcgaggacttcaagatcgccatcgacgccgcctcctccgagtggtggaacgaggaggagaagtgctatatccagcccaagtccggcaagaagctgacccagcagcagctggtcaacatgtggaagaagtttgccgacacctaccccatcgtctccctggaggacggcatggccgagaccgactgggagggctgggccatgctcaccaaggccatcggcgaccgcgtccagctggtgggcgacgacctgttcgtcaccaacaccgagcggctcaagaccggcattgagaagaaggtgggcaacgccatcctcatcaaggtcaaccagatcggcactctgaccgagactctggacgccatccagatggccaaccgggccggctacaccgccatcgtgtcccaccgctccggcgagaccgaggacgccaccatcgccgacatcgccgtggccgtcaacgccggccagattaagaccggcgctcccagccgcaccgaccgcgtggccaagtacaatcagctgctccgcatcgaggaggagctgggcgacgtggcgcagtacctgggtatggacgccttcttcaacctcaaataaacgaaggaaccgcaaggggccgctgccattggcagcggccccgttttttggccgcccagctcgtggggcccccaaccgagctcaacgcagtgggtcggttggggagaggaggagcaagggagcggagggagggatgcccaggcatgggcgtcccgacgggagcggactttgcgacgacgagggcgacgtggcgcagtacctgggtatggacgccttcttcaatctcaagtaaagcgaagcgctgaatgcccgggagcaggcgcacagcgagctgcgcagacaaaaaagcagttgcgccgaagtgtaaggatttatagagaagttaaggacaaggcaggccgcaacggtctgccttgtcctttttatactgtgtaacccactatgacactttcaaggaaagtgttcgtgggagaagcgataaactgtactttgttacttttggcataggcaaaatggatgtcctgctgggtcaaacattgttacaaaatcacttccgccaaattgtgcttttgaccttgttgctcccaaccgctctgctttcttaaccatttccataacattatcaacttgaaaatcaaaatgtatctgtttctgttgtttccctgtttcttcgggccatacagggcaaatatactcagcttcttcaatgaacagaaaaacgattcccgtagaactgcgtacagcaggtcttgcaaataattcgcacatttcccaacctaataactcaccataaaatttctgcaatttcttttcgtcatcgcaatcaaccatgacatttcctaatataacttcattttccatgctgagtcctctcctccccaaattttgatttgccggtgagacaattataaagcggcacccaccggaaagcaacttttttcagcgggtgtcaacttccttatggaagttgcgccgaaggcgcaaggtgttttttgcggagcggtgagcagtgcgccgtggcggagggtgtgaggcgtgacaaccgaaggaaccgcaaggggccgctgccattggcagcggccccttgtcgtgcttgacccgtcactcctccagatagatgatgctgaccgggcagccctcggcggcggatttcacagcgggcaggtgcgccgggccgggctggcggtagacctccgccaacccgtcctccgcgatccggaacacgtcggggcaggtggagacacacagcccgcagctgatacagtcgctgcgctcgatggagacctccatgtgcatcgctcctttcacccgataggatgccccggcgggcggcgggccatgcgtcctattttcccacgcagaaacgctcaaagatgcgggcggtcacgtcctcccgcacgctggccccggtgagctctcccaaggcggcgagggcctcctccgcgtcggtgaggagggcatcgggggtgataccggcctccaggctctcagaggcccgcgtaacggcctccagcgcccgccgggcggcatcggcctgccgggcattggtgagcagctctccggcgctctccgcgcctccagcggggaagagggcggcgacggtctcccccagcgcatccagccctgcgccggtggcggcgctgaccacacacagatgggggaagcggctccgcagctcctccggcgcgaaagccagggggcggtcggacttgttgatcaggcagatgacccggggggcgcgggcggcctgggccatggcggcctcgtcctcgggggtgagggaggcggagccgtccagcaccagcagggccagggcggccccctctagggcggcccggctgcgctccacgccgatacgctccacggcgtcgtcggtctcccgcaggccggcggtgtcgatgagccgcagcacaacgccgcccagccggcaccgggcctccaccgtgtcccgggtggtgccgggtacgtcggtgacaatggcccggtcatagcccaccagggcgttgagcagggaggacttgcccgcgttgggccgtcctatcagcacgcagggcacgccaccggcgatataccgtccccggtcataggtgcgcagaagggcgtccaggcccgtacgggcggcgtccaggctctcccggatggtgtcggcccggaaggggtcgatgtcctcgtccggatagtccagcacggcgtgaaagtgggccatgagatccaccagaccgtcgtagagggcggccacccggcggctcagcgcgccggagagctgcccggcagcctgccgcacggcggcgggggtctccgcctcgaggagatccgccaccgcctccgcctgggtcagatccagttttccgttgaggaaggcccgcttggtgaactcccccggcccggcctgccggacgccctgggcaaacagggcctccagcgccatcgccagcactgcgggggagccgtggcactgcagctccgccgtatcctcgccggtgtagctgtggggggcacgggagatggtggccagcacctggtcgatgggggcaccgtcggggcccagcagggtgccgtagaccagcctgcgactctcgcaggcggccaggggacgcccgctggcggcgcggaacacggcggacgcggcctcgatagcgccctctccgctgacgcgcagaatgccaatggcgctgggaaccgggggtgtggcaatggcggcaatgggttcggacatgctttcacctcatgactgagcggcggctcatgatatgttcgggacacctgacgttattgtaccacaattggaagaaaaacggagaacaaaaaagtttgtagaatccgccgtggattttttgcttgacttgtcttatgtcaactgaattttgcatattggcgttatccacagggtgttaactgatgtggataaccatgtggataatgtggaaaaccctttggataccggaggtcgggcgtttctttacacggtctctacactgcatagcggattgtataaggcatgtcaaagaacatttgtatcagcggcgccggatgtcaaaaatgggggtggttttttgggcaggccgacaattgaacgtaattttaaaaaatgctaaaatattattatatctaaaaaatattttttataaaaggaggggtaggcttatgagacagcccagcctgctgcgccgctatattctgttcttctgcggagttctctgcgccgccctgggaatcgccctgattaccttagccggtatgggcacctcggcggtgtccagcctctcctatgtcctcacgtttgtctttccagggctctcgctgggggtgtttaccttcctggtgaactgcaccatgctggtcggccaggtgctgttgctccggcacaggtttcagtccatacagctcctccagattccggccacgctcctcttctcggtctgcatcgacctgtggacagagctgttggccccgctggtgccggagtcctatggggccaggtgggtggtgctcctgctgggctgtctctccctggggctgggggttgcgctggaggtgcttcccaatgtgctgatcctgccatgtgaggggtttgtccgaaccgccagccaggtattcggctgggattttgggaagaccaagaccggctatgatctggctatggtgtcggcagccgccctgctctcctatctcagcctgggggccatctgcggcctgcgggaggggacaatagtttgtgccctgactgtgggaggaatctcccgatttctgtgccgcaggctctccttcctgcaatatccgagccggagtcatccgcccatacccgcagaagcaagcggcgcccataccgccgcagagccctgaaagcgcaagtaaaatgccgcccatatgggcggcattttaaaaggtcaggcgaaaaattagcgcttggagaactggggagcgcggcgggcggctttcaggccgtacttcttacgctccttcatacgaggatcgcgggtgaggaagccggcggccttgagggcggcgcggaactcggggttgacctgcagcagagcgcgggccacgccgtggcggatggcgccggcctggccggtcacgccgccgccggtgacggtggcgacgatgtccaccttgcccagggtgtcggtagtggccaggggctggcgaaccagcagcttcagggtctccaggccgaagtaatcgtcgatgtcgcggccgttgatggtgatcgcgccggtgccgttggggaacagatgcacccgggccacggaggacttgcggcggccggtgccatacagataaggcttcttgctcttatacattcctttgtacctcctgcttagatggcggcccaggtttcgggcttctgggcggtgtggggatgctcggcgccgcggtagatgtgcaggcgggacagagaatccttggtgatgatgttgcggggcagcatgccgcggacggccagctgcatggccagctcgggcttctgctgcatcagcaggcggtacttggtctccttgaggccgccgatccagccggagtggcggcggtagtacttctgctccagcttcttgccggtcagaacagccttctcggcgttgacgatcacgacgaagtcgccgcagtcggcgtggggggtgaactcaggcttgtgcttgccgcgcagcagggtggccgcagcggcggcagtcttgcccaggggcttgcccgccgcatcgaggatataccacttgcggacgatgttccccttgttggccataaaagtggacatggtgaaacctccaattttgcgttctatgataaaaaatgtctcaacagaataagaaccccaatctggacgaccggagcgttttgtattataatacggtggttccaaggtgtcaacacgttttttgaaaattttaatttagaaataagaatgctcgctcaaacgcgcgaaatctcgcaaatactcttgaatgctccgtttcgatttttaatttttgaggtgcctatgaacaagattttgagctatgtccgccgctgtgtggaggactacgacatgatccaggccggggaccgggtggcggtgggggtgtccgggggcaaggactccctgaccctgctggtggccctggccaggctgcgggagttctaccccaagccctttaccgtggaggcctacaccctggatatgggccatgtggacgggggagaggggatggacttcaccggggtggaggccctgtgccgggagctggacgtgcccttcacgctgctccacagcgaaatccaccacatcatctttgatctgcgcaaggagaagaacccctgctccatgtgcgccaagatgcgccggggcgccctccacaacgccctgaaggagcacggcgtcaccaagatcgccctgggccaccactttgacgacgcggtggagaccttcttcctctccatgttttatgaggggcggctgtcctgcttccagcccgtgacctatttagaccgcaccggcatcacccaaatccgccccctgctctactgtggggaggggatgctccgcaacgccgccgagcgcaaccatctgcccgtggtgttcaacccctgcccggcggacggcaataccaagcgccaggaggtcaaggagctgatcaagtccctggacaagcagtatcccggcctcaagagccgggtgttcggggccatgcagggcctgcccctgcccgcctgggggccggtggagcaccggcgggtgcccctgcccgagggagattagccccccggcacggacatccggcccgccgtgccgggagggccggaaccccttgaaaaatcaggactttcctaacggtcgagggggaaaatcccgctggggccttgcaaatttacgccattcgccgtatggtgagagcggccttgcaagaccacaccctgccgaaaggatggttcaacatggaaaacaagaagaccttcggcgcgtatatctgccgccgccggaaggagctggggctcacccagcgggaattcgccgacaggctcttcgtcaccgagtcggcggtcagcaagtgggagaggggtatgtcctacccggacatcaccctgatccgggatatctgcgccattttacaggtgtcggagcacgagctgctcaccgccagcgaggatgtagaggcccgcaccgccgagaccctggcgaaaaaatacctgtccctgctgcgccgcctgcgctggattcagtacatcctctacggcggcaccgccctgatctgcctcatctgcaatctggcggtggggcataccctggactggttctggctggtactcaccggggaactggtgggggccagcctcaccctcctgcccatcctggtgaagcagtaccggggcgtcatcacgctggggggcttcaccctctccctggagctgctgctgctggccgcctgcctgttcagcgggggagactggttcctgctggcctcggcgggggtgctgctggggctgggggcggccttcctgcccggcgccctgcgggagctgccccgccccctgggggagcacaaggctgtgctctacctggggacggagaccctgctgctgtgcgccctgctctgggtcagctgcgcctatgacggcgcagattggttccccattcctaccctgccggcggttctcttcggcctgaccatgccctgggcctgggtgctcatctgccggtacgcccccatcagccgctggtggaaggggacggcctgcctgggggcggcctgcgtgttcctccccctggtcaacccggtgatcgaccggctggtgcggctgggcggcgggacggtggagcggctccacggcttctggttccggccggatttcacccgatgggcggagaactggtacttcaatgagaacgtcctcctgctcctgtggctggccctggcagcggccgcggcgctctgtgcgctctgtgcgctccgggcgctcctgcgccgccgggaggcatgaacgcacccggactggatcaggaaataaaactttatgcgcacagggcgcaccacgaaattatgcaaaggcttaggcgcatgaagtttctgcgcatatgggccgtcccgctgtaagcggcacatggccaactttgctatgcttttgcatagcaaaacaggcgtcggccagcggccaacgcctgtttttatttctccatcttatgcttgagatgctccaccttgcgggccaaatagtcggaatctgtgaccaccttgacgggctgagtgaagtccagggtgaacaggccgatgaaggacttggcatccacgcggacgctgtcgtccaaggagtgcaggaagatctcgtcgtcacaggaactggcgatctcctgaagccgctggagctgggcaatggagttaaactgcatttcaatcatcatgattcacacctcctttatttcgccaaagagtatatcatgggaggtaatcccacgcaatcggtatattatccaaagttctgcggcggtatgccggatgtacaagcgatttgacgccggaaggagggaggaacgaggcagcgggccctgccgccggcagggcccgctgaaagggcacgtatcagaagtatttcttgacgccgtcggtggccagggaggcatcggcgctgatggtgacggtgaacttaatattgttcttctcggagaagctgttcagccagtccaggaactcctccaccgcatggtcggtggcctcggaggccacaatcttggtcaggctgtcgataaagacatgggtgatgtcgtagttgcccgcgtacaggccgctgataaagcccttcaggaagtcatagctcttaatatcgtaatggctggcctccaccagacggatcttataatgaatgtcataggtcagcttggggccccgctcgatgcagaccacattgccgttctcgctgtggacagcggaattaatgagctcgatcatctgcttggtcttgccggtgcccttgacacccatgatcactctcaccatagttatcactccttcattgtccgccggagcgtatctccggccttgtgcaattatgttaccatttttgcggcccgattgcaactgatttgcggaagttcaccaaaaattaacgggggttcttacaggcgtgcctccagctccgccttgcggtcctcataaccgggcttacccaggagggcgtacatgttgttcttatacgcttccacgccgggctggtcgaagggattgatctccagcagatagccagacaggccgcaggcgtactcgaagaagtagatcagccagcccacgctctgcgcgtcccgggccggggcggtgaccaccaggttgggcacgccgccgtccacgtgggccagcagggtgccccgcatggcctgttcggccacaaaggagagatccttgcccgctaggaagttgagcccgtccacattgtccgggtcgtgtggaatggtgacgctgccgcggctgcgggcgaagcgcaccaccgtctccagcatcaggcgctcaccctgctggatgtactggcccatggagtgcagatcggcggtgaactccacgctggcggggaagagggccttgccgtccttgccctcggtctcgccgaagagctgtttccaccactcgccaaagaagcggaaggagggctcgtaccccaccaggatttccaccttcttgccctgggtatacagggcgtggcgggcggcggcgtactgccaggccgggttgtccgcaccgggggcggccagggcctccatggcctgggcggcgccctccatcagggcggcgatatccaccccggcgcaggcgatgggcaacaggcccacggcggtgaggacggaatagcggccgcccaccgcgtcgggcaccacaaactcctcatagccctccgcgtcggccaggcccttcaaggcccccttgtgggcgtcggtggtggcgtagatgcgcctgcgggccccctccttgccgtacttctcctccagcagggccttgaagatgcggaaggctactgccggctcggtggtagtgcccgacttggagatgacattgatggagaagtccttgtccttcaccagctcgatgacctccagcatggcgtcggaggagaggccgttgccggcaaagtagatgtcgggcccgcccttgtgggtcaggttgaaattgggggagtggagcagctccaccaccgcgcgggcgcccagataggagccgccgatgccgatgaccaccagggcctgggagtcgctgcggatgcgctccgccgccgcctggatgcgggcaaactcctccttgtcgtagtcccggggcaggtgaacccagccggtatacgcgccgcccaggccgctgccctcctccagcttgacgcgggcgctctccagcgcgtccagccggctggtcagccagtcctcgggcagaaacggggtgcagttggaagtattcagctctaacataaattgaccctcctcaaaataaggcttgtcctggctcccagtatacaccaaagcaggccgctttcctagggggattttggaaattttgaggcaaaaaaatgcgcccggcacaggccgggcgcggagaaggacaacggggattgggcggccgcgtcagttcttgagactctgcatgggggccggaatacgtccgccgcgggtcacaaaggcgtcactgctctcggcgtggacgggcatgacgggggcggagcccagcaggccgccgaattccaccgtatcccccaccaccttgccgggggcggggatgaggcggacggcggtggtcttggagttgaccatgccgatggcggcctcgtcggcgatgatggcggagagggtggcggcggtggtgtcgccggggacggcgatcatgtccaggcccacggagcacacgcaggtcatggcctccagcttatccaggtggagggcgcccgagcgggcggcggcgatcatgccctcgtcctcgctgacggggatgaaggcgccggacaggccgcccacgtgggaggaggccatgacgccccctttcttcactgcgtcgttgagcagggccagggcggcggtggtgccgtgggtaccgcaggtctccaggcccatctcctccagaatgcgggccacgctgtcgccgatggcgggggtgggggccagggagagatccacgatgccaaagggcacgcccagccggcggctggcctcctgggccaccagctggcccattcgggtcacccggaaggcggtcttcttgatggtctcggccaccacgtcgaagggctggcccttcacgtccttgagggcgtggtgcaccacgccggggccggacacgcccacattgatgatgcagtccggctcccccacgccgtggaaggcgcccgccatgaaggggttatcctccaccgcattgcagaataccaccagcttggcgcagccaaagccgccccggtcggcggtgcgctcggcggtgtccttgatgatgcggcccatctcggccaccgcgtccatgttgatccccgcccgggtggagccaacgttgacggaggagcagacaaagtcggtgatggccagcgcctcggggatagaggcgatgagcttcttgtcggcctgggtggcccccttctgcaccagggcggagaagccgccgatgaagttgaccccggtggacttggcggcgttgtccatggccacggcgaaggggacgtagctgcccgtctccgacgccccggccacaagagccatgggggtgacggagatgcgtttgttgacgatggggatgccgaactcccgctcaatggcctcgccggtggccaccaggtgctcggcccggcgggtgatcttgtcatagatcttctgacaggcggcctttggatcgggatcggcgcagtccagcagggagatgcccatggtaatggtacgcacgtccagatgctgctggtcgatcatatgtatggtatccaaaatttcgttggtgttgatcaagtcaattcctcctgaaaatcaactgaagcgtgggcggttccggcgggcggggacaagccccgcccctacattacagctcccaaagacgtcccgctgtaggggccgacaccccagggcggcctctcttgcccctgcggggcaattcaccttctgccctcaccggcccgcaggcgggtgtgggcacccgcccctacatatcggtgaggggtgcaccccgctttcggggcccccgcgcgaacccagcgaagcggttcgcgtggggaaaaggaggcccagcggcgggagtgagcgttcgggcttgcccggaagcgaatgatccaaagcttgggccgacgctgtcacgctgcggcggctgcgcgacgccacactgcttacccctccgcgaaaaacaccttgcgcctgcggcgcaactgctttttcggctgcggggctcgctgtgcggctgcgacccacgcctccgcgcttcctgtcacgctgcgggttgggcgcatggccgggtcgctaagcggccattccgcgaaaaatgccgctgggcttcgcccagcctgttttttcctcttcatgtcctcttagctcccctatgcgcctaccctccgcgcttcctcagatccggtgcatggcgttgaaaatatcctcccgctgggcgcggatgtccaggctgcgggcctcaccctcccgctccagcagggcggccagctcggcgaaggggatgtcgcaggcgccggcgtccaccagcataaccatggtgaagtccccctggaggatggtctggctgatgtccagaatgttgacattgtgctgggccagcagggcgcagaccagggacatgatacccacccggtccttgccgagaacggtgacgattgctctcataatagaacagctcctttgcagtttttacggatatgggggacactcactgcagctcatccagcgtcagcccgaaggcgggcaggaagtgctccagaaagtagtccagctcgggcagaccatagccctgcagggcctccagcgtctgctccgcggcctgcttgaattcggcgttgcccgccttgagctcctccacgcatttgatgtgggccgagagcttgtcggcggccttgaccagtgttctgagcccggggtcgtagccctcccgcagcaggggggcaaaggaggggcggagggcctccggcagcatatgcagcagcttgtgggcggagaactgctccacttccctgtaggcgtcccggatgtcggggttgtagtacttgatgggggtgggcaggtcgccggtgaggatctccggcgcgtcgtggtaaagggccgctgcggcggccagaccggggtcggcgtcgccgccgaacacgtcccgccggatcacggccagggcgtgggccagcaccgccaccatgtgggagtgctcctgaatgttctcctgaaaggtgttgcgcatcagcccccagcggttgatgtaccgcatccgggagaggtaggcgaagaacgggtactggtctgacatggtcatccctcctgcgaaagcaaactattctaccacagaagcggccggtttgtaaaccgtcgaaaaaggagggcggcccagggccgccctccttatcttatattactgggtctgcttgacctcaaaggcggcgacgctctgctcaaaggcagagcggtcggcgtcggagccgtggacctccaccttcaccgggtgggagagatccaaggagaacaggcccatgatggatttggcgtcgatgacgtatcggccggagagcacgtccacctcgcaggggcagcaggtggccgcgttgacaaactggcgtacatcctcgatggaggacagcgacacgaaaaactcagacatgaaagggcacctcctaaatgactgtatacaaacggtggggctttgctttataattagggtatccccattatagacaggaacggggaaaaaattcaatgggaaagccgcggtaaaccggaaattctgtttttttcacaaagagccgcggtcatatgcgaggaaaagacatgcgagttgctatctacaccttgggctgcaaggtcaaccaatacgagacgcaggcgatggaggcggagctcaccggccggggccacgccctggtgccctttgacggggcggcggacgcctatgtgatcaacacctgcaccgtcacggcggtgagcgacaagaaatcccgccagatgatccggcaggcccgcaagcgctccccccacgcggtggtggcggtgtgcggctgctacgcccagaccgatccggaggcggtggaggccctgggggtggatctggtcatgggcacggccgaccgcatgggctttctggacgcgctggaggccctcagccccgacggcggacacccggtggtaagggtggacgacgccctgcgccgccgccagtatgagcatctgcccgccggcggcctggaagggcgcacccgggccatgctcaaggtggaggatggctgcgtcaacttctgcacctactgtatcattccctacgcccgggggccgatccgctcccttcccttggaggaggccgcctgtgaggcaaagcgccttgccggggcgggctaccgggagctggtgctcaccggcatcgaaatctcctcctggggacacgatctcaaaaatgggcagggcctgatcgaccttgtggaggcggtgtgcgccgccgcgccggagtgccgggtgcggctgggctccctggaaccccgcaccgtcacggaggacttctgccgccgggccgccgccctgcccaacctgtgcccccacttccacctctccatgcagagcggctgcgacgccacgttgaagcggatgaaccggaaatatgattccgcccggtattatgagagcgtaacattactccgggaacactttgatcgacccggtatcaccaccgatctcattgtgggcttccccggcgagacggaggaggagttcgaccagaccctggactttgtacgccggtgcgccttctccgccatgcacatcttcccctactcccgccgtaccggcaccccggcggccgccctgcccggccaggtgcccaaggcggaaaaggaggcgcgggcccgccgggcggcggcggtggcggaggagctgcgggcggcctggctggagcgctgggtgggggagaccctgaccgtgctcttcgaggaggagaaggagggcctctggcgtggccacgcccccaattatacggaggtctttgccccgggcgagggactacataatgtcataaaagaggtaaaaataacgggaattcatcgggacggactgaaaggaagcgtgctggaatgaaccggaggctgttccccctggccctgagcctcgccctgctggcggggtgcgcccccgcgccggaacccacacccgagcccacacccaccccggccgcggcggtggacttccacacctttctggacgcggtcaacgagaagcgccgggccgtcatcgaggacggggaacccctggatgtctccgcctggacgccggcctttgccgaccagaacaccaccttcacagatggggagatggaacttttgctgacgccccatggcccggaggagaacctgaccatggagcaggcccgggaggacgtggagaccgccttcaccctcctgcgcaccacctacggggcatacgagtacttcggtggcgaccaggtctttgacggcctgcgggaggatgccctggcccggctggaggaggctgaccccggtctcccgctggcggacgtggtggcggaggccctgtataccgtgctgtccccggtggtgcgggacgggcactttgctgttggccgccgacacctgattgagccctatgaactcaacacctactatgtgcccggcgtgtatatcgacacccccgccggactgagcgaagactacataaagcccaccatcggcccggacggggccatcacctatggctttttcgccatgagcaaggacgggagcgatttgccggacaccctgggggatcacgaattgaactgggcactgtgtgagccggcgtcctcctattcctattcccgtgaggttttttacgagggccagtgtcaggggatccccatgctggagtcccggcacatgtccgccagtacgccggagggagaggcccagctggagcggttcgcctcctgtggcggggagtacgccgacgcgcccctgctggtcttcgacgtgcgggggaaccccggtggcagcgaccggtggtttatggagtggttcaaggggtggacagggcagtatgcagagccccgccaggccggcggccagaggttcagccagctgcgccgccagaatccgatgctgagctatccggaggagtggatgggcacatgggatgtctactctgatccaggccgctgggtggagcgggagggctacacctttttattgacggacggcggtaccgcctcctccggggagactgtggtggagcatctgcactcggtggagaacacgctggtggtgggaatcccaagcggcggctgcgccctggttcccaataacatgcacttctatctgcccaacacgggggtagagctctacttcggtaccggtctgtgtttgatagagacggacgagaaccgggacggggtgggctatctccccgacctgtgggtcaaccccgtcgaggccccggtggcggtggcccggctgtgcgggtactatggcctgaaggagccggtgtcgtaggggccgctgccctcagcggcccgcctcgctccggttccgcagggcgccgagcttttcctgccaggcgtccagccgctcccgggggagcagaccgttgatgagcagggacatggccacccccacgccggtgtccagcatgcggttgagagagtaagcgatgtagtcgtccgggccgatggagaacagcagcaggcagagcaccaccccgccgggctgtacggcgccgacccagaagatctgggccagcagaatcaggacgacgataccgccgaagagcaggggcaccagcaacaggtggcgtcccccgtcgggatagaagaccaggtaaatccggtagagcccgatgccgaggaaaccgccgataacggtgccgaacaggcggtttccgccgtggagcttggagtggtccatatccgctcccattccgaagatggcgccgatacaggcaaaggccggattgcggttcaggaaaaagtaaatcagggcgcagagcgaggcggagagggcggttttgaggttgcgcaggccgatatggggcagcggccgggccggggtctccttcatggtatacactcccgtcggggggattccccctttttccataaagaataccataaaacagggggattttccagaccggcgttagaaaccggcgggtttgcgttccggcgtggaatgtggtatgctggagaaaaccaaccggaggaggaacgatatgagccgcgcggacgagctgttcattgaaaattgcaaggagattctggcccacggggtgtgggacacggagcaggaggtgcgcccccggtgggctgacggcgcccccgcccacacggtgaagaaattcggtatcgtcaaccgctacgatctgcgggcggaattcccggtgcagaccatccgcaaaatggccttcaagagcgcggtggacgagcttttgtggatctggcagaagaagtccagcaacatccgcgacctgtccagccacatctgggacgcctgggcggacgagagcggctccatcggcaaggcctacggctaccagttgggagtcaagcaccgctaccccgagggggagtttgaccaggtggaccgggtgctctacgatctcaagcacaacccggcctcccggcggattctcaccagtctctacaatcaccacgatctgagcgagatggccctctacccctgcgcctggtcggtcaccttcaacgtgtcggggcgcaccctcaacgccgtgctcaaccagcgcagccaggacatgctcaccgccaacggctggaacgtgatgcagtacgccgtgctggtgcacttcctggcccgggcgtcggggctggaggcgggggagctggtgcacgtcatcgccgacgcccacatctatgaccgccatgtgccggtggtggaggagctcatcgcccggacgccctacgaggccccaaggctgtggctggacccggcggttaccgacttctacgccttcacgaaggacagcgtccgcctggagggctaccgcttccacccgctggagcagcccatccccgtggcggtataaggagggagcccgatgaatttgatcgcggcggtggacttgaactgggccatcggcagggacggggatcagctctgctacatcccggccgatttgaagcgctttcaggccctcaccaccggccacccggtgatcctgggccgcaagaccctggccaccttccccggcgggcggcccctgaaaaaccggcggaacctgatcctgtcccgcgacccctctttcgcccccgagggggccgaggtgttccggtcgctggaggccctgcgggcggccgccccggcagattccttcgtcatcgggggggagagcgtctacacggccctgctggactggtgcgacacggcctacatcaccaaaatcggccgggcgtgggagggggcggacgcctttttcccagatttggacgccggcccggactgggagatggccgaggaggaggagccccaggagcacgcgggcatccccttccgctatgtgacctaccggaggaggaagccccatgtatgtggatgaaattcgggcctatacgccccaaaatgagcaggaggcggcggatcagcggctgattctggagtacatccgcctgtttccggacaacattctcacccgggacaacgaaatcgcccacctgtccagctccggctttgtggtcaatgcagacggcacccgggtgctcatggcccaccacaatatttacagggtgtgggcctggacgggcggccatgcggacggggagggcgacctgctctccgtggccctgcgggaggcccgggaggagacgggggtggagcatatccgtcccctcagccccgccatcgcctccctggacattctgcccgtgtggggccacgtgaagcgcgggaagtgggtgccctcccatcagcatctcaatgtatcctacctgctggtggccgacgagagcgacgccctccagagccgggcgggggagaacagccgggtgggctggcttccggcggagcgcctgctggagtacaccaacgagtgggagatggacggggtatacaccaagctgctggcccgggcgcgggcgctgctgtgaaacgcataagtggactgtgtggacgtgccctcttgaaaatattgggacaatgtgatacagtaaggatgccaagtgtgccggcacacttctgtcttttgctagcaaaagacaataacaactgacagcagtggagccggggcgcaatttaaaaaaggaggaacaacatgaaacgggcaaaaaagggattggcggcaattctgtctgcatgtatgctgcttagcctgcttcctgcggctgcttttgcagagggggctccggcagcggacacgctggaggaagcggctcctgcgccgatggaggaaaaaggcgcctatgacgcgctgatgcaggcgatcgaagccgctccagatggggaggagaccacggtcgtcctgacgggcgatatcaccgggatgaccacggatcagatcatcaccattccagagaagaaaaacatcgtgctggacatggactgccacagcatcaccgtggcgtcgaactttacgggcaggccgattgtgaacaagggtactcttacggtgacaggcggcggcgtcattgattcatctgcgtctgaaaccggagtgggcgcaatcaacaaccaaaatatacttacgatcgaaaatggaacctatcgcggagcgacctatgccggcggcgcggcaatccggaacacaggggcgtccgcggtactgaccattgaagacggaacctttgagaaggctacatgcgcggtttataacgagggtaccgtaacgattgaagacggaaccttcacggggactacgtgcagccagtgcaacggtaatgtttggggatatacgatccagaatggagctgccgattcccaaatgaccatcaacgggggaacctttacaggggtacagggcgcggtatccgcttctgtggggtacttcgaaatcaacggcggtacgtttaagtcggtcaagtgtgtcaacgattccaagcacacggccacgttctacgccctctatgtggcgggtgaggtcggcgtggtaaaagccgtaatcaatggcggtacctttgagacagagggaacgtataccgcggctctgattggaaacgacaacactggcggggacgggggcatcaatgaaaaggccaccgcggtcatcaacggcggcgtctttaaggccccggaaggagtgtcggccctgaaaggtgcggaaaagactggtaaccccatcatttatggcggcacgttctccagtgatgtgagcaagtatgtggcggagaatgccgcgataaccgaaggcccagacggtacgtttaccgtaaacgaactggatgaaacaaatggtgtggccgaggtgggcggtaggtactacgccagcctccagaaggcggtcgacaacgccgggaagggcgagacggttactctgctccaggatacggcggaggatatcgtaatccccgagggagcggagctgaccctcaatctgaacggaaagaccttgaccaaccacgaggaccacacgattaccaacaagggcactctgaccatcaccggcgacggcacggtggacaacgtgacccacgccagagcggcaatccagaatgagcccggcggcaatgtggtgctcaacggaggcgcgtatacccgcagtaaagagaacggacagaatgccgaagccagcggcgggaattcctattacaacatcgtcaaccacggcaccatggagatcaatagtggagtttccgtcacgcagaacggccagttctccagcatgattgagaacggctggtataacggaagtcagaatacgggcaaggaaaactccgtgctgaccatcaacggaggcaccttctccggcggcctgaacacgatcaagaacgacgactatggcgagctggtcatcaatgacggcacctttaccagcatgtcccaggcagcgttcctgaactggaatgtggccactgtcaacggcggtaccttcgatgcggcgggcgcctccaacggcgtcattctgaacggctatatcgacggcaccatggatcagggcaagctgaccatcaacggcggtaccttcaacgccggggaaaagacggtaatcaccacaatgggcggtggaacccacagcggcgatattgagatcaccggcggcacgctgaacggctccattgtcctcacggacagcagcgagggcgcccggctgaccattacccagaaggccaaggttaccggaaacgtgaccaacagcggcaaggcggatgtggccatcaccaacggcgctaccgtggacggccaggtgtccaacagcgccgacggcaccatgagcgtggtcaacagcaccatcggcagcgtgcccgagggcaccaccgcagaaaagatcgtcattgtcaacagcactgtggatggaactctgaccacgaatactgccgaaaatgcggcggtgatggtgggcggcaagacctatgagaccttgggtgcggcgatcacagcggccaaagccggggacaccatctacgtcctgaaggacatcccagaggcggccggcattgccgtgccctctggtaagaactttaccattgattttggcggccacacctataccctgaaggacccgggagcgggctctgccggaacggagagcaatggattccagttcctgaaggattccaccatcaccctcaaaaacggcaccgtccgtattgccgagggcacgacctccatcaagcgcatcattcagaactatgcaaacctgaccctggaggatatgcacttcttcgccgagcatcaggcggacggcgaggactacgcgctgagcttcaacaatggcagcatcatcttcaagggagatacggatatcgtgaccaccagcgacgaagccattgcgtttgatgtctgtaagtatagtagctatccttctaccaatgtcacctttgatgagagctacaccggcaccatcaacggcaagatcgtgtatgacagcaccgacgcggacacacacaagctgaccattcagggcaacggcaccttcggtgccattgaggcggccagcggggccgcagaggctgcaaagagcggcatcgaggttaccagcggtcactttgccaagcccgtcaacgaggactatttggctgacagcgtcaaggcccagttggagagcgcctccaaccccgaggctccctacagctactatcccagcctggaggccgcccaggccgccgcccagccgggcgacaccattactgaggtaaacgccacgtctggcgagaagaagtacaccgttaccctggactatgccgacggggatacaaaggacagcgtctacacggtcactgaggggaccgagctcaccctgcccactcccagccgctccggctacacctttgagggctggtatgacggcagcagccgggtgagcagcccctacaaagtgacgaaggatgttatcctgactgcggagtgggactacaacggcagcagctcctcctctggctcgacccggtacacggtgagcgtggaggacacggacaacggcagcgtgaaggtgagccccacccgcgcctccaaggggagcacggtgactgtcaccgtgaagcccgacgaggggtatgagctggacaagttgaccgtcaccgacaagaacggcgattccgtcaagctcaccgacaagggcgacggcaagtacaccttcaaaatgcctgcctccaaggtcacggtggaggccgtgttcacggcggtggagccggagccggagggcctgcccttcaccgatgtaacgagcggcgactggttctatgacgccgtggcgtatgtgtacgacaaggggatgatggaggggaccacggacaccaccttcgcccccaccatgaacctgacccggagcatgatcgcccaggtactctacaacctggaggagcggccggaggcacccggcgcggcgggcttccccgacgtggcggcgggcgcatggtacgccgacgcggtgaactgggcggcggcccgcggcatcgtgaaggggtacgacaccggcgcgtttggaccggaggacagcgtgacccgggagcagctcgcggcgattctgtaccgctacgcgcaggcgaagggctatgacaccacccagggcgggatggccgtgcgggagttcagcgactccgccagcatctccgactgggcgcaggaggccatggcgtgggcggtcaacgcgcaggtgctctccggcaaggggaacggcgtcctggatccccagggcaccgcgacccgcgccgaggtggcccagatgctgatgaacttcgtcgagcacgtgggctgaacacagttccattcaaagagcaataaaagagccccccggaatcccattgggattccggggggctcttttattgcctattcggcgttctccttcggctcggagggggccagcttggtgacggtggcccactccacccggcggtcggtcagctcctccacccggatgtgcaggccgtacagctccacctcggggtggctgccgtcctccgggatcacgttgagctgggcaaagaccaggccgcccagggtctcggactcctcgtcctcgggaaattccatgtccagggcctccgccacatcgtccagctccgccgagccggcaatgcgccagcggttgtcgcccagggcgatgatctcctgatcctcctggggatcgaactcgtcgtagatgttgcccacaatctcctccagcagatcctccatagtcacgaggccggcggtgccgccgtactcgtccaccacaatggacaggtggatcttccggctctgcatgtcgcggaagagcttatcggtgcgcaccgactcgggcacgaaataggccgggcgcagcagctcccgcaccgggcggggggaggttttgcgggcgttgagcagccaatcgcgggtgttcaggatgccgatgatgtcatcggcgtcctcctcatacaccgggaaacgggacaggccggaggactcgatggtctgcgcgatctcctccgccgtgtcgtccacccacagcatcaccatgtcggtgcggtggatcatcacgtccccggcggtcatgttgtcaaattcgaagatgttctcgatcatctccttctcaccggcctggatggcgcccttctcctcgccgatgtccaccatcatgcggatgccttcctctgatacctcatcgtcctcctcgttggggtcgatatgtaccagacgcagcacggcatttgtggagacggtcagcagccagatgagcggccgcatgacggcggccaggaaggccaccaccccgcaggtgaagcgggccacctgctcgctcttcttcatggccacccgcttgggcaccaactcgccgaagaccagcgtgaagaaggagaggataatggtgatcaggataacggacagggtgtgcaccgcggcctcggcggcggcggtcagggcatactgggcggcgaaccactgggacaggcggccggccaggttgtcggcggcgaaggcggagcccagaaagcccgccagggtgatgccgatctggatggtggagagaaacccggtgggctgctccacgatgtgcaggagacgggcggcctttttgtcgccctcctcggcctggtggcggatcaccgcctcattgagggagatgaccgcgatttccgtggcggcaaagtatgcgttgattgcgatgagtatgacctggagtagaagctgaggccataaagggggctgcaagatgattcctcctctttctgaaacgacagattgcatgtgttccatgcgttacagaacttagtatatcatatttatgaaaaaaatccataagcatgcggaaaaaagttgcggcgcatgttataataacctgtacgcgtgagagggggaaaccgggatggaaaccaaggaacggacggaggggcggctgcggcgcttgctggagcagccgggcaccttcctgaaatgggtgctgtttgccggggtgatcggcctggcggccggcggggtcagcactgccttttattacgcgctgaacgccgtcacagccctgcgggaggccaacccgtggcttctgtggctcctgcccctggggggcgtggccattgttctgctctaccggatttgcggcatggagaaggaccggggcaccaacttcgtcctggtggctgtgcgggagaaccagcccctgcgcctgcgcacggcgcccctcatcttcgccgccacggtgctcacccacctgctgggcggctcctccggccgggagggggccatcctccagatcggcggctccctctcctccaagatcggacggtggatgcacctggacgacaaggacagccgtatcatcaccatgtgcggcatgtccgccgccttctccgccctcttcggcactccgctgaccgccgccatgttcgccatggaggtgaccagtgtgggcgtgctctactacgccgccatcgtgccctgcgtcctctccgccattatcggcctgtgggtggcccagctctgcggcgtgccgcccaccgccttctccctccagggggtgcccaaccttacccccgtcacccttctccagtgcatcggcatgggggtcctcttcgccctgctttccatcctgttctgccggatgatgcacgccgccccccggctgtacgacaagtacctccccaaccccgtggcgcgggccgctgcgggcggggcgctggtcatcgcgctgaccttcctggtgtggctgtggaacccgggcacctacgactacaacggggcgggcacggcggtgatccacgccgccatcggaggggaggcccggcccgaggcgttcctgctgaagatgctctttaccaccattaccctgggggcgggcttcaaggggggcgagatcgtcccggtgttctttaccggggccaccttcggatgcaccgccgcccccctgttggggctgcacccctcctttggagcggggctgggcatggtgtgcgtcttctgcggcgtcaccaactgccccatgacctccctgctgctctccctggagctgttcgccggggacagcctgggcatgttcaccggccagagcctgggactgttcgccgtgtgcatcgccgtgtcctacatgctctccggctattacggcctctacagcgagcagaagatcatctacagcaagctccggccggagtacatcgacaagaaggccaatgacgatgagtagggggcaggagcgtcagccttttgcagacaggcggcccaactcaattcccagagccagggcataatagaagcagccctcccgatccagggcctttttccggacgctcatgacttgcccgccatcgcggatgagctggagagcccgcttgactatctggcaggccgaaccggtgagctgtagggcgcagcatccctgacgcgccgtttccccttgacagagcaaggaaatccacatagaatgaacatcttcgacagtatgcgccccgcccgacgacggcccaacaacagcatggaagtaggaaaggaaccttgagcagctatgaacatctttgatatcatggggcctattatggtggggccggttccgtggggcgcaagcgccccacggattcctccgaaatgattgggatgctcggcggaaatgaattccgcctgcgccgaggttttgcctttcgcaaaacgctcgtacgcgccgaaggcgcggggcgcatacgcgcccgacgacggcccaacaacagcatagaagtaggaaaggaaccttgagcagctatgaatatctttgatatcatgggacctattatggtggggccgtcgtcgtcccacacggcgggggcggcaaggatcgggtttctgacccgcaggctgctggggagcacgccccggcgggcagagctgctgctccacggctcctttgccgccaccggcacgggccacggcaccgaccgggcgctggtggccggcctgctggggatgcggccggacgacgcccggctcccccgctccttcgagctggcggaggcggcggggatggagctgaccctggggcgggcggccctgcggggggcccaccccaacaccgtgctgctccgggtggaggacgcggcggggaaacggctggaggtgacggcctcctccctggggggcggccgggtgcaggtgtgcgccatcgacgggctggaggcccgcttcaccggcgagctgcccaccctcatcatccgcaaccaggaccggcccggcatggtggcggaggtcaccggcgtgctgtccaagcggcaggtgaatatcgccaccatgcagctctaccgggatatgcggggcggcctggcggtgatggtcattgagagcgaccagcccatctgggcggcggcggtggaggagctgcgggcctgcccgggtatcgagcgggtcacctatctgaacatggagggggaggactgacatggcgttttcatcggtggaggggctgctccaggcggccgggcagggccccctgtggcgggcggtgctggaggacgatctccgggagcggggggtggacgaggcccgctcctgggggcagatggccgcgctctggacggccatgaaggccccagtggaggagtatgatcccgccgcccgctcccgcagcggcctcaccggcggcgcgggggccaggctggagggggaggggccggggctgtgccctccctttctgcggcaggtgatcgccgccgccctcaagacgggggagtgcaacgcctgcatgaagcgcatcgtggccgcccccacggcgggggccagcggggtgctgcccgcggtgctcctccccctccaggccagggacggcctggacgaccgccggatggtggaggccctctatgtggcggccggcttcgggcaggtgatcgccacccgcgcctccatctccggggcggaggggggctgtcaggcggaggtgggctccgcctccggcatggcggccgccgccctggtttatgtgatgggcggcacgcccggccagatggcccacgcctgcgccatggccctgtccaacaccctggggctggtgtgcgacccggtggccgggctggtggaggtgccctgcgtcaaccggaatgtgatgggggcggtcaacgccctgtcctgcgccgagatggccctgtccggggtggagagcgccatcccctgcgacgaggtcatcgacgccatgcgggccgtgggcgatgctttgcccgcctcactccgggagaccgggagcggcggtttggcggcgacgccgacgggacggaggcttgcggagcggctgtagaggcgcactgtgtgcgcccgcgggcggccacaagggccacccgcagagttgtaggggcgggtgcccacacccgcccgcggctgcgggacacggtcagagccattggtccggcgggccgatgtgggcagaaggggaactgacacgaaggggcaagagaagccgccctggggcgccggtccctacagaccggggctttggggcctgtttgaaacatgtcaacaggcccaatcggcgggccttttgaccgctggacggcgcaatttttccttgaaatccgtccggattcccgcgaaaaaattgcttgccagcagccgtaatccctcgctgctgggcacatcgccaagtttcaaacaagccctagtctggcggggaagagaaccacgcccgcaaaaccgaagaaaagaggaaaaaccatgctgcaattcaatcattttaactttaatgtgctggatctggagcgatccctggccttctaccggcaggcgctggagctggaggtggtggaggagaaggaggccggggacggctccttcaagctggtgtacctgggggacggggagaccggcttccgtctggagttaacctggctgcgggaccgcaccgaaccctacgatttgggggagcaggagttccatctggccttcgtcaccgaccgctttgatgcgctgctggcgcggcaccgggccatgggctgcgtatgctttgaaaacccggatatgggcgtttacttcattgaggacccggacggctactggatcgagctcgtcccggagcgggggtaaggggtgagtcagaccataggcggccggctggcctacgccgatctgctgcggtgtaccgccatgctggcggtgatcgtggtccacataactggcggggccctggaggcgtcgccggtgggaacgcccgattttatggtgctcaacgtgtacgacgggctgacccactggtgtgtgccggtgtttgtcatgctctccggcatgttcttgctggaccccaagcacagcctccccccctccaagctttttttcggccatatgctgcgtatcgccgccgccttggcggtatgggggacggcctatgcgctggtggaacgggtacaggtgcacggcctgagctgggagagcgtccgggcagccctctatcaggtgctcctgggaaagacctgctttcacctgtggttcctttatatgctgctcggcctgtatctggtcaccccggtgctgcgtgccttcgtgaggggggcaggccggggggatttccactggtttttcctgctggtatttgtcttcaccttcctcctgcccacccttctgcgcctgcggcccagccagacggtgagcctctaccagagctacctgaatatcaagctggtgctgggctatgtgggctactatgtactgggttattacttaaaggagtatacactgagccgcccggcggagtacctcatctacctgctggggatcgcaggggcggcggtcaccgtggggggcaccgcctggctgtcccagcagcgcggggcgctggcccagaccttttacaactatgacagtcccaacatcgccctgatgagcacggcggtctttgtgctcttccgctatttgctgggggtgagcgacgagcgctcccgccgccagcggttttccggcgtggcgaaggtgtccttcggcatctatctggtgcacgtgttcttcctcatgctgctgcggaacttcggcattaccgccctgtccttcccgcctgtgctgtcggtgccggtgctgacggcggcggtattcctggcctccctggcggcggcgtggctcctctccaaggtgccgttcgtgggcaagtatttgacttaaaggagaagcggcatgctcttttccagttcggtgtttctcttcctgttcctcccggtggtcctgctggtgtattacctgcccctgcggaggtggcggcaggggcagaacgtgtttctgctgctggcctccctgggcttctatgcctggggggagccctggtttgtgctggtcatgctgggctccatcctggccaattacggcttcggcctgtgggtggatgcctgcaagcgggcgggacggacctgcgcgccccctcttgtgaccgccctggcggtgaatcttggtatcctgtttgtatttaaatacctgacgtttacactgggtattctgaaccgcctgggggcggcctttgtcattcccggtattgagctgcccatcggcatctccttctttaccttccaggccctgagctatgtgctggacgtccaccgggaccggggggaggtgcagcgctcgcccctgaaggtggggctttacatctcctttttcccccaactcatcgccggccccatcgtcaagtatgagacagtggcccagcagatcgaccaccgcaaagagacctgggcggacttctccgccgggtgcagccggtttatcgtgggtctgggcaagaaggtgctcctgtccaaccaactggccgtggtggccgaccgggcctttggccagggggacggcctgtccgcctctttcgcttggctgggcgccctgtgctacaccctgcagatctactacgatttctccggctactccgacatggccatcggccttggcaagatgttcggcttccacttcctggagaacttcaattacccctacatctcccggtccatcaccgaattctggcggcggtggcacatctccctgtccacctggttccgggactatgtctacttccccctggggggcagccgggtggactccagggccaaacacatccgcaacctgttcgtagtgtggctgcttaccggcatctggcacggggccaactggaccttcctcgcctggggactattctacttcgtgctgctagtgctggaaaaatacggtgggctgggccggggctggccggtgtgggccaaatggctgtttaccttcctgatggtgaactttgcctgggtgctcttccgggcggacagcctggcggcggcggggcagtacctccaggccatgttgggcctcggcgccggggggtgggacgagctgaccgccctctacctgcgggagaactggacggtgctggcggcgtcggtgctcttcgccggaccgctggccccccgcctgcgggactgggccgcgaaaaaggacagccccctgctggatgcgggctacgccgtgctggcggcgacggtgttcctggtgtcggcggccttcctgatcaagggtacctacaaccccttcatctacttcaatttttgaggaggcagaagcgtgaagcgacgcaataccatgaccgccgcggtcttcctgctggcggtggcggcgggattcctgctactggccacctccttcttcggcggggaggggaagtttgaggccctgctcaaggccttcgttcagaaccgggacgtgatggcctttgtggacggggcggagtccgccgtcaacggcgatctggaccgggatcacctgtttatccagctctacggcggcgtgcagcgtctctccggccgccgggtggtggaggacgcggtgggggaaaataccgtagtccggttatccaccggcgggctgaattttgtggatctccaggccgcgcccggcgtcgggccgcaggtggcggagaacgccgccgccacggcggcgttttcccaggacctggaggccctgggaatcccctacctctacgtgaacgccccacagaagctccagcgtggggaggcgctgctcccgaccggggtggaggagtatggcaacgagagcgccgacgcgttcctggaggagctggagcggcaggggacggactatgtggatctgcgccccctgtttgaggagaacggcatctactccaactggtttttccgcaccgaccaccactggaagccggaggcggcctttttcgcctggcaggcgctgacggacgagctggaggagcggtacggcctggccgccgacccggccctcaccgatccggccaactgggatacccgggtgctggagcacttcttcctgggcagccagggcaagcgggtgggctccctctacgccggggcggacgacatcacgctctataccccaaaattcgattccgagctgacctattcctgccccgcctacggctttacccgcaccggcccctttgagacgtcggtgtgcttccccgagcgggtggcccagcaggactggttcaacggcaacccctatacctactacgccggcggcgactacccaatcgccaccatcaccaaccataaaaatccggacgggccgcgggtggtgctgctgcgggactcctttgcctgcgccctcacccccttcctggccctgtcctgctcggagctgaccaccattgatctgcggtatttcgagggggatttgctggacaccatcgcgggcctggagccggatatagccctcaccctctacactgcgagcaccacccggctggacaacctgttccaatatgaacatacggaggaatgagccttgaccatacagagacaaccctccctccggcggctagactggcactatatggccatgcagatcggcttttgggccatgtttgcctccatcgtgggctatcagaccgccctgctgctggatcggggcttctccaatggggaggccgggctgatgacctcggtgcgctgcctggcgggcattgtgtgccagcccctgctggggggctttgccgaccggcacccggaattccccctcaagcgtatcgtctccctgtccatgctcctctccctgggggtgagcgtctggtactggctcgccccgggcatggggctgggggagaccgccctggtgtgggcggtcatcggcgggctggaggtgtcctcctaccccctcatggacgccatggccatccagttcatcaacgacggcgtccccatccgctacagcctgggccggggactgggctccctggcctacgccctgacctgtgtgttcctgggcttccaggtggggcgctccggggtggagagcacgctgctcacccatgtggtgctggtcgcggcggagatcgccctggtggccacctacccgccctaccggggcaggccccgcgcccgggatgcggaggggccgaagccacagtcggccgtggccctgctgcggtccaacccgtccttcaccctgatgctggccggggtgctgctgagcctgacggcggtgctccccctgtccaatttcctggtaaacgtggtcaccagccggggcggcaccgacgccgatctgggcctggccatgtttgtgatgggggccttcgagctgcccaccgccttcctcttcccaaagctgctccgccggttcggcagcgggcggctgctgctcatcagcgctgtgttcggcaccctcaaggccgtggcgctgctgtgtaccttcaactacgccggcgtcctgctggcccagcccctgcaactgctgggctacggcctgttcaccccggcgtcggtctactttgtcaatgagtccgtgcccgaggctgaccgggtgcggggccagacggtgatgatggtggcctccaacggcatgggcggaatgctgggcggcctgctggccggctggaccttggatatgggcggcgcaaactggatgctcgccgcctgtatcgcctgcggctgcgccggtgcggccctctgctgggcggcgctccggtgtccggcccggcggacggtttgaaaaaattgtaggcggaaatcataaatttaacccatttcacccttcccaaatggggcgggatggtgtatgatatctgcggatttttgttgagacctggagattcggatacccgacggagggacgattgtatgaacatgagaaagaccaaaatcatctgcaccctggggcctgcggtggaccatgcggagaccattgaacggctgatccggaccggcatgaacgctgcccgcttcaacttctcccatggcagccacgccgagcagttggcccggctgaatatgttcaagaaggtgcgggacaccctgggcgcccccgtggccaccattctggacaccaagggccccgaaatccgtataaagacctttgccgacggccccgtgactctggagcagggccagggatttatcctgaccaccgatgacgtgcccggcgacggccgccgggtgagtgtcacctatgccaacctccacaaggaggtggggcccggctgccgcatcctggtggacgacggcctcatcgagctgcgggtccagaaggtagagggccacgagatccactgtgaggtggaaaacggcggccccctgtccagcaacaagtccattaacatacctgatgtgcacatcctgttgccctccctcaccgacaaggaccgggaggatctgaagttcgccgtggacaacgacttcgacttcatcgccgcctcctttgtgcgcaaggccagcgacgtggaggacatccgcgccgaactccgaaagcacggcggcgacaatatccgcatcatcgccaagatcgagaaccgggagggcgttgagaacctggagggcatcatcgccgcctccgacggcatcatggtggcccggggcgatctgggcgtggagatccccgcccacgaggtgcccatcctccagaaaaagatgatcaaggccaccatccgggccggcctgccggtcatcaccgccacccagatgctggactccatgatccgcaatccccgtcccacccgggccgaggtgtccgacgtggccaacgccgtgttcgacggcacctcctgcgtcatgctctccggcgagacggcctccggcaagtaccccattgaggccctgtccactatggttaacaccgtcaccgccgcggaggaggctatcgactattggggccgcttccgggagcgcagcctgttgcccgtggtatccggtatcagtgacgcaatcactcactcctgctgtctgacagccatggatctgaacgcctcggccatcctggcggccacccggtcgggctacaccgccaaagtcatttcccgcttccgccctgcctgccccatcgtggctctgtgccagaatgagtccacccggcggcagcttgccatctcctggggcgtgcacccctacctgtccggcgaggtggattccaccgaccggatgttctccctggctgtggatgtggcccgtaaggagaacgcagtccagatcggcgatacggtggtgattaccgccggcgtacccctgggacagtccggcacaaccaacctgatcaaggcccagattgtggagggtggcctgtaaaaaactgtaagaaggaacgcataacaagaaccggaccggctcctacgtgtgccggtccggttctttctgaagggcccgcggcccctcagatggtgccgccatagtctatcacagggggttcgtcgtgtcaaaggcggcggcgttctctggggagaagatggggacggcgatgcagcagacaccggcgctggcgtactggatggccgcgttcctggtcatgccgatcaccgctatcctacggtatactggatgcttccacaaaagaaaagggaccgcacgcagagccgcggcatacaaatgggaaaaggggggagcatatggagaaccgcattctggcccggctggatggccgggcggacccggagtggctgctcaccctgctcagcgtgctgccgctcaacacctacaccctggaggagtggaacgaggcactgtcccaagcggcagggaggcggatcttctgcccgtcttaccggacgttatccgactatttacaccggctggttttaggagtacaatagccttgtagaaactgcacaaggaggtgccccatgaaactgacctttttcggcgcggcaagggccgtcaccggaagctgccactgtgtggagtgcgggggaaagaagattctggtggactgcggcttgcagcagggccgggacgagcgggacaaccaggagctggactttgccgccgggtacatcgacgccgtggtggtcacccacgcccacatcgaccactccggccgcatccccctgctggtgaagcagggcttcaccggcaacatctactgcacccgcctgacggggcagcttctgtccatcatgctgcgggactccgcccacatccaggagagcgacgcccagtggcagaaccagaagggcaagcgggccggggaggagccggtggaacccctctacaccgttcacgacgcggaggaggcggtcaagcgcatcgtcacctgcgagtacggcaccaccctccagatcgccgacggggtgaaggtgcgcttcgtggacgccgggcacctgctgggctcggccagcgtggagatgtggctcaccgagggggacgacacccgcaaggtggtcttttccggcgacatcggcaaccgggatcagcccatcatccgcgacccccagtacatcagggacgccgactacgtgctcaccgagagcacctacggcgaccggctccacgacatggacaaagacccggactacaccgccgatctggccgccatcatcgacgagaccctgggcaatgggggcaacgtgatcatcccctccttcgccgtgggccgcacccaggagctgctgtacttcatccgggagatgaaggagcagggcctcgtcaagagcgtgcccggcttttccgtggtggtggactcccccctggccggcgaggccacccgcatcttctccggggatctccacggctatctggacgaggaggccatcgccgccctcaagggcggggccctgttccagttccccggcctcaccatcaccgagagcagcgatgagtcccgcgccctcaacctggaccctaccccgaaggtgatcatctccgcctccggtatgtgcgacgccggccgtatccgccaccacctcaagcacaacctctggcggccggagtgcgccgtggtgttcgtgggctatcaggccgagggcagcctgggccgacggctcctcaacggcgtcggctcggtcaagctcttcggcgaggagatcgccgtgcgggcgcggatcgtcaacttccacggcctctcctcccacgccgatcgggacggcctgctgcggtggatcgagcacttcagcccccggcccaggcaggtgttcgtggtccacggcgaccaggaggtgacggaggtctacgccaacaccctccgggaaaagggactggccgcccacgccccaaactacgaagaggtctacgacctgctggataaccagatgctctcccccggcctgccgccggagaagaagcccgagcccgcctccggcggctcgccggcctaccagcgcctggaggatgtgggccgcaggctcatggaggtcatcgcccacaacaagggcggcaccaacaaggatctgggtcggttcgccgaccagctccgcgccctcatcgagaagtgggatcgctgacgcgcgtcccaaacccccggcccgcagggccgggggttttccgcgccccgcatccgcgcaagagcgccgccagctttgctggcggcgctcattttgtatttattcggccaggctgctgtggccccgcttgaggtagcgtccagcgccccgcttgcccacgaactggttgtcccgggccaccacttctccgcgggagagcaccaggtcaatggccccctggagctccataccctcatagcaggtgtaatccaccgccgagtgcagcccggcgtgggtgagggtgcggcgcttggccgggtcgaggatgaccacgtcggcgtcggcgccgggctggagggtgcccttccgggggtagaggccgtagaggcggctggggttggcgcacagcaggcgcaccagctcgcagatcgacaggcggcccttggccaccccctccgagtacagcaccggaagccgctcctccacgccaggggcgccgttggggcaggcggtgaagtcacccgcgccgaactgcttctccactgcgaagcggaaggggcagtggtcggtagccacggcgtcgatcaccccgtcctggagcccctgccagagggcgtcacagtccgcctgggtccgcaggggcggggacatgacggccttcaggccctcctgggggtctgcgtaggcggcctcggtgagggtgaggtactgggtgcaggtctccacgcccacgcccttctgccgctgggcacgggccttgcgcacctcggccaggccggcggcgctggacaggtgcaccacgtacactggcgcctccccggccatggcggccaggtggagcaggcggctcaccgcctccgcctcacagcgggcggggcggctcctggcgtggtagataggctgggtgaggccctgggccttgtaccagccccgcaggtagttgaccactccatcgttctcgcagtgggcggggatcacgataccgtcctccttggcctggcggagcacctggaacagggccccgtcgtccaggccaaagtcataggtcagataggccttgaagctggtgataccctcccggtcggcgagttcccccatctcccggagcacccgttcatccacatgctggagcacgccgtggaagccgtagtcgatgaccgcctttccgtcggccagacggtggtactcctccacctggtgccacagggagcagcccttggggccgaaggccatgtgatccacgatggtggtggtgccgccgcaggcggcggccacggtgccggtgtagaagtcgtccaccgcccggtgggccccggcctggagatccatgtgggtgtgcacgtccaccgcgccgggcaggacgtacttgccggaggcgtcgatcacctgggcgtccgggaccgacagccccgcccccacggccttcaccacgccgtcctccaggagcaggtcggcccggaaggcggcggtgtcgctgacaatggtgccgttttgaatgatggtacgcataagaaccccctttatcagatgtcggatgtggaaaccaatgtgttcagcggtcctggcgcttgcacagggcgctgtaaatcacgaaggcgaacacacagcccagcaggtaggagctgtcgtagatccacctgaggacgggaataaactggcacacgaaaatgaaaatgaacaggactgccatggtcaccagggccagcacgttccagccgccctgatagtagtaggcgccgccgtcctggtagtagaggtcgggcaggcggagacggttgcggtactggctccacagggccgccagacagatgccggtgatgggacccaggaacacggccagggttccatttaaagtatacacgtagctctcgggattctcaaccagtttccagggcaggaagcagatggagaggatcgtggccaccacgacggcctttttgtaggtgagcaccttgccaaagagggaggagaacaccacggaggcggccgccaggttgcaggctacgttcgtggtcagggtggccaggatgatgaacagggagaagatgatcaccacagcgggattgccgaagtgggagaccagaatgctgggatcccagaaggcctcgccgaaggccagctcggagccggaggtgccgcagatgcccacaaagacgatgaaggccgtcatgatgggcgcaccgatgagctggcccttcacctgggccccctcagtcttggcgtggcgggtgtagtcggagaaattcagggcgatggtggcgtcaaaggcgatcatggaagtcagggaggggaagaactgagaccagaagctctcgccgttgccgcctgccacctgagtggtgaacagtgcggcaaatcctcccttctgactggccagccagaaggcccagacaatgactacgccgctgagaatgatcaggatgggggcggcgaaatcctccaggaagcggatggcccggctgccgtggtagccgatgtagaaattgatgagtacaaacaggccgaagctgaggaagctgtggaacgccagaccggtgtaggccgggaagatgacggcgatgatggcgtccagagctgtgccgccgatccagttctgaatcccgaaccacaggcagcccatgaaggcacggatgatggtgggaatggccgtgcccttgggtccgaataccatcttggacaggacgggaaaactggcgccgtagcgggagccgaactttcccagcaggatggaggggatgaggaccagcgtgtggcccagcacgcagataaacagcgcctgataccaggttaggccggcggacagcagggcgctggccatcatatacacgggaatggaaaccaggataccggtccagagggttatgtagttcttggtggaccactcgcggccggacaggggaatgggctttgtgtcctcggtgtagatatttttgtgggactggatttcctgaacgccctccggggtcagctcaaccacgaaggagcgctccgtctggagctctgccatagaatagcctcctctgttaaatggataaaacaaaaaataattagcgctaaatatttttcagatcaataatataccggagaactcccgttgtaaaggtcaaatctgatgaaaaaccagtaaattttttgtgcagaaaagcaaagaaaagagagccgtataactttctcctggtctgccatactaaccccatcaaggaagaaacaggggaagcgcgatggaacaatttcaactcaagcccacaattttctttggatcggacgccctggcggccctggaggggctggccgggcggcgggtgatggtgattaccgactccttcctggcccagtccggcctgctggagcgggtacgcgcccgcctgcgggactgcaccgtggaggtgttcgaccaggtggtgcccgacccgcccctggagctggtggcccagggggccagggcgctggcggagttccgcccccaggcggtggtggccttcggcggcggctctcccatggactgcgccaaggccatgctggagttcggcaagaagctgggggccggggcggacatccgctttgtggcggtgcccaccacggcgggtaccggctcggaggtcacctccttcgccgtgctgaccgaccgggcgaagggagtcaagtaccctctggtagacgacgcccttctgcccgatgaggccattctggacccctccctgctggcgggggtaccccccgccgtgacggcggacacaggcatggacgtactcacccatgccgccgaggcctacgtggcccgcggggccactccttacaccgacgccctggcggagaaggcatttaccctggcctggcagaacctgcgccccgcctgggaaacggcgggggagagcggggccaaagggaacatgctgctggcctccaacctggcgggcatcgccttcaacgccgccgggctgggcatctgccacagcctggcccatgctctgggcgggcggtttcacctcccccatgggcggctcaacgccctgattttgccccacgtcatccacttcaacgccgccgatgggacagcggcggagaaatacggacgtttggccaggctgtgcggcctggcggccaatccgcgctccctggccgcggggctgaaccggctgcgcgcccagctcaagctgcccgaacgcctgagcgcctgcggagtggagggaaaggagctcaccgctgcgctggacggtctggccgaagcggcgcaggcggatctctgcgcaccctccaacccccgccccgcggcggcggaggacttgaagagtctgctgagggagctggcgtgatggaggagaccttattatccgtcggcatcgacaccggcgccgcgtctccccagacaggccagcctgtttgggggccccatgtgatgttcgcatcctcggcggaagtgaattccgtctgcggaaaatctccgcgctgcgtcgattttacgggcatgcgcccgccccgcagagcgggggcccggtggtggaggtgccgaaatgagtgaaaccctgttatcggtcggcatcgacatcggcacctccacaacccagctcattctctcccgcctgaccctggccaaccgggctaaccccttctcggtgccccgcatcgccatcgaggatcgggaggtgctctaccgcagcgggattcacttcacacccctgctctccgacaccgtgatcgacgccgagggggtgcggaccatcgtggcggaggagtaccgcaaatccggctttgcgccggagcaggtggacaccggggcggtgatcatcacaggagagaccgctcgcaaggaaaacgcccgggaggtgctctccgccctctcccagttcgccggggactttgtggtagccaccgccgggccggatctggagtccattctggccgcccggggggcgggcgcggatgaatactccagggagcatcacacggatgtattacactttgacatcggcggcggcacctccaacctggcgctgtactcccacggagagctggcggccaccggctgcctggacgtgggcgggcggctgatcaagcttgaccgggaaggaaccgtgacctatgtctcaccggtgctgaagcgcggggcgatgtgggcatcgcctcctaccgttgggcaaaaggccgcgccggaggggttggagcccgtcatccgctccatggtggaggccctggagcaggcggcgggcctgcggcctgggcgggaccggctggacgcctttctcacccagggaacccgctgggagccccgggcggtgccggtggtctccttctccggcggcgtggccgactgcatctacgcgccccccggcgactggaaggcctacggcgatatcggcgtgctgctgggacgggccatcgcggcctccccggcctttcagggcgcggggcgcttccggggggaggagaccatccgggccacggtggtgggggcggggagccactccaccgagctgtccggttccaccatctactaccgggacatggccttccccctgaagaacctgcccatcctcaagctgactggagaggaggagcggggggacgccgccgccctggcacagtgcatccgggacaagctggggtggtttgccgacgagggcgggctgagcccgcttgccctggccctgcggggggagggaaacccctcctacgcccgggtggacgagctggcccgcgggattgccggggggctggaacccctgcgcgcccaggggatcgcccccgtagtgctggtggaggccgaccaggccaaggtgctgggtcaggccatggcccagagggtggagggccctctcctctgcctggacagcgtgggggtggacaacggtgattatatcgacatcggcgcgcccgtggcgggcggcgcggtattaccggttgtcatcaagacgctggtattcaacaaatcgtaaccgcgaaggagcgatcacatgatactcaaaacaaagctgctggggcacgtgtacgagtttaagtcggtaaaggacgccctggccaaagcaaacgaggagaagtccggcgaccggctggcgggcattgcggcggagaacgccgaggagcgggtggcggccaaggtggtggtggccaacctcaccctggccgatctgcgggccaaccccgccgtcccctacgaggaggacgaggtcacccgcatcatccaggacgacgtgaacgagaagatttacgaggagatcaggaactggacggtggccgagctgcgggagtggctgctggatgagaaaaacggcggagacgccatccgccgggtgagccgcggcctgacggcggagatgatcgccgccgtggccaagctgatgagcaacctggatctcatctacgcggccaaaaaaatccgcgtcaccgcccactgcaacaccaccatcggcctgcccggcaccctgtcctgccgcctccagcccaaccatcccaccgacgatcccgacggcatcatggcctccctgctggagggcctcaccttcggcgcgggggacgcggtgctgggcctcaacccggtggacgacagcgtggagagcgtccggcgggtgctggaccggttccaggagatcaagacccgctgggacatccccacccagatctgcgtgctggcccacgtgaccacccagatggaggcggtgcgccagggggccccctgcgacctgatcttccagtccatcgccggcagccagaagggcaacgaggccttcggcctggacggcaagctcatcgaggaggcccgccagctcgccctgcgggagggcaccgccaccggccccaacgtcatgtacttcgagaccggccagggctccgagctgtcctccgaggcccaccacggggccgaccaggtggtgatggaggcccggtgctacggcttcgccaagcggttccagcccttcctggtcaatacggtggtgggcttcatcgggccggagtacctgtataactccaagcaggtgatccgggcgggcctggaggaccacttcatgggcaagctcaccggcatccccatgggctgcgacgcctgctacaccaaccacatgaaggccgatcagaacgacatcgaggatctggccgtcctcctcaccgccgccgggtgcaactacttcatgggcatcccccacggcgacgacgtgatgctcaactaccagaccaccggcttccacgagaccgccgccctgcgggagctctacggcctcaccgccatcccgcccttccaggcgtggctggagaagatgggctttgtggaaaacggcaggctgacggagctggcgggggatgcgtccgtcctgctggcgtgaatcggcggcccacacgcgcaccctgtagggcgggggcttgcccccgccgcctactctcatcccgtaggggcgaactgtgttcgcccgccctatatcattgaggtgacaatatgaacgaacaagagctgcgctccctggtggagcgcatggtgctggagctggcgggccagcccaacgccgcggccccggccaaggccgccccggtgaccgccgctgcggcggccggcggctgcctggacgacatcacggagaccgatttgcggcggcaatatctggtcaaaaaccccagaaacagtccggccttcctggatttaaagctgcgcacccctgcccggctgggcctggggcgggcgggcgcccgctataagactatatccatgctgcgcatgcgggccgaccacgcggcggcgcaggactcggtgttttcccacgtggacgacgcctttgtggaaaaaaacggctttgtccctgtccagaccctgtgccagaacaaggacgaatacctgacccgccccgaccggggccgccgctttgacgaggccaatcaggccatcatcaaaaagaccctgggccagaaccctaaagtggttctggcggtgggggacggcctgtcctctgccgccatcgaggccaacgccgtggactgcatccaggcggccagggcgggactcaagacctatggcctggagagcggcccggtgctcttcatcaaatactgccgggtgggcgcctccgaccacattggggagctgaccggcgcggaggcggtgtgcctgctggtgggggagcggcccggcctggttacggcggagtccatgtcagcctacctgacctacaagccccacatcggcatacctgagtccaagcgcacggtgatctccaacattcaccgccagggtaccaccgccgtggaagcgggcgcgcacatcgcggagctgatcaagaccatgctggagaaaaaggccagcgggatagatctcaaataggcgggagatcgtagggggcgatgcccacatcggcccactcccccgtccctgcgccatccggcgggcgggtgtgggcacccgcccctacaaaacaacggaggtgacattatgacaggcgatttgattccggccaatgtactggccacccataccatcgccaacgtcagcgagacgctggcggaaaagctgggcttaccccagcagtaccgctccattggtatcattaccgccgacagcgacgacgtgacctactgcgccctggacgaggccaccaaggccgcggcggtggaggtggtgtacggccgctccctctacgcgggtgcgggcaacgcctctaccaagctggccggcgaggtcatcggcatcctggccgggcccaaccccgcggaggtgcagtccggcctgcgggcctgcgccgagtttatggccagcggggtgggcttccgctcggccaacgaggacggctccatcgtctattttgcccacaccgtctcccgcacgggcacctatctgtccaagacggcgggcgtgcgggagggtgaggccctggcctacctgatcgccccgcctctggaggcggtggtggggctggacgaggcgctcaaagcctccgacgtggagctggccgccctctttgagccccccagtgagaccaacttcggcggcgggctcctcaccggcacccagagcgcgtgcaacgccgcctgtgcagcctttgccgaggcggtgaaggcggtggcggcccggccgagggagatctgacagggcggcggaaacacgtagggcgggcggccgcaggccgccccggcgatgcaggggcgaactgtgtccgcccgccgccagacaagacgaggtgaaccatttggacaaggatctgcaatccattcaagagacaagagagctgctccggcaggccaagcaggcacagaggacgctggcgggtatgagccaggagcagctggacaaaataacggcggccatcgccgcagccgccggggaacacgcccggcggctggccgacatggcggtggaggagacgggcttcggcaaaaaagaggataaagagcttaaaaaccgctttgccgccaccaccctctatgaggccatccgggacgagcgcacccacggcatcctggcggaaaaccgggagaagcgcaccattgatatcggcgtgccggtgggcattgtggcggggctggtgccctccaccaaccccacctccaccgtgatctataaatccatgatctgtatgaaggcgggcaaccccattatcttctccccccaccccagcgcggtaaactgcatcctggagacggtgaacgtggtgcgccgggcggcggagggggcgggggccccggcggggagcatttcctgcatcaccacccccaccctggaggccaccaacgccctcatgcgccacgacgatacccgcctgattctggccaccggcggaggggccatggtaaaggcggcctactcctccggcactcccgccatcggcgtgggcgcgggcaacgggccggcctatatccaccacaccgccgacgtgcgcctggcggtcaaacggattctggactccaagacctttgacaacggcaccatctgcgccagcgagcagtccattgtggtggagcggcggatggagggggcggtcacggcggagctgaaggcccagggggcctatctgctggacgacgaggagcaccgcctcctctccaaattcatcctgcggcccaacggcaccatgaatccggccattgtgggcaagagcgtggagacggtggccaagctggcgggcctgacccgggtaccccccacggcgcgggtactggtggcccgggagaccggggtgggtcccggctatccctattccaatgagaaactgggcctgattctggcctactatgtagaggacagcgaggaggcggtgctccgccgctgcgtggagatcctggagtgggagggcgcgggccacaccttcgccatccacaccgaggatgccgacaccgccaagcgctttgccgccgccgtccccgccagccgcgtgctggtcaacacccccgccgccctgggcggcatcggggccaccacctgcctgttccccgccctcaccctggggtgcggcgcggtgggcggctcgtccagctccaacaacatcggccccctggatctcatcaacatcaagcgggtggcctggggcgtcaaagagctggaggagctgcgggggaaccgccccgcggccgggtatgccccctgtgccgtggatgagagcctgctcaacgagctggtcaaccggattatagggaggctgagcgtatgagcgaggtcaacgccgacggcgtgctcctcaatccacatgaggcgctattgcaggaggtgcaggccctgaccaactccctgacggcggaggagccggaggggatggaggacgataaggcccacaccgtctacgccggcaacggcgagcccgccggggcggtgggcggcgttccgcacacacccgtgtcggcggccctggccgccccggcccacaagggggcgggcaccggcagctacgcggcggagcacccgcccgccccggccaggaaggccgcccgggcggccaaaacgaagaaaccaaagccgtctctcccaccgaaggcggaggcggaaccggaacaacccaaacagacgactgacaggaggaaccgtaatatggccaatacaaacgcactgggtatggtggagacaaagggactggtgggcgccattgaggcggccgacgccatggtgaaagccgccaacgtgcagctggtgggcaaggagcaggtgggcggcggcctggtgaccgtcatggtgcggggcgacgtgggcgcggtgaaggcggccaccgacgctggcgcggccgccgcggaaaaggtgggagagctgatctccgtccacgtcatcccccgcccccacgccgaggtggaccacatcctgccccatgcccagggcgagatggacaacgtgtaacccatggcgctgctgaccgaggaggacgtgcgccgcatgtccaaccagggcacacgggggcccgtggtggtcaaccgggaccagatgctcacgccgggggcgcgggactatctgcgggagcaccgggtagaggtggtctacccccagggggaggcggccggggaaggggccccgtccgcccccgccaaataccgcactctgttcggtgccgcactgaatgaaaagccggagcacatgacccacctgaaggggaatgtactggtgttcaaggaccacccccgcatcgcattccggggctggatcgacgccctggaggcggagatcctgctgacccagcaggcggcggcgggggagggctatggggccctggccggggagctggaggaggttctgggctttgtccggcgctatatccgcttcgacgtgctggacgagccggtgggggccatcgagctgtgcggctatacgccggagcagctccgggagtactcccactatcctgagaaacacttcggccagccccactttctggcctgctataccgacggacccgccctgctggcggtcaacaagctgcgcaccgtggtgcggcagaccgagctggccgcctacgccgccttccgcgacgcggacggcaacgtgaccaggggcgacatgatcttggggctgaaccggctgtcctccctgatgtggattttcatgattaagttaaaggcgggacgctatgaacgcaagtaaattgagcacggtggagcggctggcggaggagctggtcgcacgcctgaccatcgagctggaggccagcggacggcatgtccacctgtcccgggccgatgtggagaccctgttcggcgcgggctaccggctcaaccggacgaaagacctgtcccagccggggcagttcgcctgcgccgagcgggtgacactggaggggcccagggggagcttgaagaacgtggtgattctgggccctgagcgcccggagagccaggtggagatctccctcaccgatgcggtggccctggggctcaccccgccggtgcgcctctccggcgatacggagggcacccccggcctcaccctccgccacggggaccgggtgctccgcctgagccacggcctgattgtggccaagcgccacattcacatgacgccggaggacgccgcccgcttcggcgtggcggaccggcagcgggtgcgcctccagtgctttaccagccgcccgctggtgttccaggacgtggaggtgcgggtatccccccagttttccacggtggtgcatatcgactacgacgaggccaatgcgtgcggctttcggaagggcgaccggggcgtgattttgaaatgaccctggagtggcgggggcggacgctggtcattacctggctgccggtggcctccatgggccgcctggccgcctgcgccccccagacggcggcggagaccgaggtgctggccgccctgctggccggggcgcgggtgcgggtggagcgggacgccctggagtaccgccgctaccgccgtaccgccccccttggcatctatcagaactgcgccggtctggagcggcgcctgcgggagatgggtatttgtgttgctgggacaggtggccggtaaggtctgggccacaaaaaaatcccccgccctcaccgggcaggcgtttctgaccgtgcgggtgggtgagcgcctgctggtgtgcgccgactgcgtgggggccggggagggagagaccgtcctcgtggccaccggcggcgcggcccgggtagcggcgggggcggagctccccattgatgccgccattgtgggcatactggacgagagctagaaaagcaaggccgccgcatgtgggcggcggtcatcctctcaggctggcggcccaaccgcccgcctgagccgcggaaaggggacatactatgtccatcaacgagattattgtctacctcatggtcgtctttatggccttgggtgcggttgaccgcatcctgggcaaccggttcggcctgggggagaaatttgaggagggtatcatggctatgggctccctggccctggccatgatcggcatcatctgtctggccccggtgctggccaacctgctccggccggtggtggtgcctctctaccaggccctgggggccgatccggccatgttcgcgggtaccctcctggccaacgacatggggggcgcgcccctggcccaggagctggccctgacccaggaggcgggacagttcggcggcctgatcgtaggctccatgctgggccccaccatcgtgtttaccatcccggtgggtctgggcattattaaggcggaggaccgcccctatctggccaccggcgtgctggcaggtgtcatcaccatccccatcggcagcttcgcgggcggcctggcggcggggttcccggtggggatggtactgcgtaacctgatccccatcgcgcttttcgccgtgctcatcgccctggggctggccttcctccccaacgggatggtaaaaggcttccaggtctttggcagaatcattgtgattattatcaccatcggcctggcggcggccatcatccaaaagctgacccccctcaccctcattccggggatgaaccccatctcagagggcgtggccatcgtgggcgacatcgccgtggtgctggcgggggcgtttccgctggtgtatgtcatcaccagggtattcaagacccctctgatgaagctgggccatgtgctgggcatgaacgacatcgcggccgccgggctggtggccaccttggccaacaacatccccatgttccagatgctccacgatatggaccggcggggtaagatcatcaacgtggcctttgcggtgtccgccgcctttgtgttcggcgaccatctgggctttaccgcgggctttgattccaccatgatctttcccatgattgtgggcaagctggtgggcggtgtgacggcggtggcggttgccatgctgatcaccagaaaatacaaggaggagcgccatggataagaccgcattggaggcgctggtgcggcaggtgctgctggagcgcctgggcggcgggacacatggggtgaaggccgtgcaggtgccccgcatcgcggtgacggaggagcaccggatggacacgggaaatcccctggaccgggtctacacccgtgacctattcaccctacaggagtccccgcggctgggggtgggcgtcatggagatgaccgacaccacctttccctggaccctgcgctacgacgagatggactacgtgctcagcggacggctggacatccgtatcggcggagagaccgtctccgccgggccgggggagctgatctatatcccaaagaacagctccatccagttctccgtcaccgggcacgcccgcttcctctatttcgtctaccccgccgactggcagagccagggcggctgattccgggcgggcggccatcggccgcccgctttttttacacaatctgaacggtgctcaccgcaaacgcacaccctttttacatccgtgctcgtatactggggggcaaacggaggtgccgttattgtggattatgggatatggacgctgcttccaatcgtcgtcgtagtggccgtggcgctcaagagcagacgggcgctggagccgctgattctgggaaccctgctcacctatatcatcgtcgatggactttccttccccatcggctggatggacgcctttttccgggtggccaccgaccagagccaccagtgggtgttcatggtgtgcggcctattcggtgcgctgatcgccctgctgggcgcctcccacggggcgctgggcttctcccggctgctgggtcggctttgccggggccccaggaccacgctgattgtgacctgggtcatggggattctgatctttgtggacgactatctgaatatcatgaccctgagcacctgcatgcgcaagctcaccgaccggcagaaggtgcccgggagaccctgtcctacatcatcgactccaccggcgcgccggtgtgcgccctgctgcccttctccacctgggcggtgttctttgccgggctgttctacgccgaggcgggcatcccggagctgggctacgggagcgccattaacaccttctgcgccgtgatccccttcgtcttctacgccatcgcggcggtggcgctggtgcccctgttctccctggggctggtgcccaagctggggcggatgaagaaggcctaccgccgggtggaggagaccggaaaggtctactcgccggagagcgccgagctgaatctggaggacgaggacgactccccggccattaccggctgcctgtgggactttgtgctccccatcggcacgctgatcgccctgactatcgtggggggcgagctgttcctggccctggtggccgccatcgctgtgtgctttttgctctacatcccccggaagaagctgtctctcaccaggttctgcgacctggccatgcacggcttctgcaacatgatccccacggtggccatcatcttctttgcctttgtgatgcaggagggcatgaccgagatcggcatcgcccccttcgtcatcaatgccgtcaagcccatcctgagcccggcggtgttcccggccatcgccttcctggtggtggcggccctcaacttcaccaccggcagcgtgtggggcatcaccgccgtgacggtgccgatcctgctgcccctggccttctccatcggggccaaccccctgctggtgatgggcgccatcgtctccggcgccaccctgggcagccacgcctgcttctactccgacgccacggtgctcacctccagctgctgcaagatggagaatatggaccacgccctgtcccaactgccctattccctgtgtgcggccgggctttcggcggcgggctatctggtgtgcggcctcctgatgtagtataatagggacagaatggggaaaaggaggagtcaggatgcccatgtatttgtatttgggcgatatcacccggatggagacagacgccattgtgaacgccgccggcacggatctgcggcgctgcccgggcatctgcgacgcgattttcgccgccgccgacacggagaagctggagagggcgtgccggaagctgggccgctgccgcatcgggcaggcggtggccacgccgggctgcgggctgccctgccggtacatcattcacgtggccgggccgggctggtacggcggggagccccgggagcggttcctgctggccgggtgctaccagaacgccctgcataaggcgtatctgtgcagctgccggcgggtggcggtgccgctgatcttctccggcgactgccacatgccgcgggcggcctccctccgggtggccggggcggcgattgccgatttctgccagcgccatccctccatggaggtgacgctggtgctctaccggcagagcatctacgacatggctaagcgtatcctgggctgggaggacgcgccgtcataaggggggacgggcctgcatatacatgccacagttaccgaaaccaggtaggagagtggatggatatgcaaacaggctggaatgagaaccgggcgctgctgcggggcaccgcggcggcggagccggtgctgtcccatgagacccacggcgtggtatacgagacctttcccctcgccgtccggcggctgtccggctcggaggaccgggtcaatgtcctggtccctagggccctgctggagcagcggcccgtgacggaggggatggagctggaggtggagggggaggtgcgctccttcaacaacaagagcggcaagggcagccgcctggtgatcaccctctacgccaaggagctgcgccccgccgccggagaacacgaaaaccagctcctgctggcgggggtgctgtgcaagccgccggtggtgcggcgcaccccgctgggccgggacatctgcgatttgatgctggcggtgaaccgccggtacggccgagcggactacctgccctgcatcgcctggggcggcctggcccggcggtgcggggcactggaggtgggggacggcgtgcgcattgaggggcggctccagagccgggcctacaccaaggtggaccacggcgtcagtgaggtgcgcaccgcctacgaggtctccgtcatgaagctggagccggtggagacataacagaagggcggggctgctgacgcggccccgccccttttgggctatttgcatttcgggttgttacggaacaggcggattcgtgacggcggtttcctttccgctcagttgaacttgtagatcttccgggccaggcggtagagcttgacggacagcttgcggccctggtagccggggatgttgcccacgaaggacagggagcggtacttgagcttgtggtacagctccgggttgctggtgcgcaggtactcccacagctcggtcttcttacccagggcggcgggagagccgtcgatgatgaggaagatggaggagatggtcatcatcatggacaggtagctggtcatataccgggccagcttgcgctgggtttggtagagctgcttgaggttgtggctgtcgatcatcagcttggtgacccgcacctgctggtctacccgggtgaccatcaccttttcgttcacgctctggtcggcccggccgatgaagtagcggtagagatccacatccatgtagtagatgctctttaccgccggcaggggctggtagacaaagatgttgtccacatagaaggtgtgcttgggcagctccagctggcaggcgcgcagcatctcggtgcggtagatgaccgagtgcatcagcaggtactgggagggccggaagcggccgatctcgttccaggtgaacacgcggccctcggggaacacgttggtatacttcatcaccttctgcgtgttgtcctccacgtgctcatagacgtagttggcgataaagaggtccagcggctgctccgccccggcgaacgccctcagcttgtccagaacggccttcagggccgcctcgtccagccagtcgtcggagtccaccaccttatagtacatcccttgggcgtggcgcaggccctggttgaccccctcaccgtggccgccgttctcctggtggatggcccgcacgatgtccgggtactccgcctgatagcggtcgcagatggcgggggtgtcgtccttggtggagccgtcgtccaccaggatgatctcgatgtcgtccccgccggtgagcagggtgcgcacgcagtgatccatgtaggccgcggagttgtagcagggcaccgcgaatgtgatgagctttgacatgggcagtctcctcacttcaataggtcgtcacacagctccagcgcccgtgcggcgatggcgtccatgttgtagtatttgtactccgccagccggcccagcaggtggaaattcggatagcggtccgcctccacccggtatttggcgtacagggcgttgttcccggcgttgatgatggcgtagtaggggatctcccccttcgctccggtgtaggcgcgggagtactccttcatgatggtggtttggccgggcagctcctgcccagtcaggtacttgaactcggtgatgcgggtgtagtcctgatccacggtatagtttaccgttccgtggctctgccagaagtccaccgggtgggtctcaaagcggaagtccagggtgcggtagggcaggcggccgtatttgcagccgaacagctcgtccgccgcgccggtatagatgatggggccggagaagggcctcccgtccagaagggcggcgctgccgtccagggtcaggcggctggccgcgtccacccccagctccaccgtgatgtccgggtggtccagcagggactggaacatgggggtgtagccctccagaggcatgccctggtaggcgtcctgaaagtagcggcagtcctccgacagaaagaccggcacccgggcggtggtgttggggtcgatctcctccggcgtctgcccccactgcttcatggtgtagcggacaaagacgtggccgtacacatagtcggccagggcggacagctccgggtcgggattctgccgcagctccagaatggtgacctttttctccatgccataggcggataccagcttctccgccagggcgcgggccttctccggcggaaaggcggcccgcagggagaccaggttgaagggcaccgggtactccagccgcccgtccccgtcggggagattggccaccacctggtgctcgtagggccgccagcgggtgaagcgggagagatagtcaaacacgcgggtgctgttggtgtggaagatatgggggccgtactggtggatcagcacccccgcctcgtcgaagcaatcataggcgttgccgcccacgtggttccggcgctccagcaccagtacccgcttgccgccccgctcggccagctccctggccgccacggaaccggccaggccggctccgatgacaaggcagtcatattgatgattcatggggaatcgtcctctcttctctggtgtcaaacacagtgtaccacaggtttcgggaaaaaggggtaaacatcccattaagatattcttaaaattacttccctttcccctcgggagcggttggcttatccggctcggtggggtagaggcccactttggcggaggggccgcctagaaagcactcggcatagtggtccatggcctgccggatgacctgcacggcggcggcccggtcgttcacatccttggccacggcctgcttgccctccagagccttgtagacagagaagaagtgcttcatctcgtcaaagaggtgggggggcagatccatcaggtcgtggtaggggttgtaggtgggatcggagaaggggatggcgatgatcttctcgtcgttcttgccgccgtccagcatggagatgtagccgatggggtagcagcgcaccagggtgagggggtcgatttcctccgaacagagcaccagcacgtccagcggatcgccgtcgtcgccgtaggtgcggggaatgaagccgtagttggcggggtagtgggtggaggtgtggagcacccggtccaggatgataagcccggtttccttatccagctcgtacttcttcttgctgcccttgggaatctcaatgaccgccacgaagtcctcgggctggatgcggctggggctgatatcatgccagatatttgacatcgtaaacactccttttgtgggtcttttctcccattatagccgtccgggaggaaaaaaacaacatttgtcttgacaaataaaacctacagatgtatgctcagcttgagcaagacatacatttgtaggaggtgaatgggatgaagaagctcaaccgcctgcccgaggcggagctgaccgtcatgcgggccgtgtggcggctggagccgcccgtccccaccggggccatccgcgcccggctggagaaggagcggccgtggaatctgtccgcccttcagaccctgctggcccggctgaccgagcggggcttcctatccgtggggaaggaggggcggcagaacgtctatacccccctggtggacgagggggagtacctagcgtttgagaacgcccccttcctggaggggaggggcctgcccggcctggtggccgccctgtatgacagccgctccgtcagccgggaggagctggccgagctgcgggccttcctggacgaggccatggggaaggagggagacgtatgactgcccgctttgccgacgtgctggagatctccctggccatgtccgtggtgctggccgtactgctggccctgcggccccttttgaagaagcggctgcgagttggggccttttactgggtgtggctgctggccgccctccgcctgtgcatccccttcaacctgagcctgccccaggctccggtgacggtggaggcggttcccagggccgtctaccgggtggacacggttaacagcaatcccggaaaccatcactatgcggccctgacagaagaagaggcggcatcggaagaggtagcggcagaaaacaggccggtggatggcggctccattcaggatgtctataccccgctcttccccctggagggggccgtagccgccctgtggctggccggggcgggggcgttcctggcctggcatctggcaaaatacgtccgcttccgcctgcgggtgcgccgctggggggctccggcggaggacgccgccctgctggctcggtttgaggccgcaaaggcggagctgggggtgaaggacctggccctgctggtctgtcccgccgtgggcgcgcccctggtgacgggctttgtgaacccggcgctcctcttgccccgggagagcgtgtccgacggggtgctccggcacgagctgatccacacccgccgccgggatctgtggtataagctgctcctgctgctctcccgctccctccactggttcaaccccctggtgcactggatggccgcggccgccagccgggatctggagcgctcctgcgacgaggcggcggtggcggggcgggacgccgccttccgggcggcctacggggcggccatgctggacgcggtggaggagggcatcgaggcccgcgcccccctgaccacccacttccggggcggcaaggcggccatgaaggagcgcctgctgtccatcgcgtcgggcggaatgcggaaaaagggtgtggccctggtctgcgccgccgccctggtgatctccgccggggccgccgcctgctccctggggacggcaggggagccccgccagctcaacggtatcttagaccgggaaaactacgccctgcggggtgtgggggagtatgtggcggcctttgacgcggccggcggctttatcgtcgagatgggggatctgacggagtccggcgaggtgcggccgccggcatgggggatgatcgtcagcccttatgatccgaagtggtcgatgcgggaggaccgcctggccgactttgccgccctggtgagcacctacggtatggagatgttcgacgacgacggcaatcccgtcctcccggcagaggcggtggcggtgaccgtggaggatctttcttgtaaaattggggacttggagccggatgccgacgtgcctctgtggacttacgaggtgctggtggagcgggccgacggccgggaggagctgcataccttctatttgatgaaccaggccgatccgaacaacggcatctatgacctgtggttcgatctgtcccaggtgagccgggaggaggcggaggccgtccgcaacaccctgatactgggttacgaccgcacggagagtcccgacggcacccgcctgctctccatccagccgtggggaggggactgcatgctttacgacatcagcggggagtaccctgtggcgctgggacaggtcagctgcagcagcggcatgccaggcggcgccgtccactcagatcctctctggtctcctgacggcagccgggtggcagtcacctcgacaggaaggatcattgatgcagggatgtccttttccttccccattggaccgctgcccccggagctgacccatcagaaagagggcggcgcggcgggcctcacctttgccgccctgaacccggagtaccagatgggagatgccgtcggctatccccggtgcgttcccctggcctggtcagaggacggcctgtccctccagtattcctgggcctggtcggacacggagggacagctccatgagggcaccgcgtggtactgctttgacgaaaacggccgctttacggaaatccgggacgtggtggagaacgatgtgtatcccgtgcacgggtgaggcggcaacgaaacgtttcctgatgccgccgactttttcgacaggcagaagcggggcggaggaattacccccgccccgcttctgtttttatcagccgatccgggcagactggttactgcatgctgttctcgtacgcctggatcatcttcttgaccatctggccgccaacggaaccggcctcacggctggtcagatcgccattgtagccctgcttcaggttgacgccaacctcctgggcggcctccatcttgaacttgttcagggcctcacgggcgctgggaaccacgggctggttggaattggaattgttagagctagacataatagcgcatctcctttggtgacaaatttgttggattcggtgaatccagacatagctttgccccagggcggatttctatgtgcgccattttttgctggtcgggtctgcgaaaaaaggggaataataatacagatagataaaattgaagtaaactgtgtcggttttggaaagaacatcagaaatagaataaaagagaagataaaaaagaggaaaatgtaccgctgccgcccggcggacgcggttaaagggcccaggcatgccacacaccgtcctgctgctcgcgctggagccgtccctgccggcgcagatggtccaggtgggcgatgcactcgcccacggcaaaccacttctgggccaggggaaagtcgtcccagctcctggagcggatgttccaggtcatgtgggcggcggcttcataggcggtgctgccggggcgggcgcggaggatggcggtcagctcgtccaggcggcgggcgtggtgctccagcagggcgtccacccggggggccagcgcaccggggcggcggtggccgggcagagccaggcgggcgggcagcccccgcacggtccgcaagctgtccagatagcatcccagggcgtcctccatgccgttccaaggcgtgatattggggctgatgtcaaagagcacgtggtcgccggtaaagagaatgccgtccgactcgtcccagaagcagagctggccaggggtgtgaccgggcgcgggcaggcaggtgagccggcggccgcccgcctccagcacagcgccgggttccagcgtgcggtaacggccggtggggacgggggccagagcgcgggcggggttggccctgttttgtgccaacagctccggcggaaagccctcagagatataaaaggcatcggtgtgggcccatttggcctcctccggctgctccagataggcccggtcgggcccgctgacgtaaatccagccggtttccccaacgacctccggggccaggccggagtggtcggagtggagatgggtgagggccacatctacatccctggggtccacatccagctccgccagcccggcaaacagagcgcggcggccctcctcctgtcggaagccggtatcgataagcaggctgcgctcccgcccgcggagcaggtagctgttcagttcccggagagggttgccgggcaggggcaccggaatccggtacaggccctccgaaatacactcggtcatcacatgcactcctttctgtccacgatccatcctaccaaaacgctggggcgccgtcaagcgtatcagcttgcaggcgggaggggatcggggtataatgggaaaaaaggcgaagggagtggaaaagagtggatttctgtggaatatgcagagctttcgcggcacagttccgaagccggtggggggcagcgtttcccaccattctgttttttgcggttctttttttgacggtttcactcctgttcgggagccggaacgccatggtggtgtccagcaccaccaccctgtttcagatccggcggcaacgcaacaacaccggtacatattacatcaagctgctgttcatcaccctcctgctgggtatgctcgcctatctggccagtcggaatgcggtgctctgtgtgcttttgaacttcacggttccctttgcgctggtgtttttccagagcgaccagttcgcgccaaagggctacttcggctacgccatgaccttcgtgttcctggagctccggccgcccacgccggaggaatttccggttcagatgctgtgcctgctgttctgtacgctggtgctcatcggggcgctgctcctctatgcccggctgtctgccccgtccgccccgcctcccccggccagttcctccagcagctccgccaggcgggtcaggctccgggtgatctcctcctccggcggggcggacggggcgcgccgggagctggaggggctggcccagcggttccggcggctgggctatgcccgccgcagccacttccacctgccagatgggcaacggcggttttattacctgtttgcactgctgtttcagcgcctgagctacctcctggcggacgaggattgggggcggctccaggctggccccgcctgcgggaaggtgctggttacgctggcggggctggtgcggcagctccagaacgccgcttcgccggaggcacggggagcgctgacagaacggctccagatcctgctggcagaggacgccctgcctcaggggcggctgcgtatcttctaccgcagctttctccaccgcctgctcctgctgctggcggagggagagccccggacccggtggccccgggtaccctggcgggaggtatttgccagcggccgccggcggctgaatctcaacaattttgaggtgcgctttgccttgcgcctggccgtggtcatgaccatcagcacaaccgtcagccttttgtgggaatttgagcacacctactggttcccgctccacgcctttcttttgctccagcccagctatgaggagagcgcccaccggatgatcacccggccggtgggcaccgccatcggatgcctggtggtacatctggtctatccatggctgcccggcctgaccggcgtcttcgcctttgccctggccatgatctccctgatgtattgctgtactccgggctcctgggtacaccccatcttttccacctccttcgcccttgccctggccaccctcacggtaaaggagggccaggccatccaattgcgcctattctacttgctgcttgcagtggcgttggtgttggtggtaaaccgtttcctggtgcccacccggaaggctacccagttccggcacaacctgcgtaccttgtgtcgcctccaggcctcctactgggagatggtgcagcgcagcctccacgcgcccggctggccggagcgctccggcgagattctggcctgctttcatctggtgtaccacgaggcggcccagtatgcggcggccctgccggcgggagaggcggagcggtaccggacggtgctgctcaccctgtggaacctgtttgcccatgtggagcaggtggagtgcctggtactgaccggggagctgggggaggaggagtaccctgttctgagccgcctggccggagaaattcaggagctgctggacccgccccggcccgcactggcggagttggggctggaaggtctgccggcctccggggcgctctgccgggccatggagcgctaccggcataacgcccggctactgctggaggcatgggagaaacagccggtttcgtgctgaatcttgcgggaatcggtgaaaaaaagccagtatttgggcaggaaagattttcctcgacagatttcgacacggaaaccgcaaggataactcaaactttagcatacaatgtctgtataccaaagccgattcccgatacactaagaaacgggtgatcggatgaacgtggattatggtgcaatcggacagcgcatcaagcaggtgcgcaggagccgcgacatgacgcaggagcgtctggcagaggccctctccgtgtcagtgggctatatcagccagatagagcgcggcgtgaccaaaatcaatctggacacgctggctgcggtggcggcgcacctcaactgtgaactttccgagctggtaaccggggtgtcggtgctccaggggcgctacctggagggagagctggcacaactggtggatcagatggacggacgacagaggaagatgcttctggaagtggccaagctgatcttggccgagtgagaaagcaaacaaaataccgggccgcacgccgtgcggcccggtatttattgttttgcagtgggcagaccggtcagcccttctgctccagaagggactgcttgatgtcccagagcttctgagacaggtccacgtagtagttatggggattctcaaagcgcttaacctcgtcccacaacaggtcgatctgtccggcgcagtaggcccgcatctcggcgatggggggggagtcgtatacccgcctgccccccaggaagatgggagcgagcagctccttggcggtgaagttggtgacacggctgcgcttccaggtggcgtcggggtcaaagagctccaggggctggctctcgtccaccgcctcgtcgtggagggtgatgaggtcggcgaaagccttgccgctctccttgtcgaacaggcggtacaccttcttgaagtgggggttggtgatcttatccgggttggcgctgatcttgatcttgggaatgatattgccctgcttgtcctccacggcggccagcttgtaaacgccgccgaacaccggctcactcttggaggtgatgagccgctcacccacgccgaaggagtcgatcttggccccctgaagcagcagatcccggatgatgtactcgtccagggagttggaggccacgatcttgcactcggtaagccccgccgcatccagcatcttgcgggccttgcgggacagataagtgaggtcgccgctgtccagccggatggcgcagttggtaatgccctgagggagcaaaatatccttgaacgctttgatggcgttgggcacgccggacttgagcacgttgtaggtgtccaccagcagggtggccgagtggggatagagctggcagtaggtcttgaaggcggtgtactcgtcggggaacatctgcacccaggagtgggccatggtgcccccggcgggggaaccatacatctcgtcggccagggtgcaggcggtgccggcgcagccggcgatataggacgccctggcacccagcacagcggcgtcggggccctgggcccggcgggacccgaactcgctcaccgggcggccgtcggcggcccggacgatgcggttggtcttggtggcgatgagggactggtggttgagggtgagcagcaggaaggtctcgatgaactgggcctcaatggcgggggcgcggacggtgaggaagggctcccgggggaagatgggagtgccctccggcacagcccacaggtcgcccgtgaagcggaaggtgcgcagatagtccagaaagccctcgcagaagcagccctttccccgcaggtaggcgatgtcctcctcggtgaagcggaggttttcgatatagtcgatgacctgctccagaccggccgcgatggcgaagccgcctccatcgggtacattgcggaagaagacatcgaagtagcagatctggtcggcatagccatcggtctgaaagtagccgttgcccatggtcaattcgtaaaaatcacacaggagtgtgtagttcatgtgttccttcatctgtttcacaacctttatcggttcagtaccgtgatctggagggcctccatcacgtccaggcccttggcgtggagatccggatcgggcccggcggtgcaggaggcatccaccacgatctccgcctcgggcagggcggccttgaccatgatggcgttggagagtacgcaaaggtaggataccagtccagccagctccacccggtcatagccctgctccttcagccagttggccagccacagggaggggaaggcgcccttgccgatgaccatatcccggctgcgctccatggcctgtcccgtctggccgtagagctgccagccctccgagttcagcaggcagtggggcaccggcagcttccgcccctcctgggtgtccaggtagtccgggccatgggtgtccagggtgaaggccacgtcatctccggcggcgcggcaggcggcgattttggccgcgatgggcccgtccagtgcctccgcaccgggaaagcccagtgctccgtctacaaagtccttttgatagtccactacgagaagcaaccgcttcaccgcgtccaccacctttctgtcaagacacctgtattataagcagttttttaccaaaatgcaagagcagtcttgccgcgccgggatatcaggccgcccgccggggaaccggcgggcggtgtgatttactcggccagaggggtgggccccatggcctcgtgaagctccttggtgatggcgccctggaacaggcagacggcgaaccggtgcatccgctccagcttttcgggcaccgcgtcggggttatgcttgcccgcggtggagaagtcgccgtccagaatgaacttgacctccttgtcggtcttgccgccgccgatgaggccgggaccggcgtggagcttcatccggtagtcccccaccaggggagtctccacgtccagggaacacttggcgatctcgctctcctccacgtcaggctcgccgagtatgccgatatactggctgcggatcagatcgtcccagagttccccctccaggcccaaacgctggcgggagacggcgttgacataccgcaggccgatgcgctcgaagaaggcgggctggtagagctggataaactgggccagggggcggtccagccgggtggcgaagtcctcccaccgggtgtagctcagggtggacagggcgatgaagccctgggtcaggttgagcttccagcggccgtcctccgagatgaagttgtagttggtaatgggcttctgaggctccagcgcggtggcgttccccttcttgaccaccttgggggggagctgctcctgacgggccgcatactgggggaagtccttgcggatggcctcctgaaactcggcgggctccttggcgccgatggacaggatggtggggaagcggagctggcagatcacctccaccagcggggcgcgggcgtactgatagcgttcgtatggtgcaaacagcatagtgggctgctccttcctgtttttcgatcggttctattgtagcccggaatgggcgatctgtcaaaccattccaccttgcaaatggagaattggggcggtataatgcagacaatacacaaaggaggcggagaccatggaactggagctgaagcggggcggccgcaccgcccgggtggagaccctgggcggcgagctggtatcctaccgggacgagagggggctggagtacatctgggggggcgatccggcctactggccggggcgcaatcccctgctgtttcccattgtggggacgctgaaggagggaaagatccgctttgacggcagggaatacgccatggagcgccacggctttgcccggcggcgggagttcaccccggcggcgcggggggaggactgggtgcgcctggagctgcgggagagcgccgagaccctggcgctgtatccctatcccttccggctggcggtggagcagcggctgaccgacacgggtttttccacggcggtgacggtggccaacccgggggaggggccgttgcccttctgcctgggggcccacaccggcttccgctgtcccctggaggcgggggagcggttcgaggactacgagctggtgttccccgagcgggagagctgtcccaccctgctgctgcgggacggattgctggaccggccggcggccctgccctgcctggaggacaccgacaccctgcccctggactaccgctggtttgacgcgctggataccctgatcttcgagggcctgcgctcccgctccgtcgccctgcgcagccgcaaaagcggcagaggggtgcgggtgtccttcgacggcttccccatgctggccttctggaccatgccggggaagaaggccccctacctgtgcattgagccgtggcacggctgcgccgccgggacggcggaggggccggaattcaccgataaagcccactgcatcgtcctggcccccggcgagagccgcaccctggcctaccgggcggacaccctgtgagctagtattcccgcaaaaaagcgcggaccgtacaacggtccgcgctttttttgtcaggagaggccctcgcccatgccgagggtgaagtacaggatgaccacgatgaccagaggggcgagaaagcgcaccgcgaaggcccagggcttctgcatccgccggaggccgtgctcgccggcgatctcctgcccggcggctttggtgccccacacccagcccacaaagaggcagaagcacagcgcccccagagggatcatcagattgtcggtgaacttctccatcaccgcgttcatggggagcatctgcagcccgtttttgaagtcgaaccagggcaggttgatgccccgcccggcggactgggagagggagtagcccgcgctgagcagcgccatgggcaccgacaggccgatggccgccctggcccgggagaggtggaattcctcggtgagaaaggccaccaggctctccaggatgctgatggcgctggtgagggcggccaggaagagcagggcgaagaaggccgtgccgaaaaagcggccgccgggcagctcggcaaacatggcgggcaggctgatgaaggcgaagccgccgcccatgcccagtccctcctctccctgggtgatcatcaccaccgggacgatggccagggcggccatgacggctaccagggtgtccagcgcgcagatccaaccggcgcttttggccaggttctccgacttgggcacgtaggagccgtaggtcaccatgatgcccatgcccacggacagggaaaaaaaggcctgtcccaatgcgcccaccagggtgtcgccgctgagcctggcggggtcgattccgaacaggaagcgcaggccctcccccgcgccggggcgggtgactgagtagaccaccaggcccgccagcagcaggaaaagcaggggcatgagcaccttgctcaccttctcaatgccctgggacacgccccgcaccaccaccacgatgcacagcaccagaaagcccaggccccacagcaggggctccaccggacgggcactgaaggcggagaagtagtcggcataggcgcccggcccggcgccgaagtgggcgccggcggcgtagatctggacatacttgagcacccagccccccaccacacagtagtaggacaggatgacaaacagggtgacgatgccgatgtatcccgcgaaccgccaccgggggttcagagtgcggaaggcccccaccacattcttctgggtggcccggccgatggacagctccgccagcatgaccggaaagcccaccaggaacacgatcagcagataacacagcaggaaggcgccgccgccgtaggcgcccaccttgccgggaaatttccagatgttgcccaggcccaccgcagagccggctgcggccaggatgaagcccaggttggaggcccactggtgcctcttttccgtcataaatccattcctcctcattccaacagaatccgatctactataccgcagaattcgtcttttttcaagggaaatgtccgcccggggcggacgcacccttttccggcgcgggaatacgatgggagtagtcacgttgaagggaggcgcattccatgcggaatgaactgaatttgtgggtggcggggggcgatatgaggcaggccaagctggccgagctgctggccgcagacgggcacacggtgcacgcctatgcgctggagcggctgggcgcgctggacggggtggagatggaggagagcctggagggggccgccctggcggactgtgtggtgctccccctgccggcggcgggggagggcagcctgctcaacgcgcccctgtccgggcggaagcaccccctggccctggtgctggacgctttgcggccggggcaggtgatctgcgccggtatggtgggcccccagacggcggcgctggcggcggaccggggactcacactccacgactactttgcccgggaggagctggcggtggccaatgcggtgcccaccgccttgccggtaggacactattccgcccgccgggaacacacagccccgcccctggccatgccgggggcggggctgaactgttagccggcggaaggctcctgggcatcagcgtagcgggtgtcgatggaggtgaagtagctctggacaaaggcgcggaagcactggcccagctccgtcaggggacggcgcttgttataggcgatgccccagtaggcggtgggcgcgccgtcggcatactcccggaacaccaggtcggggtgtttgccctgaagagagagctccttgtacttgacggcggggacaatggagacacagttgttggactccaccagggaggtgagaaggtccaggtgccgtacgtcgtagtcgatgatgggagtcaggccgaacttgctgttctccgcggcgcagaaggtctccttgttgacccgggagccgtcgatggccaggtgtacccctgccagctcccggtgggctaccgcaggcagggcggccagtggatgctcccggcgcatgagcatgccgaagttgcacgcatagatgcgctcatagaccacctcttccgacgggggcgggagcaccgtcatggccagatccacctcgcaccggtccagcagactggtgacgttgggcaggtcggcccgctggtggatcaggttgacctcggggtgctccagcagaaaatgctccaggagggtggtgtcgtccgtcatgcagacgatggagaggggctcgggccgtccgctgtgttggttccgcacagcctggacgccggcgtccaggagtgaaacggcctgctccacgcttttcagcagcagctcgccgttctgattgagggcgatcttgccccgccgccgctcaaagagggggacgcccacctcctcctccaaccgggagatgctggtgctcagattgggctgggagacaaacagggtctcggcggccttggacatattgcccagtttggctacggcgatgaagtatctcaactgtgaaagttccatgccaacttccctcccggtaagtatataaattgcttataccgttctaaagattatatatttttcaaacgcggctgtaaaggatatactgggcctgcgttaaaaaaatcacaaaaaggagagaacgcggaaaggggcggttcaggactatacggcgcggcgcactcaattcatgaaatgacgggcgggcatccgctccccactcaggaggattgcgtattatgagagaaaaaagaggatttggaccctggggctggttattgctgatctttggactgctggtgtttttcagcaatggcggcttctttgcagacggaaccaacatcatttctcccgctgtggcggaacggctgaacgtggatcaaagcatcatcctgaccatgaactccgtggccggcatcgtcggcgtgctgatcgccgtcgcagcagggcaggtgaaccagcgcatcggccccagcaaagtggccgccggctgcctcattctggcgggcttgggccatatcgcggcctgcaacgccgtcaatgtccccatgtacttaatcgccatgtgctttgtgggcggcggcctcagctccggctcctttgtgggcgtgggtactctggtggccatgtggttccccaagagacagggacaggccatgagcatcgtggcaatgggctccaactttggaaccatgctctttgtcccgctgctcaacgtcctggcgggctcgatcggcatgccgatgggctctgtgatctgcggcggcgtggccgccgtggtgggtgtgatcggcatggcgcttctgcgcgatacccccaaggagcggggcctctatcccgataacgtcaccgaggccgagttcaaggccaactactcctccgcgccccccgagctggacaactccggctggaccaccggcaagctgctgcgcaccaaggagacctggctgtgcgctctgtccaccggctttctgatgctggcccagatgggcatcatgacccagctggtggcccgcaacattgaggtgggcattgcccccgatctggcggtcagtgttatgagcgctatcgccgtcatcggaattattggcgccgtcatcttcggccgcatcctgttcaggctgggcatcaagaaggccggcgtgctcacaggcgtgctgtatattgtggccatgctcttcaacatcagcggcgtgatgcctctggtgtgggtgtccctggtggttatcggcttcctgggcgccgcagcccccgccctgatgaactccgtccccggctctgtgttcggtcgggtgggctacgccaaggtcaacagcgtggtgttccccctgaccaacatcatcttcatgtgcaacttcgccgtcaacggcctcatcaagaagctgttcaacagcctgagcgtggcttacatcgtgtttgccgggctggcgttcctttcgattctgctgattctcgccctgcaggatcacaagtatgaccaggattacatggccgcgcacaagcagtaagcggccgggcccataaataggcaatctttagaaggaggtaaacgcaatgagcaagaagtcccttgtggcgctggctcatggcctggacgtgcaggagaatgtcacccgcgtctttgacatgatgggcggcgctgccaaaatgattgagcccaactccaccgttgtgctcaagcccaacgcggggcacgcggctcccccggagttcgccgtgtgcacccaccccgagaccgtccgcgccgtcatccgtgaggtaaaaaaggccaaccccaagcgcattgtcatcgccgaggccgccgccgtgggctgcgacaccgacgagtgctatgaggcctgcggcatcgccgccgtcgcccgggaggagggcgtcgagctggtggacatcaagaaggacaaggatctcatcaatgtagccgtgcggggctaccgctccaacatcagccacgtcaagctgccccgcctgctgctggaggccgagcacatcatcaacctgcccatcctcaaggcccacgccagcatggtgttctccggcgcgctgaagaacatcaagggcgtggtgcaggatcaggtccatgttcagatgcaccagcagaacctgaccatggccatgatggacgtgtggtgggcctgccgcgccgacatcaacatcatggacgtgatgcacgccgccagcggctactccccccacacccccgtgcccatcgaggtggactgcatcatgggctcctatgaccccgtggcgctggaccgcatcgcctgcgagctggtgggcattgatcccgacggcgtggactacttccgcgtggcccaggaggccggcctgggcaccaccaaccgcgacgacatcgaggtggtgggcgacaaggtggccgactgctacaagaagatgtgggtcccctacctggaggacatccgcaaccgctggcccgagtatgaggtccactgtgagggcgcctgctccagctgtcaggccctgctgaccctcaacatggagacgctgaaggccatcggcgtctatgatgacaacaccgacatggtggtggtggccggcggccggaacaccctgtcccccgataccccggacgagaagatcctgctccacggcaactgcgcccgcaagcacctgaaggagcatcccaacgccttcttcctccaggggtgcccccctggagagggctccctctacatgtccgtgctgcgcaaggaggccatgaccggcaagcccgagcagatgcactggatccgcgagcggatggagatcgacgcccccgcttggcgctcctacgtggaaaaagaggcggagaagttctatggatcagacgataagtaagggctttgtctttctggaaaacgccccagagctgatgcgcctgctggaggacatcttcaccgacgacttcatgcaggagtatacccgctttgagagctttgagggcttccggtattccagcgccgtgatggtcaactggaaggcggataccctgatctacgccccgccgctgctggacgcctttgtgaaagagagcaccgacttcgccacctgggacgagatggtgcgctccgccaccggcctgcgctaccgcagataacgcctgtccgcggcttttcagcacagcctgcgagacccctccgggcctctaccggacgacccttcggaatgctgaaccagaacgaggccgccagacgcttgtccccacaacgcctggcggctcgccatatcccggctggggcggagcaacgccccgccgggacacctgccaccccggcaataaggagatatgtcattatgaaggttgcagatatcaagcgcgccgcctgcgtgggcggcggcgtgatcggctccagctgggccatccagttcgccatgcgcgggctggccgtgaccctgtacgacatcaacgacgaacagctcaaaaggagcgaggcccagatgcacaagagcctggacgctctggagcaatttaacgccattaccccggagcgccggggggagatcgtggcggccatccgcctgaccacctccatggaggaggccgtggcggacgcccagttcatccaggagagcggcccggagcgcctggagatcaagcagtccattctggcccaggtggaagcctgcgccgcggcggacgccctctacgccagctccacctccggcctgctcatctccgacattgccgccaaggcggcccacccggagcgctgcgtgggggcccacccctacaatccgccccacctcatccccctggtggagctgacctctggcgacaagaccgaccccgccctgctccggctggcctacgacttctaccagtccatcggcaaggaggccgtcctcctgcgccgggagtgccccggcttcatcgccaaccggctccagctggccctctaccgggaggtacaggatctggtgatgcggggggtgtgctccgtggaggacgcggacaaggccctggtctacggccccggcctgcgctgggccatcttcggccacaacatgatcatgcagctgggcaaccccggcggcctgaccggcatggtgaatatgctgggcaactccggcgaccgctggctggccgacatggcctcctggacccaccagcccgacaactgggccgaggtggcccagcccggcgtggatgaggagatgaagcacttccccgaccacatcggccacaccaacgaggcgtgcgcggcctaccgcgaccagatgctcattgagctgctcaagctccacaagaagctgtaaaggaggaaaccgggtgaccgccaatacgaccgcatccgtccgggccttcgccgaccgccgctggctgtgcctgatttccgccatggtgatctgcgtgtgcgccggcttcggctacgcctggagcgtgctccagacccccattatcgcccggttcggctgggccgactccggggtggccctggcctacaccatcacggtggtgtgctccaccatggcccccctcctcttcggcgggctgatccgccgcatgtccagccgcctttgcgtggccgtgggggccgtcctctttggcgccggcctcttcgccgccggcctgatgagccagctctggcagctctacctgttctacggcgtgatttccggcctgggggtgggcttcatctatcccagcatgatggcctatgtggtgcgcctctttcccgaccgctccggcatggcctccggcctgggcaccgctgcctacggctccggcgccatcctgtgggcccccaccgccgccgcgctgatggagaaggtgggcctgggcagcgccttccaggtgctgggggtgctctttgccgcggtgattctgctgggctccctgctgctggccgagccgccggagggattccacgccgccatggtccccgccgccagcggcgggcaggggagcggcgtcgacctgaaccggggacagatggtgcgcaccggggccttctaccggatggtggcggtatttacctgcggcctggtggccggggtgatcgtcatcagccaggcctcccccatcctccagcagaccctgggctacgcccccgcccgggccgccctcttcgtcagcgtgttctccgcctgcaacatggccggccgcttcgtgtggggcagcctctccgaccggctgggcctggtcaacaccgccggggcggtgttcctgctgtgcatcctgtccatggccgccctggccgtgacgggggcggaggggctggtgctcctcttcatgggggtggccgcctcctgctacggcggactggcctccctcctcacccccctcaccgcccgcatgttcggcccccgctacatcacggagaattacggcatcatgtacgtggtgttcggcctggccagcctcatcggccccagcctggccaccaccttcaagaccgcgggaggcggcagctacaccggcgcctatgtgaccgccgcggcgctggccgtcatcggcctggcgctctcccgcttcctgaaagccccgtcctgcaaaggagaatgatatgaaactgagtaaagtgagaacggccgaggagatcatcgcccggttcaaggatgggcagatcatcgccatcggcggacagaccaaccagtacatgcccgaccgcctgatcgactgcgtgctggagagcggcgccaggcatctgaccatctactccatcgactccagcgacccgggccacggcgtcagcctgctggtggaggccggccgggtggacgccatgatcaccacccacgtgggcaccaaccccctgaccaacgccaaaatccagtccggggcgctgaaggcggaattcaaccccatgggcaccttcatcgagcgcatccgctgcggcggcgcggggctgggcggcgtgctcaccaaaaccggcctgggcaccgtggtggaggagggcaaacagatcattgaggtcaatggcgagagctatctgctggagaccgccctccgcgccgacatcgccctcacccgctgccgccgggccgaccccctgggcaacctggcctacagcggcagcagcggccacgcctcccacccggtgatcgccacctgtggcgcgctgtccatcgtggagtgcgaccacttctgcgacctgggggagctcggccccgacaagatcaaggtgcccggcatgttcgtggacatgattctggcgtaaggaggcgggacaatggacaacagaaactttatcgccaagcgggcggccgcctatttccggcccggcgacgtggtcaacctgggcatcggcatcccaagcctctgcggcagctacgccgtggacggcgtactcttccagagcgagaacggcttcatcggcatcggccccacggtgcaggagggactgatgaaaaacgagcgcttcgtcaatgcgggcggagtgcccttcgtccccgtgccggggagcagcgccttcgatgtggccatgtccttcaacgtcatccgctgcggacgtctcgccgccacggtgctgggcggactccaggtgtcggcacagggggatctggctaactgggccacccccggccgggccttcggcatggggggcgccatggatctgtgcaacggcgcccggaaggtcattgtggccatggagctggtggccaaggacggctcccctaaggtggtcagccggtgcaccctgcccctcaccgctgtaaagtgcgtcaaccacatcgtcaccgaccgctgcgtcatcgacgtgacggaggaggggctggtcctctccgagatccggaagggccacaccgtggaggagatccaggccgcggtggagcccgtgctcctggtgtcccccgacttgaaggaaatggaggaagattgatatggcaaaaccgctgagcaagacggtcgtggtggcctatggccgctccgccgtggccaagtctggcaagaagggcgccctgcgcaatctgcaccccatcgacatgggcgggctggtgctcaagggcgtgatggagaaaatccccaagttggaccccgccctggtggaggatgtgattctgggctgcgccatcccggaggccaagcagggcctcaaccccgcccggctggtggccgcccgggccggcctgccctacaccgcctgcggccttaccgtggaccgcttctgttcatcctctctccaggccgtggccctggccgcctggcagatcgaggccggacaggccgactgcatcgtggccggaggtatcgagtccatgaccgccctgcccatgaccctggaccgcagcggcgacatggacccctggctgctggagcacgaccccgcccagtacatctccaatggcgagaccgccgagaacgtggcggagaagtacaacgtcacccgggaggagatggaccgcctggctctggagagccaccgaaaggcggccgccgcccaggacgcggggtattttgacgagcagatcatccccctgcccggcgcagacgccgagggcaacgagatcgtctttcacaaggaccagggtatccgccgtgacaccaccctggaaaagatggcgtccatgaagccctgcttccgggagaacggccgggtcaccgccgccacctcctcccagaccagcgacggcgcggctttcctggtgctgatgagccgggacaaggccgccgagatgggcatccggcccctggcctctttcctgggcttctgtgtgggcggcctggacccggcctacatgggcctgggccccatctacgccgcgcccaaggtgctggagtacaccggcctgaccatggacgacatggacgtgattgagctcaacgaggccttcgccgcccaggtcagcccctgcatcaaggagctgggcatggatcccgccagggtcaaccccaacggcggcgccatggccctgggccaccccctgggtgctaccggcgcggtgctgagctgcaaggccatctcggagctgcgccgcaccggcggcaagtatgctatggttaccatgtgtatcgccggcggcatgggcgcggcagggatcttcaaggcggattaatacccgcggggcagggagactgccgccgcgtacaaacgattatgggaggtaatttatatgggtaagcccttagctgattatgtcaagctccccgagctggaggagtacaaggagtggttcaaggacttcgcggatctgtaccgggaggacggcatccttcaggtgacctggaagaccctggacggtcccatgcaccacagcggcatgtcccaccgtgccatcagccaactggtccgcgtgctgagcctggactacaagaacgagatcatcatcttcacccacatcggcgaccactggatgaccgagtccgaccccaacggctgggagacttactccgagctgcccacccagcggttccagcaccagtattttgacgacaccaacctcatcaagaacatggtgttcgacctggacgtgcccaccatcggcgccatccccggctccggcttccactgggactccgccatgctcagcgacatcaccatctgctccgaggatacctggatggaggtgccccacgcccacggcggcctggtgcccggcgacggcatgggcctgatggcccagcactacttcggcaccaagcggggcaactactacatgatgaccgcccgccagtggaccgcccagcagatgctggactggggcatggtcagcgaggtgttacccaaggatcaggtcatggcccgcgcctgggagatcgcccgcatgtggaagacgatgccctatgagaaccgcaccatcatgtccaacctggccaagcggccgctgaagaagctgctggtggaggatctgaagctgcacacggtcagtgagcagtacggctccctgctgcgcatcgccgccggtgacatgggcgaccgcaatgccgcacagcaggatgagaagtacatcagccagaccaacgactggcgctacaccttcccccacatgcagcaggcacccacccgtgagagctgggccgccttccgcaccgagcccatcgagtggttcaagaaggtggaggccggcgaggcggtcaacccctgcgaccccacccgccccgtgaagccctaccgccccgatggcgagtaaggcactgtatggaatcaggaggtagttaccatgggaaaaccaatggcggattacgtcaagctgcccgagtttgacgagtacaaggagtggttcagggacttcgccgacctcaagcgggaagacggcatcgtgcaggtgacctggaagaccctggacggccccatgcaccacagcggcatgtcccaccgggccatgagccagctcacccgctggctgagcctggactttaaaaacgagatcatcatctacacccacatcggcgacaactggatgatcgagtccgacgccaacggctgggagacctactccgagctgcccacccagcggttccagcaccagtatttcgatgacaccaacctcatcaagaacatggtgtttgacctggatgtgcccaccatcggcgccatccccggccccggcttccactgggattccgccatgctgtgcgacattaccctgtgctccgaggacaccaagatggaggtgccccacgctcagggggggctggtgcccggcgacggtatgggcctgatgtgccagcactacttcggcaccaagcggggcaactactacatgatgacctcccgccagttcaccgcccggcagatgctggagtggggcatggtcaacgaggtgctgcccaagggcaaggtgctggagcgggcctgggagatcgcccgcatgtggaagaccatgccctacgagaaccgcaccatcatgtccaatctggccaagcggccgctgaagaagctgctggtggaggacttgaagctgcacaccgtctccgagcagtacggctccctgctgcgcatcgccgccggggatctgggcgacgagcactccgcccagcaggatgagaagtacatcagccgcgtcaacgactggcgctacgccacccgcgacatggaggagccccagaccgccgaatcctggcgcaccatgcccctcaaggccgccgagtggtggaagaaggtggaggccggtgagattgagaacccctatgtcttcgagcacagcaacgagccggaggactacgagttttaattccaaagcgcggaagaaggggcgaccggcacgtcccttcttcctgtgcattgcttataaaggagtgtcacagctatggcaaagaccatcatcaccgccgcgctgaccggcgcggtcacccccgcgggctacaagatccccgagacgccccagcagatcgccgacgaggcttacgacgcctggaagctgggcgccgccgtggtccacctgcacatgcgcgccgacgacggcctgggcgccatggacaaggagaagttccgcgagaccatcaagctcatccgcagccacaaggactgcgacgtgatcatcaactgcacctcctccggcgcctccccggagcaccccgccaccgacgacgagcgcatggcccaccacagggagctgtccggcatcgagatgggctcctacgacgcgggctccttcaactggatgcccggcggtgtgttcgtcaactccccccagttcctcgagaagctgggcgatctttacatggagaagggcatcaaaccggagctggaaatctttgacgccggcatgctgggcgtggccaactacttcgtgaagaagggccatctgcccaccccctgccactaccagttctgcctgggcgtgctgggcggcatgcccgccacagtggagaacctgctctacctggtgcagcacatccccgccggttccacctggtcggccttcggcgtgggcaagggccacctgcccatcctgttcgcctccctggccctgggcggccacatccgcgtgggcatggaggacaacgtggtgtatgaggtgaaggagaacggcgagaaggtcatggccaccaaccacatgctggtggagcgggccgtcaacgccgtcaaggccttcggcaatacccccgccacccccgacgaggcccgccggatgctgggcatccccgccttcgacggcggccgggtgcgcgccgccctgggcattgactaactgaatttcctggccccagcggcggcaggagcggatgctcctgccgccgctttgttttccacacatttcaggcagacgggggaaaacccgcgcatagagtaggtggaaagggggcatggaaggatggaacatgcgctgcgggtggcggcctactgccgggtatccacggacaaggaggatcagcttcactccctggctgcccagcaggcctactttgaggggtacatcgcccggcacggctggcgctgcgcgggcattttcgccgacgagggcctgtcaggcaccaccctccgccggcccagattcgccgagctgctccggctggcccggtcgggggcggtggatctgattctcaccaaggaggtgtcccgcttcgcccgcaacacggtggacgccctccaggtgacccggcggctgagggaacagggggtgggggtaattttcctcagcgacggcattgacacccgggacaacgacggggagttccgccttaccatcatggccagcgtggcccaggaggagagccgtaaatctccgagcgcacccgctgggggcagctccaggccatgcggcggggggtggccttcggcaacgacacggtgtacggctatgcgctgcggggcggggcgctcaccatccggccggaacaggcggaggtggtgcgggaggtgtaccgcaagtgtctggaggagggtaaaggggcccacaccattgcccgggagctcaccgaggcgggggtggccccgcccctccgggcggacggggcgtggtcggccgccatgatactgcggctgctccacaacgagaagtattgcggcgacctgctccagaaaaagtaccgcaccgtggaccatctgacccaccggaaggtggtcaaccgcggggcggaggagcagttccgcctggaaaaccaccacccggccattgtcagccgggcccagtttgccgccgtccaggccgagctggcccggcgcgcggggttggcgggggagaggagccgcttttccgcccgctactggtattccggcaagctggtgtgtggggcgtgcggcgggcgcctcaccgccaagcgcacccggcgtcccgatgggcgggagtacctgcgcttcgtttgccggggacggggaacgggatgcgccatgagggcggtaccgggagacgtgctgaccgcctgtgtccgccacgtgctgggcgaggtgggactgcctctgggggcgatggccgcggaggtactggcgtcggcccggccggcgggggcggagtgcggggcggcggctctgcggcaggccctccgccgtcaggaggcccgccgggccagggcactggacgcctttctggacgggaccctcagccgggaagagctggcggcgctcactgcccggagcgaggcggagcggtcccggctggcccggcggctggccgacctggaaatggcgggggcggaacggccggagcgccgcgccgccctgctggactggctggcgggagagctggccgggggcgaggcggtgctggacgcggcggtaaagcgggtcacggtccaggccgacgccctgctggttgagctggaggagctgcccctgtgcttccgtgtccgggcgcaggccggcgggcggggggcggcgcggcgggttgaggtgaccgagtgtacccccctcccgcgctgaacagcggtgtcctttcggaaaggcggtgcccaccgcagagggggccatccagctggctatggaggagctgcccattaccctccacggcgcccgggttctggtgatcggctacggccgtctgggccgggtgctggccgaccggctggcgggcctgaaggccagggtcagcgtggcggcccgccggtatgccgacctggcctgggcagagaactgcggctacggcgtggagcacaccgggcagttggagggctggctgtgcggctatgatctggtggtcaataccgtccctgtccgcgttctgcgggaggcggagctggcagatctgaagccgggctgcctggtcattgacctggcctccaagcctggaggggtagacttcgacgcggcggcccggctgggggtcaaggccttctgggccctgtctctgcccggcaaggtggccccggtcacagcgggcaagagcatcaagacaaccatctataacatcctcaccgaattaggagtgtgaacatggaacataggaagattggattcgccttctgcggctccttctgtacgtacagccaggccatggaggtgctggagcgggtacagtccaggtacggcgacgtactccccatcgtctcggaggccggcgccgccactgatacccgcttcggggcggcccacgactttatgcgggagatggagcgcatctgcggccggagggtggtggacagcatcgccaaggccgagcccattgggcccaggcatctgctggatgtgctggtcatctgtccctgcacgggcaacaccctggccaagctggcaaacggcgtcacggacaccacggttaccatggcggccaaggctcacctgcgcaacggggggccggtggtgctctgccctgccaccaacgacggtctggcggcctcggccaggaatatcggcgtactgctggacaagaaaaacgtctatttcgtccccttccggcaggacgatcccgccaagaagcccacctccctggtggccgacttttccctggtcccagccgctatcgacgcggcgctggagggccgccagctccagcccgtgctgcttggaccgcaggaggcggattaaaaaacacaccgcccccggcgtagccgggggcggtgtgtttttgtcattgtttacagggttttggcaaaatccatggggatataggtgaagccgtcccgcacatagcagtagtgggtcagctcaatggtttcaccagtgccggtgacacattcatagctctcaggggtaaaggtataggtgacatcgcccttggcgatggtggtggaaccgtcggccttgttccaggtgacggtgtagccgcggctctcggccacctggcgcaggggaacgtcggagaggaaggtggtgggtgtcttgctggaggacaggcctgtgttgtgcatcatggtggtcagcagcttggcgtacaggttatccgccagaagcatctcccgctccgccatatcaatgccgagctgggttacataggcgtcgcctgcggcgcggctctcggagtacttggccagcatggcgggggcggcatccagcatctcctggtacatcagctcctcctggagcttccagaagtcctttacaccctggctatacagggagcggttctgttcagcaatggtgcagatgctcttgaacttccagaaggcgccgtcggggttgtaggtgtcgccgtccagatgataggccggggcggtgtcggtaatgccggagaagaagggaatgaacacggagtgctccgtgttgcccagggccagccagtcgatggaggagcactccgcgggccagtcggggaaggtctggaggatatggatctgggaggaacgctcggtgccgatgacgcggttctcctcattgccgggcagggtcacgtccaggggagtgccctcgtaccggttgcggtagatatccatgacggtcagaacgctgaccttctcgtcgggggagtagaacagaggatagaattcatcggagtcgtactcgcccgccagggagggggccaggatggtcatgccggcccagttgcgcatgttgttgtagtcctcgcgggtgttgttggtcaccgatttggccaggtggtacagctcgccctccttgacggccaggcccagcttgtcgatggtgtcgaacagaccgtcagagtagatgtagccgtcctcgggagtggccttggggtccaccagcccgatcatgttgtggttgccgaacacggccaccttgtcgtcgggcatcttcatggcgcagtactggtgcccgccgtagatctccacgatccaggcctcgtcctggtcggtgatcatgacggtgttgccctcttcggagccgtactcgtccacatagcccagcagcacgtccacggcctcccgggcggtggtggagacggcggctaccgaggcggccagaatggcctcacgcaggccgggctccacaaagggatcctcagcctcccaggcctcgcaggtggaggtggaaacggtggcggtgatgctcacaccgtactcattggtgcaggaaccggggtacatgccgtcgtcgccccgggtgtagtcggggacataggtgtacttataggtggtggcgggcagggggatctggaacccggtggcggtatcggtgatgaagcggccgggcacattttccacccggggctgtacctgaaacattttgttgtagtcgccctggccctggtcctcgctgcgtgcaatgagataggtcccctggtcgctgacatccttgcctacgtacacgccggtacacgccagagcgctggtgctgaggagcatcgcgcccgccagtgtgacggataagacgcgaagggattttttcatgtttgattacctcacctttttttgaattcagccggcctcggcttgggacaggtccatgagccccccttctgcaagaaagcgtgcagattttaatatgggaaatgctgtatctacatttttgcacaatatagacaaaatgtcaaggagaatcattgggcgattttacggctgtatgtgtggaaaaggagaaagatcaactgcaaatagccaggagggacagcggattttagcagaagtatagagagcgtatggtacggtttttctgggatcaacaaaaaagctgcgcccccatgggggcgcagctttgggactcagaagcggctgatctgcgcggcgtccatccgctccaaaatggcggcggccagccgggcggcgttctccacgtcgctgtgggcggcgatgccgtagtgggtatggatataacgcacagggatgccgatgacgataacaggcacgccctggttggacagatggatgggcgcgccgttggtagagccgccggtgcgcacgctctcctgcacggggatgcccagctcctccgccagatccagggcatagcgctggaagcgggggttggtgatcatgcgggcatcgatgtggcgcagcatgggccccttgtggatggcggtctgtatcatatagggttcggccacggtgtcgtcggcggggcatccctcaaagacgatggccaggtcgggctttacggtgttggcggtgacagtggcgccgcgggtccccatctcctcctggacggcgaacgcgccggtcacgtccacattcagcgtcttgtcccgcagattgtccagggtgcgcagaatggaggcgcagcccaggcggcagtcaaaggccttgccaatcatcagatcgtgtttctcctggtactcgaaggtcacgtcgggcaccaccggggcggccatgcgcacgcggaagtcccgcagtacctcctcccgggaggaggcgccgatgtcgatgctcatgtcctctacggcgggctgggccttgcgctcggcctcgctcatgaaatgggggggcttgctggcggtaacgccgggaatatagtctccgtcggccgtctgaacccaaacccggtgggcgggaatgttggagggaacccagccgcccagggtggtgaagcgcagggtgccgttgggcttgacggcctgcaccatgaaggccacctcgtcagtgtgggcgtccagttgaaccatgggccgtccgccctggttcccgctgcgggagaggtagaggttgcgcaggctgtcctcccggaaggagcccagcccctcgccgtagcggcgcagaaccgcgagaacctcgtcctcaaagccgggcgcgcccttggcgttggagagggcggcgcacagttccagtgattgctttttatccattcgtgtctatccccacattctaaccaattaaaattcggtgccgcaggccttggcgatgtccaccttcttgaactcctccatgaagtccgcgatgtagtcggcggtggtctggagcatcttccggccccactcctcggtggcggtctcggggtggtcgggaccaatccatccgttgtgggtgacggagggggtcaggcggggaatgttgacggtgacgcccttgtattcaatggaggtgaagccggtggccttcagggtgtcggatacgtcgtggagcctcatggggccggccacctcgctctgatccaccagggaggggtcaatacccaggatggccgccgtctcttcgccgccgccgtggccgcccttccaggccgggtccatgtcccaggccatgagccaccagttcagttcagccaggataccgcccttgcgctggatgtcatagcccacccggtcgatggacttgatgttgccgccgtggccgttgaggatgacgaagcggcgggcgccgtgctggaacaggctgtcgcacacccggccgagcacctgatagagcagctcggtgcccaggttgatggtgccgggatagtcgcacaggctctcagtggcgccgtaggggatggtggggcagatgagcacgtcgctcttctgctcgatcttgtccagcaggaagtcggggatgagggtgtcggtgcccaaaggcatgtggcggccgtggcactcgatggagccgacgccgatgagaacggtatcgtgagtgcggaagtattcctctgccttgggccaggtcaggttggataaacgcatggtactacctccttgtattttgcggagcgcagtccggtcgggctggcttcagagtggatagtggcaggcgcacaggtggccgggggcgatctcctttaactcggggacttcgctgcggcacttgtccgtgcagtaggggcagcgggggtggaatttgcagccggtgggggtgtggatggggctggggggttcaccctcgatggcgtagtcccgctggcggttcaggggatccagcttgggggccgccttggtcagcacctgggtataggggtgggcggggtgctggaagatggcctcggtggggcccacctccacgttgctgcccaggtacatcaccatcacccggtgggtgatgtggcgcaccacccgcagatcgtgggagatgaacagcaccgtcagctccagctcccgctggagctgggcaagcagattgatgatctgggcctggatggatacgtccagggcggacacgggctcgtccgccacaataaaggcggggttgagggagagggcccgggcaatgccgatgcgctggcgctggccgccggagaactcaccgggaaagcgctcggcgatgtccatggtcagtccgctcatggtgaggagctgctccacccgggcggggagctcctcggccggcaccaccttgtgtacccgcagcatctcggcgatggtgtcatataccgacatacgggggttgagggaggagtaggggtcctggaagatcatctgcatctgggggcggagcctgcggagcgcatcgcccttcatgtgggagatgtccgtgccgttgaggcggatggtgccgctggtgggctcatacagccggagaatggtgcgggccagggtggacttgccgcagcccgactcgcccaccagacccaggttttcccccttgaagagctggaaggacacgtcgttgacggccttgaggtagcgtttctccttccgctggagcacatcgccggccgtccgcttcagcggaaaccatttgcacaggtgttccacctccagcagcaggggacgggaatcagccatggggggtgtcctcctttcgtccggcgccgtccggcacctcgatcaggccctggaaggacgcggtcacgtccaggcggtgacagcgggccaggtggcccggctccacctcggtgagcgcgggccgctccctgcggcagaggtcgcaggcgtatttgcaccgtggggagaaggggcagccctccggcaggtgggccaggttggggggcgaacccttgatggcctccagcgtggtgccggcggtctcctcgttgggcagggagcccatcaggccgtaggtataggggtggcgggggcggctgaagagcgtgaccgtgtcggtcatctccacgatctggccggcatacatgacggccacccggtcgcacatctgggcgatgacgcccagatcatgggtcaccaggatgatgctcatacccagctcttgcttgagctggttgagcagcttcatgatctggtcctggatggttacatccagcgcggtggtgggctcgtcggccagcagcagcttgggccgggcgcccagggcgatggcaatcatggcgcgctggcgcatgccgccggagaactggtggggatactcatccagacgggtctcaggggaggggatgcccaccagcttgagcaattcaatggcccgccggcgcttctcctccttggacagcttctccccctcaaaggcctcgtacatctggctgcggatgcgcagcaccggattgagggcggtcatgggctcctggaagatcatggagatctccttgccccggattttttgcagctcccgctggctcattttggcgatgtccgcccccttgtagcggatttcgccgccggtgatccggcctggctgcttcagcaggcccaggatggagcggagggtctggctcttgccgcagcccgattcgcccaccaggccgaaggtctccccctggaagacctggaaggagacgccgtccacggcgcggacggtctcccgcttgctggggaaggccacgtggagatcactgacttcaagtagtttttccatgccgggctcaccgtcctttcgtgcgcaggaagtcggtcaggccgtcccccagcagggagaagccgacgccgctgacggccaggaacaggccggggaacagggtgggccaccaggcgaaggtgatgaagtttcggccctcgttgaggatggagccccactccggtgtggggggtgaaacacccaggcccagaaagctcatggacgcgcccgtgagcatgcacatgaccacgtcggaggcggcgaagaccaccgccgagctgatgacgttgggcagcaggtggcggaacagaatccgggcgtcggagaagccggccacccgcgcggcctggatgaactctgagtccttgagcaccagtacctcgctgcgcaccagcttggcgtagctcatccaccccaccagccacagtgcgatgaacaggttgatcagtccctggcccaggatggccatgatggtgatgaccaggatggtgaaggggaaggccatcatgatatcggtgatgcgcatgagcaggctgtccaggaagccgccgtagtagccggccagcagtccgatcatgccgcccaccagaaagggaatcaccacgcccagcacgccgatgagcagatcgatgcgggtaccccagatgacgcgggagaagatgtcgcgaccgtagaagtccgtaccgaaccagtgggccgcactgggggcctggttggacacggtgacgtcggtggcgatgggatcgtagggggcgatgaactgggggaacagggccatgaggatgaccaccagcacaatcagcaggccgatcacgaaagagggcttggccagccacgccggcatggagcgcttctgctccagcggactgacgccgtgataacgtttcattcgtacacccctttctacagattgacccggggatccaggaaggaatagaggatatcggtgatcagattgatgaccagcaccagcaccgcaaagagcagcaccacatactgcaccaccgcatagtcccggccgaagatggcgtcgctggccagcttgccgatgccgggcacagagaacaccgtctcgatgatgaccgagccgcccagcatggccgccatgcgcatactcagaagggtgacggtggagatcatggcgttgcgcatcacatggcgggtgcgcacctcgccgctggtgatgcccttgctgcgggcaaagtccacataatccatgcgggtgatgtccaccaccgagttgcgggtgttgcgcagcagcagggcggaggtcatgagggactgggtgacggcgggcaggatcaggcagcggaactgtcccagaagggtgtccgaccagccgccggccggcagccatttcagcttcagggcaaagacgatcatcagcagcaggcccacccagaaggagggcatggagatggccaccagggaggtggtgcgcaccacctggtcgcccagacggtccttgtggacgccggcaaaatagcccaggggcaggctgatgaccagagagatcaccgtgctcatcagggtcagcgccagggtcaccggaaagcgggaggccagaagctcggacaccggcatctggtaggtgaaggagttgccgaagtccagagtgaaaatctgcttcaagaacaggaggtactgggtgagcaggggctcattcaggcccagcttctccgtcagggcggccacagcctcctctgtggccttctcgcccagaatcaggcgggctggctcaccggggatgaagcggatgatggaaaacaccaggatggtgaccacaaacagaaccggaatcatctgaaggatccgtttgaggatgtagttgagtcgattcaagaagttacacctgcctctgtcagttcgtgggaccgcgcgtcccgttcccggggaactgcggaacgccttgtccacggggaagccgcgccttccccatggacagagcgtcccgcaaaaagagccgggggatggagccgtatgctccaccccccgcggctggggcctcgccgtccgggcgaacgggagggcgcggctcagttggccttggtccagtacatggcctggtacacgtagaaggggttgacctgcaggccgtctaccttggcggagcgggcgaaggcgaagtcattccggtacagggggatgacgttggcgttgtcatacacctgctgctgaatgtcgcggtacatctccacgcgcttatcgtggtccatctccgtctgggcggccatgtagagggcgtccagctcctcgtcgttcaggccggtgtagaagcactgggcctgatcgtagtccacggtccagcccacgacgccggagggatcctggtagtcgtccacccactggagaatggtggcctggtggctctgagagctgtacttgtcggtcagggtggcggactccagaagctcgatgttgcaggagaagccggcctggtccacctcggacttgatgagggtggcaatctgctcatagaacgtggagccggtgcggatggacagggtaaactccacgggctcggtgtagccggcatcggccagcatctgcttggcggtgtcgggagcgtactcggtcacctgcagatcggtgttgcaccagtcgccctgggtctcggagacaatggcggccacaggggtgccgtactcgccggcgatggcgctggccagctcggacttgttcagcgcgtaatacagggcctggcgcaccttgacatcgtcaaagggaggcttcgtggtgttgacggtcagatagtagatctgggtggaggggaagatgtccagcgccagggcctcgttgctctccacgccctgggcgagagagaaggggaaggtgggggccacgtcgatctggccggactggagctgcatcaggcgggtgttgtcgtcggcgatcaggacgtacttgatctccttggtcttgggcatgccctccacgcggtagtaggggttggcctccagggtcaggctgctgccctgggtccagtccttcagcatgtaggggccggtgccgaccgggttcttcaggtactcctcgtcgctcatgctctcggcataggactggtcgcccagcaccatgttgaagcagcccagctcagccaggaaggcggcgttgggttcggtgagggtgatgaccacctgctcgtcggtggcctccacggtgtcgatggcctcggcgatatagcggtagttggaggtttcgtagtcgcgggcgcggtagaaggaccagacccagtcgctgggctccacatcctcgccgttggagaacttgacgccctgcaccagattgaaggtataggtcaggccgtcgtcgctgatggtccagtcggtggccaggacgggctcgatggagccgtcgtcgccggtgcggaccaggccctcgaaaatctgctgggacacctgaacctcggcagggcccataccgggggcattgggctcaatgtacttgggctcggcggtaatgccgaccacgatctggtcggcgtaggatgccggctctgcggtggtgccgggggtaggggacgcggtgccggtggcgtccccatttccgctgctgccagagcaggcggccaggcccaggcccatcaccgcggcaagagacagggccgtcagtttccgtgcggtaggattcatgcatactcctccttactaatgttttctactacagtgtttactgtagtaagataaactaaattatagcaaatgcttttgtcaattgcaactgtttttcgcgacggatcgccaggcaaattgatagaaaaatcccctctttccataaaaagaggggattttgtgcaggattaaattcatattgaagtgtttgggtcggaaaaacaactgtcaaactttcggtgcagtgtgtcacggcaggtcttctcctcctgggtgggagcgccactggtaaaggtatagagcatagccagggtgtccaccaggccgaccatggaggtaaaggagttggtcatacccatcagctccacatggcagagcagggtagtctgggcgcagcgggccacgggggaatcgggccggtccgtaagggctgccacgggcatgccgatggaagcgcagtagcgggtcagggcgatggtgtcgttgccgtacgggggcacggtgatggcaatcagcagcccatcctggggcggctgggcggagagccgccggaacatatcctgccgggcctgcagatccaggatgcagcagtccagctccagtgagagcagccggtgctccaggtatccggcgggaaaacggctgaagtcatgggcggcgatgaaaatacgcctggcccggcgcagggcttgggtgaaggccagcagcagctccacggagttgccgtccagggtgctctggagggcctcccgctcggcgcggcagacccgctggtacagatcctgggcactgccgctgcccgccaccgccagcttcagccggtctccggcgttgacgcgcacgatcaggtagtcctgaagcgccttcttgaggtccatatagctgccaagtcccaggccgcggcagaagttcaggaccgtgacctccgtggtcccgacctgctgggcaaagcttctgagggagagaaagcagcactgctccgggtaattcaggataaagtcggagatacgctgcctggggcggctgaaggagccgtaattggccctgatttgctccaaaatatccatggtggtcctttccgtgtgcaaagattcggttcgcctgctagtgtaccatagccggaggagagcgtacaagcacttttgcaccgcaggcagacgcggggcggcccactcataggccgccccgtgttccacttttaccaaaagccggacgcggcgttacagcagaatcaccccggcgtcgcgacaggcctggatggtctgttcatcccagacactggcctgcacctcgccgatgtgggccttgagccccgcccgaccgtggccgggcggggaccccacagattttatctgcgcggggcgaatgaatcgccccggcatcaaggttttgcagagcaaaacgcttggacgcgcccaaaggcgcgggcctgggcaaagcccaatcggcgtcagagcagaattaccccggcgtcgcggcaggcctggatggtctgttcatcccagacactggcctgcacctcgccgatgtgggccttgcccagcaggagcatgcacaggcgggactggccgatgccgccgccgatggtgaggggcagcttgccctccagcagcagcttgtggaagggaagctcccgccgtgcctcgcacccggcgagggtgagctgacggtccagggcggcggcgtccacccggatgcccatggaggacagctcaaaagcccgctccagcactgggttccacaccaggatatccccgttgagggtccagtcgtcgtagtcgggggcccggccgtcgtgtgggcggcccgacttgagcgcgccgccgatgcccatcaggaaggtgacgggatgctctttcacccaggcatcctcccgctccttgggggagcggtcgggccagagctcctccagctcctgggtggtgacgaaggagacctccgtccccagcggaggaagagcggtgagttggggaaagaccgagcgcagggtgtgctgggtctctgccatggcagagacaatggtgcgcacggtttgccggagatagtcggcgttccggtcccggggggcaatgatcttctcccagtcccactgatccacatagacggagtgcaggttgtccagctcctcgtcccggcggatggcgttcatgtcggtgtagaggccctcacccacggagaactggtagcggtagagggccatccgcttccacttggccagggagtggaccacctgtgcgtcccgcccggcgtcgggaatgtcgaaggagacggcccgctccacgccgttgagatcgtcgttcaggccggtggaggcctccacaaacaggggggcggagacccggcgcaggtgcagcgcgccgcccagcgtatcctcaaacaggcgcttgagcaggccaatggccttttgagtgtcatagaggttcagacagggggcgtacccctgtggaatgaccgtttgcagcataaaaaggctccctttccacgcagttgcgcaatactgtaccacattatacaggaaaagcgctccgggggcaagggaggaaacgggggaaagaagcaataaatatttcttatagaaaaataaataagtatcattttacctgatggaaattttacggtatgataggggaacccatcagaaagagaggaagtatgacatgaagcactggaacgagagagggcccgggctgctgctgtgcctgtgcatcgccattccctgctggatgctgggccgggcgctcccggtcatcggcgggccggtgttcgccatcctggcgggcatggccatcgccctgcttgtccgggataagggccgggctcaggcgggcatcgcctacacatcaaaaacaatcctgcaatatgccgtgatcctgcttggcttcggactgaatctgtcggaggtcgccaaggtgggcattcagtccttgcccatcatcctgtccaccatcaccacctccctggtggtgtccttccttctgcacaggctgctgcatatcccctccaacatctccacccttgtgggggtgggctcatccgtctgcggcggctccgccatcgcggccaccgccccggtcatcggcgcggacgacgaggagatcgcccagtccatctcggtcatcttcctgttcaatgtggcggccgccctcctgttccccgccctgggcggcctgctgggtctaggagacgagggcttcggactctttgccggcacggcggtgaatgatacctcttccgtcacggccgctgccgcggcctgggacggaatgcaccccggggccaacaccctggataccgccaccattgtcaagctcacccgcactctggccatcatccccatcaccctggcgctggctctccggcgcaccgcccgggccaggcgggcaggcggcgcgggggagggaagcttctctctccggcgggtgttccccttcttcctcctgttcttcatgctggcctccctgattactacgggggcgtccctggcaggagtggacgcagcggcctttgctccttttaaggagctgtccaagttcttcatcatcatggccatggcggccattgggctcaataccgatctgatcaaactcgttaggaccggcggcagacccattctgatgggcttgtgctgctgggcggccatcacggcagtgagcctgggcatgcagtacgcgctggacctctggtaaagaaaacgcgcacccgaatggcttcgggtgcgcgtgaggctgttgataaaccctctagcgaaaggattcggagggaaggatagtgtgaaagggaaccgtcagggttccctggaggtgaattggccgcaggccaagagaggccggcctgggccgttcgcgttgaatcaaacaactttttgaaccttttctaaaggttcaaaaagttcagcagcctgtcgaaaagactttttcgacaggctgacgcgcacccgaatggcttcgggtgcgcgtattcagcggtgctccagccacagcttttttcgggcgcggagcacgaagcagatgagccgaacgacccagtcccccaccatggccagccacacgccgatggcgcccaggccgaagtggaggcccagcagatagctgccccccacccgcaccacaagcatggaggtgatggaaatgaccatgggcaccctcacgtcaccggcggcccgcagggcgttgggcatggtgaaggccaggggccaaaacagcattgcgcagccgttgtggatgaagatgagcaccgcggcgtaccactgggtctccggcgtcaggctgtagaggcgcaggatgaggggcagacccagcagcagcgcagcgttgagcccccaggtacacaggtaggtgagcttgaccagccgcttggtgtaggagcgcacctgatcccagtctccggcccccacacactggcccaccacggtgatgagagcaaggcccagggcctgaccgggaatgacgccgaaattgtcgatgttgttagccacggcgttggcggcggtctgggccgtgccgaaggtggagatcaggctcaccagcagcacccggcccagttgaaagaagctgttttccaggccgttgggcacgccgatgcggagaatctgggccatgaccgccggctcgaatcggaagcggagcaggccggacacccgcacggggttgcgccggccgtggagcagggccagcatgagtccggcggccgcgatgcgggacagcagggaggagagggccacgcccgccacaccctggtggaacacgaacacaaagacagcgttgcccgcaatgttctgcccgttcatgtaggcggagacgcacatggaggccttggagttgcccatggcccgcagcagggcggcgcagccgttgtagacggcgatgaaggggtaggagagggcggagatgacaaagtaggtgacggccccctccatcacctccggctccacttggccgaacagcaggcccagcagccctgccttgcagaaaagcaccagaaccatgatccccagggcagcggcggtgacgatatacagaagttggttggctgcccggttggcccgctccaggttttgggcgccgatggactgggcgcacaccaccgcgcccccggtggccagggcggcaaagatgttgatgatcaggacgttgatgagatccaccagcgccacgctggagactgcggcctctccggcggaggagaccatcatgatgtccgccatacccaccatgacggccagaaactgttcgataattaagggcagaataagcctgcgcagggcctgcttgctgaacacgggacaatcctcttttctctttgtggctgtgttccagtatagccgatccaacccgggcgggacaagaggcaaaacacacggaatcccttgccatttttgccggataggggtataatttggcccaggaaatgcgacaaaaccaaccgaggaggagaccatggaaaagattcagatgactaccccgctggtggagatggacggggacgagatgacccgcgtgctgtggcagcagatcaaggacgagctgctcctgccctacatcgacctgaaaaccgagtattacgacctgggcctgcccgagcgggagcggacgaaggaccaggtgaccgtggactccgccgaggccaccaagaggtacggcgtggcggtcaagtgcgccaccatcacccccaacgcccagcgggtggaggagtaccggctctcccagatgtggaagtctcccaacggcaccatccgcgccatcctggacggcaccgtgttccgcgcccctatcatggtcaggggcatctccccggtggtcaagacctggaagcatcccatcaccatcgcacgccacgcctacggcgacgtttataggtgcgccgagtaccgggtgcccggccccggcagggccgagctggtgttcaccggcgcggacgggaaggaggaattccgccagaccgtctacgactttgagtgctccggcgtgctccaggggcagtacaacaaggacagctccatcgcctccttcgcccgttcctgcttccagtacgccattgacaccaaacaggacctgtggttcgccaccaaggacaccatctccaagcagtacgaccacaccttcaaggacatcttccaggccatcttcgacgccgagtataaggccgccttcgacgccttgggcatcgagtacttttatacgctcatcgacgacgcggtggcgcgggtgatccgctcccagggcggcttcatctgggcctgcaagaactacgacggcgacgtgatgagcgacatggtttccaccgccttcggctccctggccatgatgacctctgtgctggtgagccccgacggcaaatatgagtatgaggccgcccacggcaccgtcacccgccactactacaagtatttgaagggggaggagacctccaccaacccggtggccaccctctttgcctggaccggcgccctgcgcaagcggggagagctggacggcattgacgctctggggcagtttgccgacaagctggaggcggctgccatcgccaccatcgaggggggcaccatgacaaaggatctggtgggcctgtgggatggggagatccccgccaggggtgtcacctccctggagttcatccgggccatccggaccgagctggagaaaatgctgtaattcaaatcgcgggagcgttcccgaaaccgtcttccctcgtacgagggaggacggtttttttgaaataaagaaaaatgcattgactaaaataaatttcagtgatataatctgcacagaatcaaaaatagaggaggacgatttcttatgaacattatccagacaaaaggggcgcccgccgccattggaccctattcccaggggatttccaccggaaagcttctgtttacctccggccagcttccggtgaatcccgccgacggggccatgcccgaaggcatcgccgcccaggcagagtggagctgcaaaaatgtgggcgctattctggaggctgctggctccggttttgaaaaggtggtcaagaccacctgctttctggccgacattgccgactttgccgctttcaacgaggtatatgccaggtattttacctccaagcctgcccgctcctgtgtggcggtgaaggatctgcccaagggagccctgtgtgagattgaggcggttgccgaactggactgacagccgcttatatatgattggggaccggaatttgccgtaaagcagaagagaaaggagtatggaatatgagcgtccaggataagatcagcaaaaagttccggggaattcaggggggactgtttgaaaaagtctccaaagccgatgtgggaacggcattgaacgacctcattgccaacggcgcggctctgatgtgctgggccgaccccttctatcccgacccggcgatcccggagcacgtgaaaagggctactctggcggggctggaggacgggacatccgcccattacaccatgcccatcggcaacatggagctgaaaatggaactggcgaaaaagctcaaggcattcaaccacctggatgtggacccggagcgcaacataattattacgcccggctcagatgccggcctgatgtttgcaatgatgcccttcattgacccaggcgatgaggtcatggtgcccgaccccagctatccaaacaacttcctgaacgccagaatcctcggcggtgtaacggtgccggtccccctgcgggaggagaacggataccaactggagatcgaggagttcgaaaaacgcctgacgccaaacaccaaaatgattgtccttaccaaccccaacaaccccaccactaccgttatgcgcagagagagtctggagaagctggcccaatttgcagttaagaacgacctgattgtggtgtgcgaccaagcgtttgaggactcggtgtacgacggggtggagtttgtcacccttgcgtccctgccaggcatgtgggaacgcaccgtcacggtatgctccatctccaagggaatggcgctcagcggctaccgggtggcttacatcgtggcggacgaccacatcatggatgtgtactatggcagcgccgtaagcgtgatcggagccaccaacaccgcctctcaactgggagccattgctgcgttgaaggatgcctctttcctggaggagtacaaccgcatctttgaccgccgccgcaaaatcgtttatgagatcttcaactccattcccggtgtgtccatggccatgccggagagcaccttcctctgctgggtgaatgtgtcccggctcggcaccgccgatgaggtcaacgcctacatcatcaaggaggccaacgtggtggtgaacgccggcaccccgtacggcgcacaaggggagggacacctgcggattgtattcggagccttccgggaggaagcgcagatggtggcggcgctggagcgtgtcaaagccgcactcatgaagctgggaaaggagaagggggtttcctgagcaatggaagagagaaagagatatccggttgagttccggggcggacagtggtggtccgttgtacccatgcttattttcctggtattctgtgtggtctattttgtgggctacaaggtctttgatatgaacgccctggcggtgggcggcttcctggggctgctgataggcgcgctgttttgcaaaacctatggtgcctactgggatgcggtgctgcgtggaatcggaagctccacctccgtaagtattgtggtgatcctgctggtcattggtatgtttaccaagctgatggccatcagcggggtatcccagggctttgtctggatggcacacatggtcggtatgccgggcagcatctttacggcctttacattcctggccgcctgtctgattaccacggctaccggctcctccatcgggaccctgaccacggtgtttcccatcctgtatccggcgggaatcctgctgggcagtcaccccgcaatcctggcgggcgcgatcctctccggtgcaattttcggcgataacctggcccccatctctgatgtgaccattgcatccacaaccaaccaacggttccgaaccaaggagggttatgccgatatcgccggcacggtgggttaccgactgaaatatgccctgatcgccggcggcatcgcgttggtgctcttcgccgtattcggcggcggcagcggcgcagtcatggaaggggcggatgagatccttcaggccaacatggatcccaagggcctcatcatgctcatcccagtggccgtcctcctgtttgtgtcgatccgcacccgcgatatcttcaaggccgtcacggcgggcctcgtctcgggcattgccgtgggcctgctctccggcaccttcggtccctctgacatcctgggggtggagaacggcgcggccaccggctttatctataacggctttaccggcatgatcggtatctgcctgttctgcatggccctgttcggcgccatgggcgtactcaacgagagcggcacgatggagcgcatgattcaaggcatctgcaacagccggtttgcacgcacggcccgcggggctgagctgctcattgggctgggctccatgcttaccaccctgttggtaggaggtgtgaccagcgcctcggtacttaccttcggctccgtggctgatgagctgggcgccagacaccagattcacccctaccggcgcgccaatttcctgacaggctatgccaacaccttccccgcaatcctcccttttatcagcgccttcatcttcatctcggcctcgtccattgagccgctgctggaggagtactcctatctgcctgcggtgaccccgctgcagattttcagtggggcgttctatcccatggtcctctttgttgtgctgaccgtatcgatcctgaccgggtgggaccggatttatgagggcccggacggcgcgattctccacaaaaagccctgattataaaaaaggctggaaccaaaccggttccagcctttttcagccgtgattgagattgcgtacatgcatataaactgtgttcttggagatacccatgaggccagcgaccttgacgaccgcatctttcaggttgaagattcccctctggtaaaggatactgacaatctctttgtttttgttggcgtttgaaatggcgctgtcgttctgaaccttttggctggcttcggtcaccgcctggacaatcagttcatccacattctctacatagctctcctccacgggagaatccggagtctgtgcggcgggcggagtcatactctgcagaaattgaaacaccgaggtgttcatgtaaaagttgatgcacagcaggccgatagccatgcggctatgattgcgaattacaatggtggccgatttaaggggttcgcccttctggtttcggttaaagtaagtgatgcagtttgtgtcgggccgttcctcgatttttgccagcatggacagagccaggtctgtgatggggaagccctcgcgtcggccagtatagtgaccgtttataattttgattacggaatggtccaaatcgtgaaggctgtgcaatacgatctcgtatccatccccaaggtaagcagccagaccatccagcaccgatttataagagtccagaattctaaaatcagtctcggtaaacattacattgcgctctttcaccgtgtatccctacctgtttcgtggattaaatcagttttcagtataccataggaatggaaaaatttccacagggaatccgatgaatcagaagacctgccgaaacagaacacggtttgagagcaaagaaacatcccgctcaggggtttcgagtccgtatgctctgtgctgtgctaaccgccggagaactttgctgcacttttttgtatggttttttctggttgtggatatgcttacggtatccataaaacaggagggatttttatgtccgctgattttgcacaaagtgaaaccagactcaatctcatgcgggcctttgccggcgagagtcaggcccgcaaccgctacaccttcgcagccggactggcccggaggaagaacctgtatgtactggagagcgtgttcaccttcaccgcggaccaggaacgggcccacgccaaggtgttctacaacctgctggagcaggtgtccggtcagaaccttcaggtggacggcacctaccccgtagagctgtttcccgacattctggaccaccttcgctcggcccagcacaatgagtaccaggagtgggaccacgactacgcgggcttttccagaaccgcccaggaggaggggttcccggagattgcccacattttttccatgattgccggaattgaaaagacccatggcgaccgcttcggcaagtttgctgagctgctggagcaggacaagctgtttgtgtccgatgttcaggtcaagtggatgtgcctcaactgcggccaaattatcgacgccaccatggctcccgccgtgtgccccgtctgcaagcatccacagggctactttatccgctgggagatggcgcccttcgaataactgcgaaacccatacccaggccctcaccgcccgtagaagacggtgggggcctgggtatgtccatgaagaaatgaggatggtaggagaaggaaacctgccggttctcaatacggctctgtagaatttatactagacttataggttttcattgacacgacagaagtagggtgctatgatttagacagttcctgccatggagtgtgtgtgtggcggagagagatacagaggaggttgtttcatgttcaaacgctttaccaatggctgcgtgcaggttgtgaaccggtggcttccggatccattcctgttcgccatcatcctgaccatcgtggtctttatcgctgccatgatcggtacgcagcagggtcccctggaattggtgtggtcctgggggggccagggcgaagtcaaggatggcttctggagcctgctgtccttcgccatgcagatggccctggtgctggtgctgggctccgccatggcctccgccaaggcgtgcaagaaggcgctggcagcgattgccaccttggctcacgacaaaaagagcgcaatcctggttaccaccttcgtgtccaccatctgctgctggctcaactggggctttggcctgattgccggcgccctgctggccaaggctgtggcccgccgggtacgggatgtggattatcccctgctgattgcctccgcctattccggctttgtgatctggcacgccggcctgtcggggtccatccctctgcaaattggcggcacgggctctgaggtgcttggagttgtataccaggccccggttactgccactatatttcacccgatgaacctggtcatggtacttgtcatcctggtgctcatgcccttcgtcaactatgctatgcatccggataccgaccataccattgcggtggatccagccttactggtggacgaggcggagaagacttataccatgaataccccggcggagaaaattgagcacaataaaatcctgtggtttatcactcttgtgctgggctttgcgtacatcgtgtattactttgtgcagaaggggttcaacctggatctgaacatcgtcaatatgatttttctgttcctgggtattttgctccacggtgatctgcgcaggtatgtggatgccatcgccgatgccgcctccggagcggcaggcattctgctccagttccccttctatgccggcatcatgggactgatggtggcgcagaacgatgcaggggtgtccctggccggaattatcgccaacttcttcacccaaatctccgataatgtcaccttcccggtgctgacattcctttccgccggcatcatcaatttctttgtcccctccggcggcgggcagtgggcggtgcaggcccctattgttatgcctgcggctactgagatgggcatcgagtacggccgggccgccatggccattgcctggggcgaccagtggaccaacatgatccagccattctgggccttgcccgccctggggattgccggattgtctgcccgcaatatcatgggctatctggtcatcattacgatctttactggcctggtcgcctgcggcggattcctgctctggggactcctgttttaggtattaaacttcatgtgaacagggggcaccacgaaactgtgcaaaggtttaggcgcatgaagtttttgcgcaaatagaaacgcggccgccccatctggggcggccgcgtctgcgcttacggttagaacatgctgatccctctggccagcacggcgaagaggggcagggtgaggatggagagcagagttgacagggtgatggactccgccgcaggggcggtatcccggccgaactgctgagcaaagaggctggtcgtaccggccacaggcgtggcggacaatagcaccagggcgcagtagaggccggaggaggagcggagggggagcagcagcagggcagtcagggtggggaacagggccaggcgcaggaaggaaaccaggtagctcctgggttggcgaaaggtgctgggcaggtcggcttcggcgagctgggtaccgatgaccaccatggccaggggggtgttcaggtcgctcaggaaggagagggccgctcccacgggggaaggaaagcgcaggccgctgagaaagcaaagcagcccgagcccgatgccgacaacacctgggttgagcaccgccctgcgcagggagaaggccgcccggcctcccatgatcagcacgcccagcgtccaactggtcaggttgaaggccagcagggccagcgcgccgtagaccagcgcctcctccccgaggatggactggaccagggggagccccatgaagccgatgttgccgtagaccgcagcaaaacgcagggtgtcccgggcatccgccggctgccgccggaagaacagcagggagacggcgaaaaagagcagatagcaggccagcgccgccgcagagccgaccgcaacctcctgcgtcaaggcgggggtccgcttcaccagaaagcagtccaccatcacacagggacagacgatgtagagcagcaggtacgacatctggctgcggcccgcctcagttatctttcccgcccggcccagcacaaaacccaccgccatcatcaaaaacaaagtggccacctgtccggtgaccgtcagcagattggacagcatctccattccccccggatgaaagttcctgttcttattaaaccacagcctggggaaaaagggaatgcacttttctcatcccggcgcttgcggcctgccccagggtagattataataaggccaatggaaacagagagaaggggtcaaacgatggagattttagtgattgacggacagggcggccggatcgggcagcagctcatcaaggcgattctaacccgttatccccaggtggaggtgaccgccatcggaaccaacagcctggccacctccgccatgctcaagggcggcgcgtctcagggggccacgggagagaacgccctgctggtggcctgccgccgggcggatgtgattttgggccccctgggcatcgtcatcgccgacgccctgatgggggagatctccccggccatggcggtagcggtggggcaggcccgggcccggcggatcctcatccccctgaaccagtgtgacaatctggtggctggagtggcggagctgcccgtggcccggttgctggagagcgcggtgggggaactgggcaagctgctgccgcccgccggcggagcggaatagcgcgaaacccggcggatgcgtcagcatccgccgggtttttctgccagcttggccagggtatccagtcgggcctgctcccgcagggccgccaggggcgggaagggggcggtctcaggaatgccataggtctggttgagctcgtactccaggggcagccaggtgtccaggggggcctcgttgtgctgcaccaccacctccagcttgtccagagccttgtagacccgggcttccggcgtggccagggcgtccatctcggcaaagagggcggtcagctccccccgcagcccgtcgggcaggggggagagcagctctgcgatggcctggcgctcggtttcctcgttggcgtcggtcttctggaaggaggggatgtctccggtgaccgcctccccaacgtcgtggatgaggcacatgcgcagcaccttgtccatatccacctccggcagcgcgtcccgcagcagcagggccagcatggccagccgccaggagtgctctgccaccgactcgtgccgcccggaggaggtccaggagtggcgggtgttgcacttgagcttctccagcctggccaggaaggccagaaattccttgggttccatccttacatctccttttccagcttgaagcgccaccacagggagtagaactgaatgaacagatagaccgccaccatcaccagggtgagggccagatccgcctccatgaggacggagaagaggagcatggccccgaaggcgaaggtcatcacgtcgtaccccttggcttttgcggcattgccgatggccacgttgcgctcgtcccgctccgcaatctcgttctgtttctggagctccgggtgcttcttcatggcctgaacggccagcagctcccctgtaccgccgccgaacaggccgcagcccacccccaggcatagaaaggggaccgcccgccagggggtggtatccaggccgggcagcagcttcagcagcagccaggccccggccagcaggagcagccccgccagaaagagcatccagccctgccgtctccgtttggtcattgcgcatcctcctcatacaaaaaaatctcctcgatgctctgcccgaagcagcgggcgattttaaaggccagcaggatcgaggggttgtaccggcctttctccagggagctgatggtctgccgggagacctccagaatggcggccagctcctcctgggtgatcccccgctccctgcgcagttcctccagccggttcttcaagcgtgcacctcctttggaaagctgactttacatctatgttatagcacagcagagtctgtatgtcaagtgcactttccataaaagggtgaaaaaagcgccgcccattgggcggcgctcagtctgtcgaaaaaccttccccgaaggaaagactcgcagagctcctgcggccgcagccgcaggaatcgaatgaaaatccgtcatttccgaggacatgcgccttggaatcagccggccttgcgcagcggggtaggagcccagtcggcgtccagccagaagggggtctcccggcggaagcgggtgagcaggggcaccagccctaccagctcggcggcggcacacagcttgtccatggtacttaccaccgccgattccaggcagcggtacaccttggtgggggtatagggaaacatgtgggagcggatgatgtcctcctcccgccaggtgagggagaagcgggccctggcgttgcgcagggccacctccgggtgctgggagccgtggcggatacccggatgggaggcggcgtccctccagttgtagaggtagaaatcgtggagcaggccgccacgggcggcggcccgggcgtccagtcccagccagtcgcacacccgccaactggcgtagctcaccagcacgctgtggtggtagcagctcaccccggcccggtgctggggcaacaggcgcatggactgcacggcggtgtcctgcatcagatcggagacgtagttgagatattggttcttgtatttgaaattccacatggccgggactcctttgcttggtatctgcctcttagtataccgtgaaaagcgaaagagtccatggagagaagattacgatttggtaaagattttctgataaaaggcgaaaccattacgccagaaaatcctccactgcccggacggcctgggtgagaaagtccccctccatgtccagccaaagcacgtcccgatccttctgaaaccacaccatctgccgcttggcaaagcgcttgatggcccggcccagctcgtccttcagcgcgtccagggtggggattttccccgtgaggtaccagaggatatagcggtactccagtcccagcccctccaaaaaggagtcgtcggccccgccggcgcggagggcggccacctcctccaccattccggcgtccaggcgggcctggagccgctcgtcaatgcggcggcacaccacgtcccgggggaaggtcacccccagcagcaggcagtcgtaccgggggcggggcggggggctctcccactggccggagagggccttctccaccgagcgcataagccgctggcggttgaactcctccccgtcggtgagggtgacgccggtcttttcccgcagcagggcgtagagctccgctgtggtctttccctccagctccgcccggagggccgggtcgggccgggcgtcggtgaaggtgaagccctcggtcaccgcccggacgtacagcccggttccccccaccaggaagggggtgtttccccgggacaggatgccgtcgatggcggcataggccccggcctggaactcggccaccgaatagggctggttgggctctaccacgtccagcatgtggtggggcaccccctccatctcctcctccgtcaccttgccggtgcccagatccaggccccggtacacctgccgggagtcggcggagacgatctccccgccgaagtgcttggccagctccacccccagcccgctcttgccgcaggcggtggtacccagcaccacaatcagcttgggcagcgccatgggcgtcacatcctttcttcactcgtgtccctgtcattgtaacagaaaagttccccggcggcaatgccgccggggaacttggggaggaacaggatcaggcggccttctcctggatggtggcgttggtgcccagcagggcgttcatgccgtccacggtcaggtagtagtggccgtcaaagagaatggcgggcacggtgatgtccgtaccgtccacagatacggtgatgtccgcagggatttgctcctgaaccgcagcggggatgcgcacgggcagggggaacagctctccgtcataggccgtgctggtggtaatggccaccttaccatcggcccaggatacgttgaactggttcttggagccattaaaggtgtatgccagatcccgcatacggaagtagggggctccgtcggcgcccacaaaggaggcggcggtaccggtcttgtccagatcgctgacctttacattgtccaccatgccaagcacctcggagtaggtgtccaggttgagactctggctatagggggactccaggcggccggtattgaccagctcaattagggtggcccggtccgggttgtccttctggagatccacgccggtgatcttccagttgtggtccaccgcgggctccagggggtcgtgctcggccagataggccaccagcatgtcgcggacggaggcggaggactcccactccttctcgccggagatgatgccctcgttcttcaggccggtgtagcggtagtcgttgacacagagggtgagggtcatgtcgtcggtgaggggcttgccctggaaagtcacattctcgatgcgctccccggcgggcttggacaggttgacctcatagttcaggccgatgaagtggtcgtggagatagccgggcttctgcgggttaaaggagatggatacatccccttctttccactggttccagcacgcggcggcccactccatgtaagccttcatctccgcgccggacaccttgacggtgtagagcacattggggtacttgtagatgtcgaacaggttgccgtagttgagatcgccctttttcaggtcgctggtgtccttgaacaacgcaacagcggtcacgtcggcgccggagttctccagttggacggtgccgatgagatcgatgacagcggtgtcctcgatgcggccggaggggatgcccttgatctcgtccaccggctggaagtcggcggaggcatggcccagcacgttgtcctgaatgaaggagacggtcttttcctgggcgctcttgacggcgggcagctcacgcaggccctggtcgggctcgatgcccgccatggagacggtctccacggtggcggaggtgatctccttgtcggcgttgagggtcaggtcgtagcgcaccacctcgccggcattgttcttggcctcacccacagggatgggcgcgctgttgatgtaagtggtgtgggtgtggcccaactggagcacgtccacctcggggcacttgtccaggatggtctgggctgcatcggagccgtcggcggagtactcggctcccaggccggcatgggtggacaccatgatgacgtcggcctggccgccgatctcctggatacaagcggccacggcgtcggccataggctcaaaggtcaggtcagccacgccctgcttggtgccgtcccagcgggggatgttgggagtggtgacaccgataatggccaccttcacgccgccccgctccacgatagtgtagcccgcgccggtgaagtagctgccatcggcgttcttgatgttggccgccagcaccggcatgtccacctgctccagaatggacttgagagtgtccacaccgaaattaaactcatggttgcccagggtccaggcatcatagtccatgtagttgagggcggcggccaccgggtggctggcggtgtccttggagtagaggtcgtcggtcatgatggtgccctggatggtgtcgcccgcgtccaccaggatggtgttggggttctccgagcgcacctggttgacgtaggcggatacccgggccagaccgtctccggtgctctccttcatgtcctcgtaggagtagccccagatattgccgtgggtatccgaggtgccgatgatggtcagatgggtctcgccgttcccggccgccagggcggcggaggagagggagagcgccatggctgccgccagagcggcggacagcagcttgccgaaccgtttgttcctcatatcacatgatctcctttcccattccgaagggcataggtacgccggagcgtgcctgccgtggatatccttatcataccacagggaacggaaaaagtcgacgctgtttccagaaatttgactgccctttcaggaggtgagccgtgccagcagcgcctcgacctgggcgcgggtgaggaccccggtgggatcggccccctccgccaccagtccccagcgccacgcctgcgccacggactccgatgcccagggggcgggatcggaggcgaggacgggggcgccagagcgcacctctgccggggtcagcccctgctgccggacgaaacggaccagcatctgggcggcctcctccagggtgacggcgcaggaggcacggaaggccccgccgggcacgccgttggctacgccggtctggtcgcaccagcccacgccgggggcataataggcgaagggcatcagatcggagaagggggcgggctcggcctccggggcgccggcggcctgccagagcatccaggccagacggccccgggtgagaggggcgtcgggctgctcgggggcggtatagtccgcgccgttggccagcagccagtccaccagggtgtcccgcccggccagatagtcgtccagggtctgctccacccggaccgtggggaccaggggctccacctgggcccccagcccggcctccagcagtgtgcccaggtcgatgtatttgctggagcagctcacccggatgccggagttgggcagggtgaaggagccggtggagccgaagtggttgacgctgccgctggtgggactgcccgccagcacgccgccggcgtccaccagctctacggcgttgatgatggcggaggagtacgtggcctcgcccaccagaccgtagaccttcacgccctcctccaccaggccgggcaccagcataaggatggggaccagcacgccgtcggagccgccgccgttgttgcggagatccagcagcacctggcggtagtctcccgcctccagctcggcctccacctgagcggcaaagccgtccatgggctgcttggggtcctccatgcactggttaaattgaatgtaataggtggtgtcatccagggactgggcaaagtagtaggtgcccttccggtaggcggtggcaggcgtgctctcccgctgctgggacaggctggacagggcggcgtccccgaagccctccatgggcagggcctccacggtgaaggagcctccggaggtggtcacctccagcggttcgccggactccgcgatgcccagatagtccagacaggcctccgagtagaggagctgctcggtctgtcggcggagcttcacggggttgtcggcgctcaccagggtgccgaaacgggtgcagatctcgtccatgggcacgccgttgagggcggtaacggtttggcccagcagggcggcatcctcctcttccgccccagtgagcacccagcttccgtcataccactccgcgccgaaggggtacaggccggtgctgttcagaacggagccgatattggtggtggtgtgggagtcgccgatgagggccaccagactctggagatccagggcaaagtccacgtcgctctcctccgccagacggccctcaatctccgcctttttcgcctcaaatgcctcctggggggtgttggcgtacaggtcggggtggtgctcctgcagggccgcgtacagcgtgtccagatcctcctggcgggcttgggcctgatccggtccggccgccagagccccggtggggagcagaagcgcggcggccagaccggccgccccaagacgggttccaatgtgcatatccaatgcctccttaccttatataataagaaggataacagggcggagaaaagaaaggcggaagaacttcttaaaaatccttaaagatgggcgacaaaaagggagaataaaagacagccgccggaaccgcaaggttccggcagcttgggtggggctccattgccatgggaatgatttgggagagaaggatcgtgtgaaaggctgccccgcagggcgattcggagcgcaagcgccgccttgcggcggcgcttggtgcggagatgaaccgtcagggttccctggaggtgaattggccgcaggccaagagagaccggcctgggccgttcgcgttggatcaaaccacttttcagaatgaattcattctgaaaagtgcctgtgcctatcgaaataagttcgataggcacagccgccggaactgtaaagttccggcggctgtgcgcttgggaaaaagaggaaagagaggagaatacgtcttacttgcccaggcggcggaccagctccttggagcagaaggtggccacgtcgtcggcgtaggtgcccgcgccgaagccggcgtcatagcccagctccttggccagggcgtgggtgatgcgggcgccgccgcagcagaagatatacttgtcgcggacaccctcggcctcggccagctcgatgagctcggtcaggttctggatgtgcacgtccttctgggtgacggtctgggagaccagcagcacgtcggcgttgacctcggcggctttgcgcaggaactcctcgttgggcacctgggagcccaagttgtacgcctcgatcatgtcgtagcgctccaggccgtagtggccggcgaagcccttgcggttcatgatggcgtcgatgcccacggtgtgggcgtcggtgccggtggaggcgccgatgaccaccatcttgcggcccaggcgctccttgaggaactcatcattctcgtgcatgtccatggtctcgtcggtgacggtctgcaccacgatctcattgtagttgatggagtgggtcagggagccgtagaccacgtagaaggtgaagttctcgtccagcttctggcgcagggccacgttggggtcggccaggcccatcttctgggccagcatgacggccgcggccgcgcccttgtcgtcgtccttcaccggcagggtgaaggaggtctgaaccttgccgtcgttcatggtgtcgccatagggcttcaggcgggtcaggtccagggttgtgtcgaggtttttatcgcgaatctgatacagtccggagctcatttgccggcaccccctttcatcatgggctcaaggaaggggttgaagtacccagcagccttgttgacaacgccgtccaggcccttgccgccgtcgcgggggcgcttgatgtcggcaaagatgccccgctccagggtctcgaagatgccgagctgctcgatctgggccagcagatcggtggccttcttcagaacgtcggcggcgcggttctgcatgatgccgccgtccttgaagacaatctcgctgcccaggtcgtgcatggtgcggaagatgtactgggcgttctgaatggccaggaagcggtcggacaggaagggggtgtggatggcctcggtcatcatgcccagcaggtggatcttctgaccggtcaggatggtcaccatgttgaacagggcgtcctgcacctggccgcggaagatattgccggtcatgaacttcgtggggggcatgtacttcaggggcgccttggggaagatctcgcgggccatctcggcctgcgccagctcgtacaggaagccgttctccacatcggggtcgatctcgaaggcgtggcccagaccctgctgctcctcgggcaggccggcccgcagggcgaaggcctcattgaggaactgggaggccagcacggtgtgggcctcctccactgcgtcggcggtggtcaggtagttgtcctcaccggtgttgatgaccacgcccgcataggcgttgatggcgcgggagaaggactggtccaccagggtgcgctgcatgttgatgtcgcggaacaggatgccgtacagggcgtcgttcagcatgacgtccaggccctcgaaggcgcccatggcggcgatctcaggcatgcacaggccggagcagtagttgcacacgcggatgtagcggcccagctcctcgcccaccttgtccatggcctcacgcatcaggcggaagttctcctgggtggcgtaggtgccgccgaagccctcggtggtggcgccgtagggcacgtagtccagcagggactggccggtggtgcggatgacggcgatgacgtcggcgccctggcgggcggcggcggtggcctgcaccacatcctcatagatgttgccggtagccacgatcaggtagacccaggggccctgcttctcgccgccgtgggcggcaatgaagtcctcgcggcgcttgcggcgggcgcggatcttggccaggctctcctccacgatgggagccagggcggcgtggatgtccgcctcgctgtggacgggcagctcggtcagctccagcttgtcggcggccacgtcctcggcgatggcctggggacccttgccggtctccaccatggcgttgccgatccagaaggcggcgccctggggcagcgcgcccttgtccatcaggtggtccaccacgacgctgggcagggggacatcggaggcgtccacaccgtcaatgcccagcaggcggcagatggtgcgctcgacagccacggtggtgcagccgtcgataaagcgctgggtgtcgtcggccacgcgggcggcgtgggcccgggcctgctccaccagcttgaaatcaagattcagcttggattccaacaataatcacttccattctcggtttcagtcaaaagcagggggaagcggaccgctgtcaaatcagcggcccgcttgggaatattccccgattattcctcgtgatgggagcgcttatgccgctccaggttggcgggctccatggacagcgcctggccgcgctccaggccggccacacccatgagctccttcttcttcttgccggtgcagtagtcgcactggcagtcggtgtagtgctcgggctcggtgtaggtggtgatgacgccctcgtagttgcgcaggatgaccttcttgggggtctgggagatgatgtactggggcatgacaggagtcttgccgccgccgcccggggcgtccaccacgaaggtgggcacgcagaagccggaggtgtggccgcgcaggccctcgatgatctcgatgcccttgctgacgggggtgcggaagtgctccaggcccatggacaggtcgcactgatagatgtagtaggggcgcacgcggatcttgaccagctcgttgaccagcttcttcatggtgaaaacacagtcgttgatgccggccagcagcacgctctggttgcccagggggataccggcgtcggccagcatggcacaggccttggcggactcgggggtgatctcgttggggtggttgaagtgggtgttcagccacacggggtgatacttcttcagcatgttgcacagtgcgggagtgatgcgctggggcagcacgacgggggtgcgggagccgatgcggacgatctccacgtgggggatctcgcgcagcttggagatgatgtactccaggcgctcgtcgctcaccagcagggcgtcgccgccggacagcagcacgtcgcggatctggggcgtattgcggatgtactcgatggcctggtcgacctgatccacgggcaggccggcgtcgttctggccggcgaagcggcggcgggtgcagtggcggcagtacatggagcactggtcggtgatcagcagcaggcagcggtcgggatagcggtgggtcaggccgggagcgggggagtcctcatcctcgtgcagggggtccagcaggtcggagtcggcctgatgcagctccttggcggtggggatggcctgcagccggacgggatcgtggggatcgccgggctgaatcagggacaggtagtagggggtgatggccatgcgcagggtgcccaggcaggccttgacgccttcctcttcctcgggagtcagctcaatgtacttcttcaggtcctccagggtctcgatgcggttcttgacctgccagtgccagtcgttccactcctcgtcggtgacgttggggaacaggattttacggcgggactctaccataaacaaggtcatcctttctaaatcagattggggagacatggaaaccgcgggccgtgcggcggagacagcggcgggggggaagggttggggaggagagagtcccccggtccgcctgcggcagagccgcacaggagcggaaatgtcacagatgattgggacagtggttcaattacaggtacttcttctcgaagtactccttgagctgggcattctcacgcagctcggagagggtgatctcggcgtgatccttggtgtagccgttgccgacaatcatggtgacatccttgccgcagccctcagcgcccagcgccgccttggcgaagtcggtggccatggagaagaagtagacggtgccgttgtcgcggacgggcaggatggcggccatctcacaggcgggaacattgacgatcaggatggacacgtcgtactccttgccgccgttgacggccagggacttctccagcacctcggtggggttggtggcggagcccacaatggcgtggtggcacaggttcatgctcttaagcaggtcggcgtcctcctggcagatgaccagggccaccacgttgccggtggggccgacgcgcttcatggcctcgtagcagcacatcatgccgcccttgcctgcgccgcccaggatcagcacggagtcgccgggcttgaccagcttggcggtctgggcgggagcgccggccacgtccagggcggccagggccagctcctcgctcatgtcgtcgggcagcttggcgtacaggccggactcgaacaggatggcctgggcctccacgtccacgcggtcgatctcggggtggatggccttgatcttgttgatcttcagaggagtcagggacagggagaccagagatgcgatcttgtcgcccaccttcaggtcgatcttgtcctgcagatcctcgccgatctccttgacggtgccgataaacatgccgccggagccggtgacagggttctgcatcttgccacgctcgttgacaatgtccaggatcatctgctcggtcttgcccaggtccttcccgcaggcctcatagatctgggtgaaggaggcggagtcgatattcagcgcggacacgtcgcacaggatctcgttggaccagcactccatggtgttgtcgatcttcttggccgcctgggtcagcaagccctggggctcgatgacgcggtgagtgccgtacttgttgcctttcttctgcatagaaagttcctcctgtttcgttcttggtttggttggggagtttggggtaacgatgtatggttggggagattggaacaacaaagattatgccagggacaggatctttcgggcctcgtcgggggtggcgatctcacggcccagctccttggccaggcgtacgaccttctccaccagctcgccgttggaggcggccttgtggcccttctccaggtagatgttatcttcgaagcccacacggacattgccgcccatgacgatgcccgcggccaccatgggccacgcgccccggccgacgccggtgacagtccaggtggaaccggcggggatctgcttgactaagtaatccaggttgcccaccgtggcgggagtgcagccggagacgcccagcacaaaattgaactgcatgggggcgccggggacctcgcccttgttggccatgttcaccacggtgtccaggtggccgatctcgaagcactcatactcgggcttgatgtggttctccatcatgcgcttgccgaaggcccgcatggtgggcatgtcgttggtaaacacgtcgtcgccgaagttgcaggtgccgcagtccagagtggccatctcggggaacagctcggtgggctggagccgctcctctgcggtcatgccgaccgcgccgccggtggagggaatcaggatcacgccggggcaggcctccttgatggcgtccagcaccacgcggaaccgctcacggtcctgggtgggggtgccgtcgtcctcgcggacatggacgtggatgaccgccgcgcccgcctcaaaagcgctcttggcctcccgcaccatctcctccacggtgtagggcaccgcggggttgtgcttcttggtgacctccgcgccgcagatggctgcggtgatgataagcttttccataacacgcctcctcgaaaaaataacactacctcgcctgtgaagatatgggaccctcctagacgtgatagcgcttcatgcacaaaaaaacactatttgcatctgcgggagccctggggcttccgtcagacacaaatagcgcttcatgttacttcatgacaatccgcaagcactgggcccacggctcagggggagggctgtacgattcacatcccccttcggcggagcggacattcacgtgacacatcgggctcgcctgcccttgtcattgtcccgctaccttgcgctccgcgcctctatccatgcgtattattcatttttgacaacaacactataccccagagagttaaatttgtcaactatttttgcgaaaatttaattccgcgcttcaaagtacgctggaatggagaaaaacccccattccagcgtacaaaaccggccgttatagatcggcctgaaacaggtccatcagggcgtcgtccagcttgagcaggcggcacacccgaagggcgtcccgggggcagggggctcccggcggggcgggcagcaggtggtagtccatccgccgggcgatgcgcttgcgggggtcgtccccctcgtctccctggatgtcccgcaccaggccggccacctgatagtgggccccggccacgtcggacacgccgtcgtagtgggtggtcatgagggccacacagtccagggtgcccagataccgcaccagcgcccgggccagggccgcgccctcctgggggttggtgccccgggcgaactcgtccatggccacgaagaaaaagcagtccctggtctggcgcagcagggtgtccagcaggtggacctccttgccgaaggaggacaggccgccagcccccgggccgctgtcggccagaatgagatccacccggtggaacaggggcagggaggcggacttggcgaatacgaagaagccgcactggcacaaaagcagggagagcacggtggagcgcagggacaccgtcttgccgcccatgttggctccggtgatgacggtgcatccggggcgcagttccaaatccagcgaggtgaactgctccccccgctccgccagatcctccgccacctgggggtgaacgacttcacgcagggcgatggatttatcggcgctgagggaggggcggacacagtggtaacgcagggccagcttgcccttggccacgatcagatccaggtggcccagggcctccatgttggccaggaattccgccttccacgccatgagcctgcccgtgagcatgctccgcacctccagctccagctgatcctcctgcacggccagcacccgccgcttctccagcagggggccccgcttgtcgtcgggggtcatgcggatggccttctcaagcttggccttctccacccgcaggggggccaggtcgttgtggtaggaattgacgatggagaaggtgggcagtcgccgcccctccgggtccatcagtgccatggcctccgtcaggggcgggaaggctatgcccgccagcgccggcattttggcgtaggcgtcggtgacctgctccatggtgaccaggaagtgcttgatctcgaagagctccaccaggtcgaagggggtaccgggctcccggtcgaaggagccgcggatgtcgtgaaacaggggcaggcagcgggtcacgccccgcagggccgccgccgcgtccttgaggtcggcggggttcacgcggggcgcctcgcagccgcagccctccgccgcctggggggcggtgccgccggcggcccatagctccatggccagggccacgttgtccagctcctcctccagggcggcctcctcgccggggccgtaccaccggggggtgcgggcggcctgcttgccgaagggcgacaggggactcaggcgctccagcacccactggagtcccgcgttctcccgcagttcatgggtcagttccatgctcagtcctccttcacgttcaccaccggcaggtcgatgacctcccggagggcgcggacgaatttgtccggttcaaaatgccagccgtaggccgaccaggggttggcccccacggctgcgatggtcagctcccggcgcacccgcagctcgccgccgttgcgcagaaacaggtccagcgccgcccgtccggccagcacgtgggtggcgtccgccgccaccagggtggtgggggcgccccgccgggccagggttttcagcagggggtccataatgccccccgccgcccagagcaccaggggccgccggggcagcttgttccacttgggggcgccgctctcctccaggggcagctccaccggctccccctccggggtaaacagggcgaagcgggcctcctggccgtccagggcggcgcagagggcggcgctttccggccgtttgcgggcaaagagccagcaggtgtgggcggtctccgccaccaccagctccatgtcccggtccagggacgcgccggtgcacagcagggccaccccctccacgccggcccccgccagactcttgcgcccggcggccccgtcgatgagcacccgctgggcgcccagctcctgaaagcggcgggtcagcggggggagctgcccggccgccgacggcccggccagctgcacatatccgtcggacagggtgcggaacaccgccaccggccccaggggggtcatcacgtcggtgagatccaccacctccagcgtggcatcgcacagggtgagcataccccgcgctgtggcgaacagatcgccttttttcaggtacagatcgggcttctccgtgcccgtcaccaggtcggtgcactccccgtcccggcccaccgaggtcaggcccaggcactcctcccccagctccgccatcaggcggcgcatagcggtggttttgcccgcgtttttacagagaccaatcaccgttaccggcgaggcatcccccaccaggggcgccagaagctgtttcaaaagacggcctcccttccttgcagtttttgggctgtttgtcaccgccattataagagccctgcaaggattctgtcaatgggagaaaaacgcccggccggagaaaccgctctggccgggaaacagggggagctgcgccggattttgcaatttaacattaaataaaatgcagaaaaggcggctcatgccatccgtaggggcggccttgtggccgcccgcgggcggggacaagccccgcccctacgttccagccaccccgcatacaagccggtgcggcgggggcgttacggagtaagcccccgccgccggaaagccgccgatcgagcagctccggggggtacatccaataggggggccgtagcccccctgattggtcgttttaagggggatgggggccgggaaggggggaaatcgaaaccgcagcgtaaagcaaacgtgccagtggcacgtttgtagcgtaggccgcagcggctttgccgcgaggagggaaccaccgaggggcccgccggaggcataacaagaaagcagttgtcaaaaagggcaacatggaaggtgcgtcagctcggcacaagacgggccgatgtgggcagaaggtgaattgccccgaaggggcaagagaggccgccctggggcgtcggcccctacgctagggggacgcccgtcccaacgcatcacggcgtaggggcgacccttgtggtcgcccgcgggcggccataaaggccgcccctacaggtgtaggccgatggacagtgaatgtcccaatggggggcaagagaggctgccctgggacgtcagcccctacgaaaaagggcgcggccaaccggcggattgccgccgggaccgcgctcaaaatgaaagttaaatataaatatattgcaagactgttcgacaaatcactcagggcttccgcatgttctccaccacggccgttaccgcctctaactgcgcatcgctcaactgtaccaattcatccatgagatgccggagtttttcaggggcccgctgtccatcgtcgaaaaactctttgggtgtaatgccgaagtatttgcagatataataaagcccgctgagggagggcagagactgcccggtttcaattttattgatatagccggcgctctgcccgatggcatagcttaatttacgagcagaaatcttttggggcagacccatatgaagggcgaccacacggtcacgcacgaacgtttcaaactcctcaattgtttccatgtgatcacctcctcttattaaattattttactgcttaatcttgatgaattgagcctttatattatatatttttaaaagaacaaataattataaagctcaaaataagagaaacaaatcatttaaaggtttataggagggaaatcatgtcgtattgtgctaaaattccagaggaaaatcaggcggcggcgctgctgcactatctgggcatcagccggacccggaagggctattggtatatccggtggattttggagtgggggcggcaggaggagatggacgaagcgcggttttatacccggctggtccgccggtgcaaggtcccccgccttcagatggcgagggatatgtaccgcgcgcagcgccgggtggacaccctgcggaactacctggaggaggcagaatccgtccaggccggggtgtgggcgctgctgtgcgttctctcccggtggctgaaccgctacgaggcagagctgccggagggggtcatgggcggcatgggctggcgtctgcgggggccggaggggctgtgcgcaaaatagccccttttcccccggcctttcttggagtatactgggagaaagggggaaaactgcgatgcttgattttcggatggataccttcctggcggtgtgccgccaccggaactacacgcgggcggcggaggagctgaacatcacccagcctgcggtgacccagcatatccagtatctccagagctactacggcgtcaagctgttctcctatcaaaacaagcgcctcgcgctgaccgaggagggggagctgctgcgcaatgccgcgctgtgcatgctccacgacgaggagaagctgaaacgggatgtgaaggatctgcgcctggggcggcgctccatccgcttcggggccaccctgaccatcggggaatacctgctgccggagcggctggccgcctatatgaagcgcaatccccgcgtggatgtccacatgctggtggaaaacacccagattctgctgcggatgatcaatgacggcgagctggacttcgccgtggtggagggctacttccgcaagagcgagtacgactacatcatctggtcccaggagccctatgtctgcgtgtgcgcggcggctcaccccctggcccaggcggccccccggcccctcagcgccctgttcggggagaacctcatcctgcgcaaccagggctccggctcccgggatgtattggagcgggtgctggaggagcgcaaccaccacgtgggcgatttccgccacattgtggaaatcagcgacctgttcgtcatcaaggagctggtcaaggccgactgcggcatcaccttcctctaccgcaaggcggtggagaaggagctggccgagggctcgctctgccaggtagccctcacggacttccagatctcccatgagttcaccttcctctggcggaagaacagcgcctttgaggcggagctgcgggagacctcccgggccctgtggacactataaaaagcgcagccgctttgcggctgcgctttttacggtcacgccatgtcgcctgcaaaaattttgggcacgtcttatccaacagaacggggaaattcgttaaaagtttggcaatttcgagcccttttgccggagaaataaaaaataattatagcagcataacaatttaaaagttttcaccgccgcggcccgggtggtatgtttaaggagaacttaactcaattaggagggattcagcatgggttactcgctgaacgccgtacaggcagaggccgttttgcaggcgctcaaacagaactacagcgtctatgccccgaagcgcttccccaagcagggccgctactcggatacggatgtcatcaagtacgcggaagtagagcactatgaggacatcgtgtggcaggtcaagtccgattacccggccaaggaggttcttacccctatccagcaggccatcttctacttcacagaggatgagtaccgcgccagcaagggccccaagaagcccatcctgattctggcccgcccctgcgacatcaacgcccagcatgtgcaggcgaagatctacgcgggcaacggcggctatacggatctctattatgagcggatgcgggagaaggtcaaattcgctctgatggagtgcaacggcggcgacgacacctgcttctgcgtgtccatgggcaccaacaagaccgacgactactccctggccctgaagttctccgacgagggcgtgcaggttcaggtgaccgacgagacgttcgccccctacttcgaggggatgccccaggccggctacacccccgcctttgtggaggagaacgagctgaaggtcaccgtccccgatctggacgacaaggcggtgcgcctggccctcaagagccatcccatgtggaaggagtttgacggccgctgcatctcctgcggcgcctgtaccgtggcctgctccacctgcacctgcttcaccacccgcgacgtcatctacggcgacaaccccgaggtgggcgagcgccgccgcgtcaccgcctcctgccagatcgccggcttcgaccagatggccggccagcgggagttccgctccactgccggcgagcggatgcgctacaaggtgctccacaagttccacgactacaaggcccgcttcggcgagggccacatgtgcgtgggctgcggccggtgcacccaccgctgcccggagctcatctccatttccgccaccgttaacaaggtcaacgccgccgtgaacgagatcaaggccggcctggcccagcagtaagaaggaggggaacgaaatgacgaatccggttcagcctcaggcctgtgaaatcctgagcgtgaagaaagagagccgccatgagtggaccttccgcgtggccaccgacgcgaagcccgcccacggccagttcatgcagctctccatccccatgatcggcgaggcccccatctccgtgtccgcccagggcgacgggtggctggagttcaccatccgctccgtgggtaaggtcaccaacgtgatctttgagaaggaggcgggggataccctcttcctccgcggcccctacggcaagggctggcccgtggagcagttccggggcaagcacctggtggtcatcaccggcggcaccggcctggcccccgtccgctccatgctcaacatgctggcggcggaccccggctttgccaagtccgtgcacctcatctccggcttcaagaatgaggacggcatcgtgttccacagcgagctggaggcctggaaggagaaattctccaccatctatgccctggacaacgacgccaaggagggctggcgcaccggcctggtcaccacctttgtcaaggagatccccttcgactccttcgacggcgactacgccgttgtggtggtgggtccccctcccatgatgaagttcaccggcctggagctgatgaacaacggcgtggacgccgaaaaggtgtggatgagcttcgagcgcaagatgtcctgcgccgtgggcaagtgcggccactgccgcatcgacgaggtatacgtgtgcctggacggccccgtgttcccctacacggtggcccgggatctggtggactgaggaaggagcgtgtgaaggatgaatcatgatatcaatgtcaagaagatgcgcctgaactgcttccggcagtccaaggtgcccggcgagttcatgctccagatgcgcgtgcccggcggtatggtggacgccaagtacctcagctatgtggagcacatcgccaacacctggggcgacggcaacttccacttcggcacccgccagaccttcgacatcaccggcatcaagtatgagaacatccccgcggtgaacgagtatctggagcagtacatcaaagaggtggacgccgagctgtgcggcgtcaacatggacaccgtggcccacgagccccagccctgggatcccaaggccggctaccccaccatcggcgcccgcaacatcaccgcctgcgtgggcaactaccactgcatctgcggcaactgcaacaccttcgagctggcccggaagatcgagcccatcatcttccccagccactaccacatcaagatcaacattgccggctgccccaacgactgcaacaaggcccatctgtgcgacttcggcatcatcggcgtggcccgcatgacctatcaccccgagcggtgcatcggctgcggcgcctgcgtccgcgcctgtgagcacggggccacccgggtgctctccctcaacgagggtaccggcaagatcgagaaggacccctgctgctgcgtgggctgcggcgagtgcgtcaaggcctgtcccacctccgcctggacccgccaggagaccaagttctaccgggtcatcctgggcggccgcaccggccgccagaccccccgcaccggcaagatgttcctcaactgggccaccgaggacgtggtgcttggcgtgctcaggaactggcagaagttctccgcctgggtcatggactacaagcccgagtacctccacggcggacacctcattgaccgcgccgggtacaagaagttcaaggagatcatcctggacggggtggagctcaaccccgagtgcctggtggccgaggacatcttctggcacgagaccgagtaccgctccaacttcaacgtcaagcccgtggccatgcaccacaaggccggccctcaggcttaatcccccccattcctatcccaaacagcaggagaggctgccgcatctgcggcagcctctcctttcgcttacaggcgggcggtgagctcgtcggtgatggcctgggctgtctggtagacccggtcgaagtccacgtgggggttgtagaggccctccagctcgtcgtgcatggctttggcctgggccagggagtccacggcctcctccaccagggcggcggagaccttgcgggagaacttgagccgggccttgttgcggcgcagcagctccgcgtccgccatggcgtccagccggatgcggcggtaggggcgtttgggataggggagggagggggaggcgctgacaaaggccagggacagactggggatgagcaggtgctccatccggtcggggaacaggggggagggacagacgatgacatcgtggcccgccgccagcgccccggcggccaggtgggtgagcatggagtgggccagcccataggtgtcggccagctcatagacccgcttgcacagggtgtctaccgtctcaaactggcacagcacccccttccacgtgacgccgcccaggaagcgctgcaccgcccggccggcctcgccgtcccccttcttgacctcccgggagagaatgccccgggcccgtttggccattttggcctccagtgccggggtgagcagcagggagcggagatcctccccgatctgggccgccgccgtcagacagcggtaggcccgctgatagcaggccttgtagcccttcatacagcccatcagctcctggcgcaggggctggagcccagcccggtcgtaacagtcgcccagattgacgtaacgctccaccaaccccggatattttggctccacgacgtgggagagagcagcactaggacagttttacagggcgtcacgccctgggggatgcgcctgcaaattcaaaacttccaggtaattcggatctcctgctttccggtttcccggtctttctccccaatctcgattttctcaatgagggcgactaccaactcccgcggaatggtctccagcttcagcaattcccgggccctctccatcaaagcggcctgttccaccggctctgcccgctcccccagttctatgtcaatctgtgccagccgccgctccaggcggcttttttcggccaggaagtcctggttcagctccacgaattgtccctcactgagaatgccggatactcgatccagatataaatttttcagcgcctgactccgcctttccaactgtgtggtcagggacttctgttcctgttccaatgcatctctgcgggtgtccggcggtggtggaagctccagttctttcagtttatagcagctttggacatagtggcggattcgctcagataccagctcaatcagttggtccagtcgaatggaatggcgggtgcagagcttttctcttccgctgtcggcgtacagcttgcagcggagataggacaccctgggccggccgcgctggcagttggtggtcttgctcatggtactgccgcagtccatgcacttgaccagaccggacagcaggtggacctccccggtgccgtccgttttggagcgcaggtccagtccgcgctggacagtctgaaacagctcccggtcaatgatagcctcatgggtgccctccacccgaaaccactgttctttgggcatgtcaatcagagccttggacttgtagctcacctttttccgccgcccttggagcataaccccggtatacatctcgttgcggaggatgcgccagatggtggtcttgttccacagaccatggctgttggacaccgggtgaccgctggcccagccgtgttccgccttgtagcgggtgggatttgggatgccctggtcattgagcagtttggcgatctcctgcttgccgtggccctccagggaccatcggaagatttgccgaaccacctgggcagcctccggctcaataatgagatggttgtgatccttcgggtctttttgatagccgtagatgggaaatccgccgatgtaccgcccctgccgccgcttcatgtcaaaaaccatgcggatattttcggacaggtcctccaaataccactcgttgaccaggccgttgatctgcctggcctttttgttgccctttacctccgtgtcggcattgtcggctatggcgatgaaccggatgccccagatgggaaacaggccgtggatgtatttctccaccaactccatatcccgggtaaagcgggattggcttttgcagaggataatctgaaactgtttctccttggccgcttgaatcatccggttgaagtcgggccgcaggcggtcggcgccggagtagtcctcgtcgcagtagatgtggtagatgtcccacccccgctccactgcgtacgcaacaagcagggatttctgattctggatgctctcggattccgttttgtatttgtcctcgtcttctttgctcagccgggtataaatcgcacaaaggataggttacacctccccggaaggtatccgtactcaacggcagaatacccttgagacgctcttcctataaaaagtatttcgggtaatcgtattatgattctgaaatatgggcttaaagccgtctgtatagtgcatttctaagccataaggtcacagcctgccggatgagagaaagatcaggaaattgttccgaggagagccgccgctccgtcacaatgaaattggtagctttcacacaatcacctccataaaaagctatgaatggtgatggactaatatgtagaggggaaagagccaggggcaaacggcagaaagcgctggggcagactgtgtgaactgtaaacatggaaaagcgccgcctattataagaataggcggcgctctcgtttggccggcttaatgggccggcaactgttttccaagcgtcatttcacggccgtatctgaaaaaggtgtcagttccgtgaggagtggctgtgagaccgtatcgggcccctatgtgttctatggtacacactcaacgaatttctggttactttgcggagtcagcagtatcaggcaaggtaaagcggttcagcatgtctttcaatagctgtgcctgtccagaaagctcttcacttactgcggcactctgctctgctgttgcggaatttgtctgcactacgctggaaatttggtcaattccctgcgtgacctgctcaattgagaccgattggcgctccgacgcattcgctatattttggaacacatcagtaatcttttgtgcttcttctaccacgctttccataaatttcgatgtcgtttccatgctttccgttcccttttcaacagctgcgagagaggccgcaatcaacgaggttgtggagttggaagcctcagcggttttcccagccaggctgcgcacctcgtccgcaaccaccgcaaagccttttccggcctgtccggcacgggcggcctctacagctgcattcagggccagtatattggtctgaaatgcgatatcctcaatggttttgataatatggctgatttcgttggagcgctccctgatttccgtcataaaggccaggctctgccgcattctcttgccgctctcaacaatgtcgctgttgacttgaagtgcgccgctggccgcatccttcacaatcgcatggttctctttgaccgtagaggaaatctccgtaactgccgccgccagctcctcaacggacgacgcctgctctgttgccccctgtgcgagggcctgtgctccactggatacctggtcagaaccactgaacacctgctccgaagccagttggatactactcattaccgcactcagcttttggataaagccttcaatggaatgctgaatgggcatgaaatcgccctggaaggccacgtctgtttggatggtcaaatccccctgcgcaaggcagcccatgacccggtcaatctcattgacatagccggaaagattccggatacattcccgcatggactcggccatttccccgacctcatccgctccattgtgggtgactgcgatgtgcagattgcccatgctcatttcccgcagtgcatcgttgagctgggagatcgggcgcagccgctttacaatgatgatccatagaaggatggcaacaatggcggtactgcctagaagcagcaggacaagagaaactgtggttttggttgtttgggcgttatactccgccttggacatgctggagagcaccttccagcctccgcccgaaagctcctgcacgatacccacgcagggctccccgtccagcttgtagtttacgatttcattggtcggctcctccaactgctccaaaagttccccctggatgtcgagttcggaaaaatttttgccgatcatatcgtggttctcgtggcccaggatcgtgttgttttccgacagcagcacaatgcgtccgctctccccaaaatccattcccttcaaaaagtcggaaacctgtgtcagcttcagatccagtattagaagcccagctgtcgccgtaccgtcagaaagcggggttgcaaccgatacacacatttcatcggtcgccgagtcaatatagggctgggttacgtaagtgccctctttcgcattctggaaatagggccgctcactcaagagcacattcagccgtgttccctcctgattataaatataatcctccgtgagactgccaaagccaactcccaggatatccgggtattcctccatggtacgatgcagaagtaccagagcctccgaaaattccggcgtaccagatatgggcctgtcctgagcagtgccggtgaccgcatgctgcagttgggtgctctgcgccagtgtttcggttatgccaatatactgttcaataaattgctcgacttgtcttttgccgctaagggtcgtctgctgcaaaaaggcatcctgcttctgattcatcccagagctggtcagtgttcctatacagacagccgaaacgaggttaagaatcagcaatgtggcgatcgaaaacaggacaagggtcgtcgcaagtcgtttggactttttccgaagctttgcttttttcacgttcactctctgctcctttgttctatcttcatttagtacagcgcttaaaaaagtatagtttactatttcgctacactattcgactatttgccggccattgcttaaaattgttaagagtaaaattcaaatttttttcctggcctgtgttctgaatgcagactttgtgaacatggaaaagcgccgcctattataagaataggcggcgctctcgtttggccggcttaatgggccggcaactgttttccaagcgtcatttcacggccgtatttgaataaggcgtcagttccgtaacctgagacgcgtcacggtcaagctgataaaggtgagcgccatcaacggtcatcagatagcagccccgatactgacggggggtactggaatacacgttaagctggagacagggggaggaatcgaccaggacaagtccttcctccgcatagacctcgtattcctccatggaggcacccgagagcccgagaagggcgggagtacagctttttaaacgctggatagcctcggagacggtgagagcctgcacactgggctgggtaatgcgcagctcggccgcatagacgggggtgatggtacaggtgtccccctcccaggcaatttggagctgaaatacaccgccatcgccggtatccttgcccatggataccgagccgctggagacagagaaatcggggagctcctttacaacgccgttggtgtcaatcggagagcagccgtcctcctccaaggcttggacataactggccagggtatcggtcatggaggacagaccggagtagacgtaggagtcaggctgatcctcactgccctccttgtgggaaaattgaatgttttcggaagagagggtggaggtcagggcggggagtgcagtatcattactggagtactgctccggcgggacatccttgccgccgcaggcagagagcagaagcggcggcaggagaagcggcaaaagccgccggcctctggaacgctcagggctggtatcgaatttcaatcttgtcaccttccgcgagtagttgctgaaacggactgtccacgccgttgatctgcgtgagcacagggcggtccagatgttggaagtccagcccggaccgctccagcagatccaggagccggtaggggcttccgtccggcttcggggagagcgtaaggggctggccgttgagaaagacatgccgttggggcgggacggaagcctgggccggcgcctcccgggccgggagaggagaaggcgccggcggtgcatccatgcgctccagacaatcccccgactgcagcaccgtatgcccctccaagaggcgcccttcacgctgaacggccttgcaccgcagcttggtacagagctctgcggcggtcatgacacagtctttgccgggctgggcaggggtaaagtgaatacggtcgccggcatgaatcagtgcagaaggggcggcttcagcaccgttgatggcgagttgggcggggatggcgggggagccatagaacacattgcgcctcccgtctatccgaagcagcaggtttttgccgctgcggccgatgagatcggaatagcggtacccattcatcatcagcagctccagcaccgtaaggctcccgctgcggaagagcttggcggggctcccgttgagcagcacctgataactgtcgctgataaggccgaggccggcagagacagcgataccgagaggggtggtatattccggatcagacagcgcgaaggtatcggagtaggcgctggactgaaaataacctcctgccagcgctgcgcgtttggcatctatgccgagggccgcggccacccgggcgcagagggtggggagcttgctccccccgccggccaaaaagacggcggagggaggacctccattgacctggcagatgcgctgtgcgatctcatcggccagagcctggatggggccgtccaggagagaaaagagctcctccgccggcaaggtctgctccaaccccagaatatcggtaaagctcacacttttactgcggcccagctccagcttcatggcctcggccgtggggaagtccaccaggcatgcccgcattagggcttccgtgatttcgtcgcctgctacggtagccatagtataccccaccacgctgccgtccctgcatacggcgatgtccgacgtaccagccccgatgtccaccagggccaggttgagaagacggagatccgccggaatcgcggcatttagagccgcgatgggctccagggtcatgctggccacctccaggccggccttctgcatgaccgcgtagagggagtccaccacctcgctggggagaaaggtagcgaccacggcggcctccagatgctgtccggtatgccccagaagggtggtcagcggatagtggtccagccagaactgcgtgggagtgtagcccaccaggaagaaccgctgttcctccgggccgtcggtggacagcgcttgttccgcatttgccacggcggtggcttcgagctggtggatacgctcatggcccaaggcctcgggggccgaaagctccaaggtgctgcggcccaactcggtacgcagagcccggcccgcggctgccacgcaggcgcgggtaagccttcggccggaggcttcttccaggcggtgtgtcacaagggagacagcgtcggcaacctggtcaatatcctcgatctgaccgtccagcatggcacgtctggcgtgcggctgcttttccagggctagtatgcgtatccgtccctgctccagggctcccagcatcccgatgacgctgcgtgtacctatatcaagcgcatagatgagctctccttcttccattttagtcggatcggagtgaatcggcattctggacggcatctcccttcgcaagctatatgtttggggaaaaaggcgggaagccgcctcagtatgggctgaggtggcctcctgcacttctgatcaatcagtatttgctgaacgggttggcggcggtgcctgcggctgagagggaggcctggctgtccgcggcgggagaaaggggggcagaggcggagtcagcctctgacttcagcttgaatttttgaatgagctgcttcatcatgactgcctgggaggagagctcctcgctggctgcggcggactcctcgctggtcgccgagttggtctgaaccacggcggagatctgatccacaccggtggtcagctgctcaatggactgagactccgaaattgcgttgtcggcaaccttttccatgtaggaaatcgcctcggaggcggaggcaacggtttgctgcatgctggagcttacctcctccgccagggacttgccgcgctccacatgggacagggaggtttcgataatggccttggactgcttggctgcctggtccgatttggaggcaagactgcgcacctcgtcggcaaccaccgcgaagcccttgcctgcactgcccgcgcgtgcggcctctaccgccgcgttcagcgccaggatattggtctggaaggcaatgttttcgatggtgtcgatgatctgcccaatatccttctggccggaatagatgtcgtccattgcctggctgagctcctgcatgcggtcgttacagacctgaacttggccggcagccaggtcagatttttccttcgcggttttggccgtctcagcgctgttctgagcggaggtatcaatctcattgatggtggcggagagctcctggacggcgctggcctgctccgtagcgccctgggccagggactgggaaccgacggacacctgctccgccccggcggatacctgatcggaggcgttgagaatctccgacatggtggcgttcaggttctggaggagatactcaatatttgtcttgacgggcatgagctggccggggtattcctcatggctttccaccgtcagatcgccgtcggcaagtcctttggtgatctgaacaatatcttcaatgactcttccaagaatatcctgggaggtgcggaccgcatcacagatggttccgatctcattggatgcctcataggtcagctccaccgagagatcgccctggctgaaagcgacaacagcctgctccgcctcctggaggggacgggtaatattccgaatggcgcgcaggttcaagagtataccaatggcaacaaccaggatggccataataaagagaacaatctggctgcggctcacacttgcctgtgtagagtcgatgtgagcatcgaggtcgttctggacttcacgaatgagcgtattcccgtcacttacggcctgattcagcttcggagtgcattgtgtttcgattagccgacgtgcctcctcaagattatccgcttgaagggcggtatggatatcctcaaaggcattttcccattcacgtacagactgaatataagtctgggcgacgccgtcggaatctgtatagagggtctgaatcgtggagatcgacttctcgatcgaatccacggaggcctgaatctcatcaatgattgaggtatcatacccggacagcgccatgtccctaagctgacgggcaatcgaattgacctccgtttcactgctctggacggcattggtaatggcaatgggacctgtgaggatggatgtatagtccttctggattttgatggtctgtctgattgaaaggaatgtcaaggccaacgcgatcaggatggtaattaagaatacaattaaaagccgcattctaattttaagatttttttccatgttgcgcatatttgcaatacacctctcctaacatagtcggcggcaggctatacaatatctccataccgccctttttgcacatcgccccagatctggccatccaccagtgtaatgacccgtttccgaagcagattcacaaactcctttgcatgggttgccatgataatggtagtaccatggcggtttatctcacagagcaaatgcagaatatcccagatcgtgtcctcgtccaggttcgcggtcagctcatccagaagcaaaatggacgggctgttgataatcgcgcgggccagttccacccggcggcactccccataggatagctccactgggtaacgcgctcccacatcaggcaggccgaccatagccaaagtcttctgaatccgggtttgtataggcgggagcttccggctctgcgtcagcatggcgactgcggataaattttcggagatggtccgtttccgcatgagctgtgagagctgaggtacgcggccgaaaaccaggcgcaggcggtcgcggcgaagcctggaaagccgcgtcaggttgatatcatccagaaagacggccccggaggtagggcgaagatccccggatatgagctggagcagcgtactttttcccgcgccgctgctgcctgtgagaaagaggaattcaccctgctcgaccgtcagattgatttcctgcacagcggccatttgctttttatcctgcgggtaatacttgctgacccgctctaaccgaatttgcggcatgtggactccttttgcctgtatacaataaaagaaaaaattgctataataaagaaaatattatataataaaaattttgaggtactcttatgtccggtacgaaaaacagaccgcataaaaggcgaaatataatacttcttgttttgttggccctcctctgtattggtggggtggagctgctggtttgccgctttgctgcgccggagctgttccagcggctcacggcccccgtggcaggattgatgcagcgtgtctcggacttcggggaggcactacacagcaatttgcaggagctgctttcccgaccgggggaagatgaaatggtgaatcaactggccggcccgcccgccattgaggaggttcctccggcagaggagagcaaggtcacggagtttgtcacccgggacgggcgggagtatctgaccggcggagtcgtggatctggtttactacaaccagggagaggaaccctgggccagccagaccttcggtaatgatccgatccgcggctacggctgcgggcccacggcgatggccatgctggcctccagcctgactggggaagaaaccgaccccggggccatggccgactgggcctatcagcaggggtactgcgctcctggcagcggttcctatctgtccattgtggagggaactgcgtccgccatcggactggaagcagaggcctatgaggcggcctccgccgatgctctggtgcagcaactggcatccggacacctttttgttgcgctgatgacccgtggacatttcaccgagcggggccactttattatcctgcgcggcgtgaccctggaaggccgtgtactggtggcagacccgaacagcagggagcggagtctggccgcctgggagccgcagctcattttggatgagctctcatccagctgcagctcgggcgcgccgctgtggcggatctccatgcaccagtaaaaaacggtcggggctaggaatcgtaaaaggaatcctttccgcacaggcggccgctggcggcccggtcggcctggacaaccctggtccagagggcgcggttgcgctgaagctgctcctggaggggctgggcagcgggactggccgccggggcctgcccggacaaaagcccctccagctcctcccggtcttccgccggaaggatgcggcactgctgcgccaggttggtctggtattcccgcaattggttgatcggctcctgccggagctggagaaagagctgaacggagacagaatccccccgctgtatggaggtggagagctctcccgtcagctcaagcacctcggagagcgccgcatagatgcggcgctccgtggccaacaccgaagtgagctgttgttccgtcagcatttatacgccctcctgcggagaagtggcggcgcttttttccgcctgccggaagctgtcccgcagctctgaggccatttccttcacacgggccagctccttggcgttgcgccccgaaacgacccggctgagctcatagcaaaagtactcgtacagtcggctcaaattggcgctgatggggaactggcggtcaagggtgtcgtccagataatggatgatatcgacactgcggccgaccgctccctcgaatacctcgtaattctcctgacccaggctcaattccgcctgggtcagccgcttgatcagttcgtcgtagagcagcaaaagcagctcaccctgggtcatggtatttaaggagtcctcacggtaacgctggtaaccccgcatatccatatgtatcatgttcctttccggaacggcggcggcgttaatagccgcccatcattcccgcgagactggaactctgggagttcatctgcgcaatcagcatttccagctgggtgaatttgttggtgtaatagtccaccttgtccgacattttggcctgccacttatccacctgcttgtcgatgtccttcatctgctccaaaagagtgttattcagagcggcagagggggagtatttggagccggccttttcaatgagaatgccctttgttgcgccggtagtggccgcatagcggtccgtcaccttctggatggaggccatcaggccgtcgctggcggcgccgttttccttgctcttggtaaacgcatccttgacctggtccgggttttgttccagggcctcgcggagcgcgttttcatccagcgaaagggtggtcaggccgtcctcatagctggttttgatgccgatggagcggaggaaggagccgtcggagccgccgggggccactgcggagcgcagggcgctgtacagggaggagaggtcccggtccataaacaggatgccggttttggctttctcctcgtaggccttgatctcgctctcggtcatgtccgccttatcctcgtcagtcaggggcttgtaccgggagccgtctgacttctccagaggcatgtcggaataggcctttttgacctcggacacaatggcgttgtagtcctccaccatagtcttgaccacgtcaatgatcttgtccgtgtcggtcttactggagaaggtgaccggggtttctccatctttcacctcaaatgtgccgtttaaggtgatggacatgccatccaaatcaaaggtgttggagctgcgggagaactccatcttctggccgttgatggtggcggtgaattttgcgtcctgcccagcagtgtagtgatccttatcagttacattgactttaccgaacagccgttcacccaactccccgccaatctcaacccgtccgcctgcgccggtttccttggcggtaaagacaaactggttggtggtcttggaaaagctgacgctgactccggcctcggtgttgctgttgatatcattgagcacagtctccagggcggtgtccttgttgtatttgccaatggaaacgccgttaacggtgagctcgtactcctgaaagcgcttgccgtccttgtccagacggtaaccctgctcgtctacggtattgccttcggaatccacacgggaggtcaccttgccgtccttgtcctttatctcagtcacatcaccaatggctctggccaactcgccgccggtcaggccattcaagcccgcaccgtcgctcgtccgccccagcagatcgcccaaggttttgccagtgtccacataggaggtcacaccattctcacccaggccgagcacctcgccgacaggggaggtgatgcggaaagtgtctccattgctgacgctgaaggagaaggagcgctctccggggccagtagtatccatatcgaccgttatcttgcccttaccgaaggccttgtccagaccttcctggaggttctgtttgacctgctcatggagattgccctttgagggatcaatctcgcccaaagtaaaggtcttggtctggccgttgagggtgacggtaaagctcttaccagagaggtattccgctttggtggcgtcttccttcaccaccttctcggtagtgctcagagtaaagctggaggtgccctcggcatcggcagaagtgaccagatttttaagatctccggtggcaccgctgaagtggacgttgttgccagcacctttcttgtcgctgagggtaacggtgccgttgctgtccaccttgacatcaatgagggtatcggcgctcacctggtcgccgctgctggtggtaatcttctgctccttcagcttgtcctggagggccgtttggaatttggcagtgtccagagtgccgtcggccttgttgaacaactccaactctccgaagtccagcgtgaccttcttgttgccatactccaaagtaagggagccgctcatggtgctcagcggctgtttttcgcccagcttgaccggctcgccctttccaagggacgtgtccagcccggaggcgtcatgggtataccgggcggcctcggccagttgtgccacggcgttgagcacaatggtgctgctgctcttgccggtggcgctcaccagatcggcataggtcccgttggcggaggtgaggatcgcgttgttgaagaagctggcgctgaacaggttggtggcgggggagttgtaggacatatacttgcgggaaaactccaccagcttgtcggagatgctctgataggcggactgctgccactggagcatggtacggtcctgccccaactgtgtaattttctgctggtacccctgtaccatgccctcgatcatggcctcggtgtccattccgctggccaggccggaaatgatgttgctgtttcggctcccatagatgctggaagaggaaccactgctcataaggctggagatagatgccatgctgcccactcctttcaacgtgcaacatgaaaatatggcttgattgacaaccattggctttctgagtaaaatgggtgtgttgataggccccaatactctgtattatgttatcgtccggccaaagggaaaattaagagaggatttcgatttttctgacgaaaaggtgcgaaaacctgctctgctccggccggagatgggtgaaaggggtacaggggacatggcgaccaccgtgattgcgattacgaaccagaagggcggcgtcggaaagacgacgaccgctgccgcgctgttgaccggcctgcaccgccgcggcgccgccgtattaggtgtggatatggacccgcaggggagtctggggttcagtctggggctggatattgagcattgcaccaccatttatgacgtattccgggggcaggcggagccggagcaggccattgtacggacagatacctgcgacatccttccgtccaacattctgctgtccggcgcggagctggagtttaaccggccgggacgggaattcctgctcaaaaccgccctgtccaaggtagaagatcagtatgactatatcatcattgatacaccgccggccctcagtctgctgacggtaaatgcatatgtagctacggacagcttgattatccccatgtcgccggagatcctgagcctgctaggggtttcccagatcaaggagacgatcgagagcgtccgcagttattacaattcccggctgcgggtattgggtatcctgctgaacaagttcagcgcccggctcactctgaaccgggaggtgctggaaatggcggagcagattgccgcacaactggataccagagtattccagagcaaaatccgcggcagcgtttctgtggcggagtcccctgcccacggggtcagtgttctggactatgcgccgcgctccaagccgtctctggactttgaggcgctgtgcgaggagatcgcgggcggctttataccgcacggcggacgccggacagatggggaggtgcggtaatggccgggaaaaaggggagccggagcagcaagaccgcccatgtgctcaacctgctgtcggggggagaggcgccggaggcgccggagcagcgcccggcggcggggacagagcggacggaggagccacaggccgggcccacgcctcccccgccgccccgggagcgtcccatcctgccgccgattgtggaggtggcccgcaccaatagcgaggcactgtcggaaaccattcggagcgcgctggaaaaggagctggaggaagagcaggcccaggaccaggcattggaacgggcagaagaagcgggggaggaacatgcggcccagcccgcggcagagccgccggaggaaccggaacggcccgatgacccggcggagcccctgcccccctccgccccaatgcctcccaaggccagtcctatgcaggagcagaagccggtggagcagggacttccggacggggcggagtgggtgaatgttatgctcggactggtggaggagaaggcggagcgctatgtcaaaatgtttggcctgtgcccctgtccccgctgtgtggcggatgtgaaggcgctggccctcacccggctgccggccaaatatgtggttctgcccgccgaacataaaaaaccgatgcttagcctatatcaggcgcgctatgacggcgatgtgactacgcaggttatttacgcctgtaaggctgtgatggatgcaccgcgccacggcgcggcccggcccggcccagcccggcctggcctggcatcagataggggctgaatatttcttataagatgtgttaaggaaagtattaacattctaggtgtagagccgataaattctataaggatatacaattttacggaaaggagttgaaagatgttgaaagatatggactgccagagggtgcccgtcgaggggaacggtcacggcgatggaggcagcttcctgcaccggctggttatgcggctgtatggcggcggaggggagcaggcgcaggatgcgcaggatgtgttacaggaagcagtgttgcccacggagcacctgtctgccccctccacggagcaagccccagctgctccccagaaaaaggcgggtcacagtgtaaatacaccgaccaacagtttgctctatgcgctgtggagtgagtggaacgacattcaagttggagtgaatgcatttgactatgttctgaacctgccactggaggatggccggaacggcaggcagcttctgaacgatgaggaaagcaaaacggcgcttacccagattaagctgaaattgatgaacttggcaaagcagcgtttttgggagcgcggagcggatgcccagaccacgatggatgctctgccatgtgtgtttctatcagaaaacaaaatggtggcatggctgtttctctttccgccgaccggcggcggcaaaccagcctccttggatcgccttgagcattctgtttgcgaagcaggcgtcttattcgggatagatcacgagcggctgcagcagcttgcggatagtccggagtactttcagttgagtgtagtcgcctatggacttgctcccatccccggagatgacgggcggattgtggaactagtacctcgggagccgccgcagactgcgcctcaagagggagcgcagggactggtggactatcgttccagcagttatacaaacattatccatgaaggcgatgtgatctgtgacatcattcctccttctcccggaacaagcggagtggatatcgcgggaaatgtcatccaaagccgtgctgggcagacgccgcatgttccacaagggcaaaacacgggcgtcagtgaggatgggcagcatctggtagcgctgaccagcggaaatctcatttttgaacagggtgtctttcgcattcgtcctaccctagtggtggagaaaaatgtggattacagcacgggaaatttggatttcgttggagatattatcattcgtggagatatttgcgctggtttttccgttcataccaccggaaccgtaacagttgacggagctgtcgagggggccattgtggaggctggcggtgatataatcattaccaagggggtactgggcgataactccgcaatgattaaaagcggtcgaactgtaagagcagcttatctggaaaactgcgtcgtatatgcaggtactgcaatcttggcggattgtgccataaatgcacagctttacagcgatggtgctatccgcattgtaagtgggcgcggtaccgttattgggggcctgctaacagcggttgaccgagttgacgtaaatgtgattggggctcgctcgggggtattgactgagattgcacttggacagcgctcttttgcgcttatagaagcaacggatttggagcgatccttggaacagatgaagaaggaacacaaggaattagagcgaagtttggaatatctggagcagcaggagccctcaaaagaaatcagcgcaaagatttctaatttcagactgcgttacgccacaaccggcctgaaattggacgctatgcgcaggcggcttaagctgctgcgtgaggaacgatttgacctaagccagtgtcggctatgctgccaagtggtttatccgaaggcgaaaatcagcattggctcagataccattaccgtttccaacctggaaacacaatgcaatgtgcatctctcaaaaaaaggaattcaactgcgctgattttatattatcagtgactgcggtagttgttttccaagcaaaagggaggtgaatatacaatatggcggagagagtcccgcttgcttctgagctttcccgcatcatggagcgggttgcatgcgaggtgacccgacatgtcggacagttggaactgcggccagtcctggatgagaactttcctgcggaaacgggaggctgtcaagttcagactacattgtacggcggttaccactcccggattacattgactagcaattacctcttttttttcaacttggcaaaaaatatgatggaagagtcgcctaccctggaggatgttgctgattatgcagtggaatacttcaatgtgctctgcggccatattgtggctgaaatctttcgcgtaacaggggtgaccgcaaaattttgttgccctatttttggacataaggttcgttcagaggctgttcccttccaaacatgtacccaattctgctgtccgtatggttggctggagctcggatacgcacctctgcctatgactgcaatcagtgccaaacacgaaggagaggagaaagaactatgagtaagaagctgatgattgtagatgactcccgtgtggtgtatgccagtatgagtaagatgctggaaaacagtgggtgggaaattgctcaattttgcagaagcggggaggaggcgctcaagacctaccctgatattcagccggatgtcgtcacaatggacatcgttatgccggggatggatgggttggagactgctcgcaggttattggaaaaatggccggccgctaaaatcctgtttgtatcctcattggcctacgatgaaatggttgcacagtccaatgctctgggtgcaaagggtttcctctacaagccgttccatcgggaagagttcctgaccaaacttgcagatatcgtatcagtgtaatggatcaattggccccgaaaagacagaaaaccgggttatgtttgacacataacccggttttttgtcagactgcggcggtccctgacgaggttgtcattgcttccatgtttgggccctgggtagtatcaggattggatttgttgcaaagataaaatccgagtaaaaatagctttttaacgtggatttcattatacgaacggaattaaccgaaaaacacggaaccatatcacgtaaaacggtgtgcgtatgtgggtcattccggccgtgcataccggctctgggcagcaccgcggatcagaggcatttatagtaaaaagcaggcatggatactctgcgcagagtatccatgcctgcttttgctcaggcgtagacatcaaactgatagccagagctggaggagggggggagcatttgcagcaactcctgtactgccagctcctgggactccattgccttttttgaaacggcaagcgtatagctctgctggagctgtgcagacgcaaggctgctggctgtggcagcgattccatccatcatgttcattcaacctgtctccaatccttcaaaatcatctgtgcggacccgacggcggggttacagcctccgccctgcggaacgcagactccagagacgcgaggagctgtggggtagaggggctctgggcggcctcctggttggaggagacggcctgctgcagctcgctgcggaggatcagcatctctttgggggcctgaatacccaggctcacatttccaccggagtccacagagagaaccgtgatactgatatccccgccaatcgtcaaagattcacccgcttttcggcctagaatcagcatagggtgcccgcctttcccccctggaactccgccagacgatgccgcatgtggtaggcatccgattccaggatgacctgaatggcccggcggctgtccggattgactacaacagggcatttgaagttcagagtgctctcctgcacaggctcccggacaacgcagaggacataatagcacagggcatggctgtccttgacctccatctcacgcaattcctcagaagagagcaacggctgatagctgggatgcagagaaaagggattcatggcgataaaggccagggagggggtggcggcactctgcaagcagagcatattcccgtcgctgccggcgaaggggagcagcagaaaggatcgctcctcctcaaacccaaacaggccgttgggaaaggtgatcacctcgtcccgagggacctccacggtaccaaagtatttcgtttcaaacttcaaggggctgcctccgttcaggcctttgtatccagcggctcatagttggggtcggcggaaggggggacatagagcgggccgccgatgtatttgatgaccacatccggctgctgtgtcactttgaactcaatgtcgccggggacaaaggtgaactgcatctggttcatgcgccagtcgaagttgagcttatccatctcgtagcggatgctcatttccccgccggtccaggagatatcggggcccacctccgggagaaactggatgccaagctgagcgggctggtccacggttttttgctgtgccaactgggggatcacatcctggtcaattttggcctccatcatcatgcggccctcctgcgccaggacggcggtagcctcgtatgccgcacgctgtccctgggctgccccttgctggatgctctgggcggtggtggggacgatagaactgcgcgcctcaaaagtatcaatgttgacccgaatgggctggctgcggatctggagcccgcgtcggtcgcgggagacctccatctgggcggtgccccgggcatactccagatgggcattggtcgttttcatctggatttcaattgggatagtctgaatttcaatcaagggacgcattgggacgtgctcctttccgtacaaaggatagaaatcacttcatatagtccatcagggactgaggaatcacattggtgcccacttgaagggcggcattgtaacaggtttgggcccatacaagctccagaatggcgtccgccgggtcgatgtcctccaggttgctgcgctccacattgagggcatcgtaggtgttttccaactgggttccgtttttgtccaggaaattggcctcagtatccagggtggtccacttctcccccatggcttcgcgggaggcatccagcttcttgagcaactcctccgcttcggagcggcttccaacattccatgtctgagtctcatggtcatagccctcaaaaatatcggccagccggagcatgatagaggcaaggttcttgggatcgccgtccgcgtccacgccgtagcccatgataccgataccggagatggcggagtcaaaggctgtggaggggatcacctcgccgttcccgtccagcttgaagcccagtccgatatccacgtactggtgttcctcattccacatatccaagacttctttgttggtcatgtccttaccgtttgcgtccttaattggctgtcccttatcgtccaagtaaatatcatccagggtatccggattgtcgatctcgacgccgcggtaggtgacaaagcccttatcgttgatagcaaagggggcgttcagggagtccgccccggcgaacacaaaattattgccgtatttgccgttcatggcctgaataatggcctcggcgccctctcgtatgatctgcccctgtgtattcagggtgctgaggttggtatcattcaggccgctgagggcggggacgcggccggtgtcctggaccagaccgtcataaccgtccagcacgctctccagagtgctccacgcagtctcgtacttatgcaggacggtgtcgttgttggaatactgcgcattggtggcgttgagggaactgtgaattttgaaggcccgggtggccgcggcgggattcgacgcataggagctgaactgccgctgggtcatcagcttggtcatggcggagttcagggagttggtggacttcatgagattggagcggtacatccgcagggagctgttagttgtaatacgaatcataatcaatacctcttattgttcccgttccagaccttagacaaccatgccgttgatcagggaatccagagcctcttccaatactgtcatcagccggcaggcggcggtatacgccttctgatagaccatcagattcgtggcctcgtcattcagatccacaccggatacgctgtcccggtcggtgtagacggtgttatttacggtgagatagttgttcagcttggcagtagtacccatctgatcctctgccagggtggactgggtgcggagcagccaatcctcgaacgacatggaaacggaggagcccacggcaccctggcgaatatcactcggatcaatccggtgctctttggagaatacctcgaggaatctggccaggttggagcggtcgtcggagggggcgttggggtcggtggaggagagcatgtgcaccttgccctccgcccagtcctttgagatggcaatgttaccggcggtgatcttatcacctggattatcccggttcataaagagatccccggccccagtgacgccctgggcctggttcagcgcgttcatctgctcggcaaactcatttgccaggctgtccagagccatctggtagtaggggataccccgcttaacggtggcgtccttatcgttgttgatctcggcttgggtggagtattcgcccttctctgtcagcatttcccgcagggactggagggaaccatacaggtcggtatcccctagcgtaacgggatcgatatcctggggattctgcttcttattgtccatatcacgaagagcacccagctttacctcatatccatttgcctcgtccccggtggaaaccttggttgcaaattcgccgtcaatgagcgtgtttttgcctccggtggccagcttgaccgtgagcttctccaccataaggccgccgcccacatcctccatggaataggtgacgtcaattttcatgtgctgactcagggtatccagcagcaggttgcgctggtcccgcagctccaggccctcgtctccacggatatcggaattgcggatggccacgttcagctcctgaatctgggagaggatgctgttgatctcatccacatcctgcttgaggtagccctcaaaggtggttttcagctcggccagatccttggcggcgctgttgaacaggtcgcacagagtgtcggcggactggcggatcagagagtcatagccctcaatgccgttggtgttggccttgttgatcaggtcgcgcagatcgttgagttggttgaggatcaggccgtcatcctgctcgccgtcgcccttgcccacctcgtccaggattccggccagcttctccaggccggcgagccatgaatccgccgagcccacatcggcctgggacttccggtaggagatgtccagtcccgggtcccggagctgggagacgccgtttaccagtacgccctgccccacccgcacgttgtactgggagtggtagcggtctgaaccgccggagatcagactgacctggtccaggcgctggcgggtgtagccgttggtattgatgttggtgatgttgttgccggtcacgtccaagcccttctgggcggcgtagatccccagctttactgtagtaagagagccgaatgtactgctcatgctgttacctcctatgctctgaagtccgttttcatgccggtggggcgggccggggaggcctggtagtgagattctgcatccggctccaccccccgccgggccaattctccatccacccggcggagctccagctcggtcaaagtacgggcggagccctgtgcggcctgaaggacggcgtagcccttcagtacctgctccaccatgcggctggtctccgccaggtattccggcgggcagtgggagggcatgtcacgcagggaaatgccggtcaggccgagtccggtcaaaagggtctcccgtttctgctcgcagccccgcagggcaagcgtgagggcctgctcccgcttcatggcttcgttcaactcgtccagagcgtgcccctgcaccgcgtcaatcttttgctgctccacatggctgatctggtcaaagagctgacacaactcagaaagcagcgccaggtaatcgctgtattccacctcagtccgcctccttctggagtagcatgcgggctgcaatttcctgggggtcgggctggtaacgcccctcccggatttgggcttgcagggactcaatttctcggcaggtaggccggattcggatttcctgtgaaatacgcccgacaagctctttcatgcgcgtttcctccccgcttggctgtatactgagctggaactggtcgtagacctggcgctctgcttgggggcgggaggtgctgtgggctgcaccggcctggggggaacggcctgcccctggaacagatacccggtggatggaatattcagagaacatgagatggcctcctcaagatagctgaacgggaacgaatgaaacaaagactggaaaatctattagttctatcgtcacagataaaaaaaagataagaacaaattggaggaatacaggaaatctttttctcagtttgcaggtatgggtgtaataaggagggcgggcccaaatgggcccgccctccttggggctggcgttattttgactctggggctggcgaagagtcggtctccaaggaatctcgaagctggaaatgggaggtcagtgatttaagaatctgagactggtcggaaagctcctgactggcagcggcgctctcttccgcagaggcggagttggtctgcacaacgctggagatttgctccacgcccacgttgatctgctcaagggcgtccgcctgctgttcagaggcgtcagaaatctggtggatcgtagccgtgatgtcctgggcacggctcaccacattttccagataggaggcggtctcattcatactggaggtacccctctgaatggcggacagggaacgctgaatcagggcggcggtattctttgaggcgtcggaggacttctgcgcaaggctgcgcacctcctcagccacaacagcaaatcccttcccggcggccccggcccgcgcggcctccactgctgcgttcaatgcgagaatattcgtctggaacgcaatatcctcaatggtcttgatgatctttccaatctcgttggagctgctttgaatgtcctgcatggcggacagcgtttcctgcattttctgattgctctctgcaatctcctggctgaccatggcggccttatcactggcatcacgggcgtgctccgcgctcttttgaacatggttcagaatatccgaggtagtggcagccagctcctcaaccgcagaggcctgttcagtggccccctgggcaagcgcctgtgctccgctggcaacctgttccgacccggaggagacgtgatccgccgcattgttgatctggctgagggtgtcgctgagggtatagttgatgcggcgaatggaaagcagaatttggttgtagtccccaatatagcgctcacgatccttcgagcggatacggaagtttccgtcactcatctcattcagcagataactgatatcctgaatgatcgcccgcaggttttccgtcatagcctggaaggactgggcgagctgcccgatttcatcctgagagcggatgtccaggtgtacgtccaggttaccggaggcgatctcgtcagcagcggacaccacagcacggataggaaccagcattttccggaggacggcggtcacaaccagaagaagcaccagcagcgatgccaccgacaaaataagcagcaggcgtgtggtccgggtgacggaggacagggcgtccgaggtatacacaccggtcatggaccaccaggtttcaccgcccacctgcaaggggctgtagaagcaggagacctggtcgccgtcctcgcgggtcttgcgcatattgaacgcatccccctgggccatggcggcctgaatggcctccagctcgtcggcctggggtgtaaactccaccatgttgtgtcccacatcgtccagtgtttcgctgtcccatatgatggttccatcaccgctgtaaagggtagaccacatggaggtgtaattgttgtcggaaatctggagggaagagaaggaactgaggtcgatgacggagatgaccacaccaatcacagaaccgttgtaaacaattggagtgccgtaggcgataagcagcagatctccatcccgatagggggcggaaatgtaaatccgcttttcctgggcggggacccggtaggagtcctctttggcatattcctcgtaggaggcataggcatcaacctcggcatcggccgaggacatgtcgatataaaacccatagtgccggaggttgctctggaactgattgggctcaaacatgacgccgatgccctccagctcggggttgtttttgaccgcgttccgggccgtctccacaataaactgctccatatcgtatgcgttggaggtcagggacaggcccggataaagggtgctctgctgcatggcagcggcgtccccgggagcgccatttggtttggcgtaaatgcggccgatgtattcctggataccccgggccgtatcatccacaaccccaaagctgtcctggatctctgtgccggttgtcctcgccagggcggacagctcgcctgcaatgcccttctgtatgctggtgctggtagtggagatcgtcactccgatcagaagtgcaaagatgacggccaggacggccccgatgatgaccgccagcttagaagtcagtttcagtttcccaaacaacatcgattcccccattcggtatcattgcaaaatgccgcgttatgggcgtgataccaagtatttgtatgtttatctcaaaccggcggcagcgtctgccgctttgccgggaagttcctctctgtcaaacacacagtcaacgattgtatgtaatcgttttctgatgtttatatcggacggataaacaaaaaattaaggggaaaaacgacaaaaacctatcggaagtgcggaatttggctttgatcgagcttgttccgatgtggctgggtattttggaaggttcccagccagtcgaggttgaggggaatgggggtaaggaaggtatcaggtcggacggcctccccgtggaaatcgctgccccccgtgatatggaggccgtatttgtctgcaagacgcagataggcggcggtctgttcgggggaatgccggggataaaagcactcaatcccatccagccccgcgtccttcagtgcacggaggatttcctccaggcgcccgtgggagcagccgagctggcagggatgggccagaaccgcctttccacccgcgtcatggatggccgcgatgcattccggggcgccggccttccaccgctcaatgcgctggtattcgtccgtgtccagatagcggtcgaaggcctcccggagggaggagacatacccgcgccggagcatcacccgggcgaagtgggggcgggcgaccactccgccgccggcgagggcctccacctcctccagcggcacgtccagccccttcccgcggagaaacgcggcgatgcggtatttccgctcctcccggctggcgcggagcctgcggcagagctccgccagggcgggacactcggggcccagattgaggccgagtatgtgcatgtgacggtcctcccgggcccccagctccaccccgcggagcaccgtcaatccgcaggcttgtcccgcccggacggcctcctccgcgccgtccatggtgtcgtgatcggtgactgccagaatctgaattccggccgccagggccttggcggccagttgggacggggtatactgcccgtctgacgcggtggtatgggtatgcagatccgccggacaggtcataaaaaccgcctcctcaattcttcaccgccacaacgcggatgacggggggatcgtcgttgccgtagggggcgaagccggtctgttccctggcgtactcgatgcggaagccggcctgccggagggcctcggtcagctcgtccagcacaagaaaacggcggtagtggttgtcgtagaaaaaggcgttgcgctccagcgcctcccccttgccgtagagcgggtcatggacgctgcgcacctcgatgaagaactttccgcccggcttgagggcccgggccatgctccccaggagcatccgctcctgcttctggttgatggcgtggatggtaaagcggctgtaggcgtagtcatagctctccggctggtggagggtgtggctgacgaagtcgccgcatacgaaccgggcgtgtgggaccggctgctgccggagcatgctgatggccgcctcagacaggtccatcgccaccacgtccagccccagagaggcaaagtagagggcgtcccgcccgttgccgcaccccagctccgccagcgtccgccccggctccaccagggtggacacataccgggcgaagggggaggggctggtggggcagagcttgttttgataatacaggttccagtaatcggtattgtcgatggggtgctccacgatattcgggtagagcgccccctcgatctcctctaccagctccagcggagtgcgctccccgtcgttctggagcacaaggtcggggctttggggctcgtcaaagggcagatccacccccaccacattgcgccccccggtatagaggcccttctggttgcgctggatgagggtctcttttttgacccggatatagatttccttgtaatttggaatatgctcccggttccagcggcgcacagtgtcaaacatggcgatggagcagcacaccacgtcgataccctggtcggagagcagcctgcacacccggaagatccggcccgcccagcgcaggcgctcatcgttggtgtagcccacatcctcgccgaaggccacccggatttcgtccccatccagatagaccgcattgggcttggtgtttttgagccgctggtagaacaggctgcccacggtcgtcttccccgccccagacaggccggtgaaaaaatatacggttcccttgtgttccatgtcctcctcctcagtgatacagcggctgttccagcagcgccgggtccagctttaaaggcttcatcatttttaaaggctggccttgcttgtttacaaaccgcaggccacggagcaggaaatccgcaatgcggcggcggttgctctggtagccgggaataggggcgacagcagtgacatcaatgggagtctctccatttttgaaggagatttccttgctctgcacaacatcctgataggatttttcaatatatccgtccagacaggtaaagccccggatcttctgctcgatccaggcttcatccacaggctctccctgatagtagtgaaaatcatagccgtaatattcgtaagcgtcccgcagaaagtattccaaaaaggccctttcctcgtcattcgcaaattcatcgtaggttcggtataccgtggccgggtcgaagccccgggcattgcctttcagggactcagggtcaatgcccttccggctggagcagtaagtcatgctctcggtatagggaagatccagaaattccgccagagcagtaaaggtagccctggggttgagcttgccgtcctcaaagcgcaccagcacgctgtcccggtagagccggtcccactggtctaccataaagctgcggtttaccagccgctcagccagcacatcagggacaaccttgacttcctctccctgggcctcccggtccagcataaagcgcacgctggccgcatagctggtggtaatgcggcgcataggggtaaaggtcttgatgtaccggaaaccatggaacagtggtgaggtgcggatcgcttcgtactgctccgagtagagcatgggtgcccctttcagctctgattcccggatgtcatagatcatattggaaaagtggggctggaaaaacagcgccggcgcaatgcgggacccgtggtccagactgccgctgatatcctgccggtcgaggaacagcgccactagaaaatccttgtcggttgggcgctttatacgggacaactggcggcgcagccgcggcgtcagccaatcgaccctccgccagtttgccttcacctctgccactgctttttgtatattatcaaacatgatggactcataggagagaaggttcgggtgcccatagaaaatctcgttgaagaagtcgccgccgttgtgggcggcaagctgggtgtgccagatcattcgggtgacctccccgataccgattggtcgcaccggatattgagcgtagtctatgccgaagcgggcgtgaaagtcaatgggatactgttcgatctccccctccattagaaagaccagctttttttcggagaggagggggcgcagctccagacactgcaagtaggcacagaatgtcgtccagtccgtgtagtggaggtagatatggttctcccgccccacccattcgctcttgcggacgttgtcgtttaagtattccaactggtactgggaaaacacatccctggccagaacgggcttgtccagatcccgaaaaaaatagcggtcaatcaccggatcgttgaaattgacatatgcgccgaaccgatgttccgccttaaaaaagggaatatatccctcgtcattgaagggaaagaactgaaccggcaaagcctcgaagtccggaaagtcctcccggaacagatagggatatttggccagggcggcgcagttgcgggcgtaccgctttttctgatcttccgcgttgggcaggtaaaaagcctgggtcatcagatccatgagctctgtttggtaaaacccccggttataaagggaaacaaacgccgtataggccacctgatagtttccctgggagaaaaagagatagctggccgcctccagctccagctccggattccgttccgctgcctcctggagaaccaggctataagccgcctgggcctcctccgtctgcccaagctccgccagcctgcgggcgatttcgatcgtatccataacaaagttacctcattccagacaaaagcgggggccgggcactgagcccggcccccgcggcattgtggctgtggtacaggtttgacctcttactggagcagctgcagcacgcccttcgtcggcgcggacttcgaatcccttgcttcgccgcatgcggcaaagctcgctctctccgccgcgcctcctctccccaccgaacccgcttcgctgggcttcggcgggggccccgctgtgccccagggcggggcagcacgggggtgggcgggggcatgcagctactcagccagcaccagagcttactggagcagctgcaggacgccctggggcacctggttagcctgagccagcatggcctgggcggactggatcaggatgttgttcttggtgtaggccatcatctcgtcggccacgtcggtgtcgcggatggtggactcggcgtcctggatgttctccgtcatgacggacaggttgttgatggtgtggtccaggcggttctgggtggcgcccagggtgccgcggacatcagacacatagttgatagcggccttgatcttatccacggccgccttggcgccggcctgggtggagatgtcaatatcggcgatgcccagggccttggcgtgagtgtccgcaatgttgaccttcaactggttgaagtcgtcgccggtatcgccgatctggagggtcagcgcggtgccgcccttcttgacggtgttgtccgcgttgatcgtaatgccgttcttggcggcggcggcgatcagggaggccttgtcgctgaaggtggcgccgtcggagccgtccgcgccggaggcgaaggtgtacttcatgccgtcgatcatgacgaagtcgccttccttggcggtgccggtcagattgaccttggagtccacgcccgtagccgtcttggtgacgttaccaaacttgggagccttagtaggcaccttgccatccttgtccttatagttgatggcaatgccggtaatgttggcctggccagccttgccgctctcggaagccgcaccgccctctttggccgtaaatgtaatgccatttgtaccgctggccttaatatcaaagaggccggacagggtgtcgttgccagccaaggcatttacaaactggccgacagacgcattggcggcgagattatccatggtaacggtgacggtctgcaccgtgccctcggcgtcgcggtaggaaaccacgatatcggcgctgccgccggtggcagtaccagtgctcttggtaaaggcggccttgtacgcgccggtcacagcggcagtcgtaccgatgggagcgccgccgaacacgccggtgatggtggtggcatcaaaggtcttggcgacggaaccggcgtccatggagccgtccagcagcttgatgccgttgaagttggcggagtcggcgatgcggttgatctcgctcttgagctgctcaacctccttctgcaggttggcgcggtcggtctccacgtcgtaggtgccgttggcggactggtcggccagctccaccatacggttgagcatgtcgtggacctcagtcaaggcgccctcggcggtctgcaccagggagatgccgtccttggcgttcttctgagcggtctccaggccggtgatctgggcgcgcatcttctcggagatggcgaggcccgcggcgtcgtcaccggcgcggttgatcttgtagccggaggacagcttctccaggttcttggacagggcggaggtgttgttggtgtagttgcggtaggcgttcatcgccataatattgtgctgaatacgcatgatgtcttactctccttaacattgttctccgggaggttccttcctcccgggccgcaggggtggtgggtagtgcagcccgtagccggccgggcaggccgcgcagacccggaatctatttcagacagggcagccccgcccgggacagcctgtttgaaatttggaggagggagggcggcggtttggactgaggacgccgccctccagtgcgttgcactatctgtttgatcggtgcaacgctggaattattaagtcctttttgaaaaaatttttggaacagcggaatttgtctggaaggggttaatttttgaaacggatggacgatttaaaaatatagagaatatcctctagtcctatatggatttgatttactggaaaggaagattgtacctatgcgttatgaattgactcaggacctgctgaccggcaaccagttgattgacagtgagcacagacagctctttgacgccatcaacgccctgatggacgcctgtgcccagggggccggacgcaccaagatcaatgaaaccgtgcagtttctgaacagctatgtcagcaagcatttccgcgatgaggagcagctccagcttcaaagcaaataccccggctacaacgcccaccacaccttccacgaggggtataagcgcgaattggctgcggcggccaaccagatcggcgcggaggggcccagtgtgaaatccctgcataccctcaacactctggtgggcacactgattacacatatccgcaccgaggacaagcgggttgcccgccacgttaagggcggctgaggcggtgggcgcctgggcaacggccggggacgcccgcggcggcggggcggcttctgcggaaaccgttttcactccctttgcccgctgccgcgctaacggaggagtacaccatgcgcgaaacactgttcgactactgtaaacgaaccggggagctggagctgctccggcagtggaattctgagcgaaacggagcgcttacccctgagacggtgagctatggaagtaaaaagaaggtgtggtggcgctgtgggaaaggccatgagtggcaggcagaagtgacgagcaggaccagcaaccacacaggctgccccttttgcaggggcgtcatggcgtggccgggagagacggattttgccacgctatggccggagctggccgcccagtggcacccgaccagaaatggagcgctcaccccgagcgaggtgctccccggcagccaccggaaggtgtggtggcgctgcgagaagggccatgagtggcaggcggaggtaaagacaagggtaaacggctgcggctgtccgatctgcgccaaccgtaagctggcggaaggggaaaacgacctggcaaccctgcgccctgagctggccgcccagtggcatccaacccggaacggaagcctgacccccggagaccttacggctggtaccagacgcaaggtatggtggcgctgcgacaaaggccatgaatggcaggccagtgtgctgtcacgaaccagtctgggaaacggctgcccggtctgtgccggcaagcagatcattccgggagaaaacgatttggccagccagtttccccaactggccgctcaatggcatccggacaaaaacggcgccctgaggccggagaatgtctcacccaacagcaatcgaaaggtctggtggctctgtcccctgggccacgcgtggaaggccacggtgacctccaggagcagggagggggcggggtgtcccttctgcgccgggcggaaggtctggcccggctttaacgacctggagaccgtggagccgaaggtcgccgcccagtggcacccgacgctgaacggccagttgacgcccagaatggtgacggctgggagccggagaaaggtctggtggcagtgcccggagggacatgtgtggaaggcggtcgtctactccagggctggaaaacgaaagtgcggctgtccggtctgtgccggacggatcagcgaagcgcggatgaaggcataccggcacatggtgggggaacagcaagggaaaacggagcgctgaacggctgttcactgcacggataagaaaataggcaacaaaaaagctgcatggaattgaattccatgcagcttttttgttgcggggacgcctggactttgggaagtctgctttacggcggaaggtcccatatggttactgcggaggctgagcagtaccggtatcgtccttgcggaaggtgaatcccccggtcagctcctttagcagctgagcctgccccgagagctcctcgctggccgcagcgctctcctctgctgtggcggaattcgtctgtaccacactggagatctggtcaacgccctcggatacctggtcaatggagtgggcctccgagacaatgttgccggccacccggtcaatgaaagcgacggtatcctgaaccagacgggtggtctcttccagaaccgcgctgacctccccagtcaactggccgccccgctccacatttttggtggagcgctcgatcatctccttggtctgcttggcggcgtggtccgatttggcggccagattgcgcacttcgtcggccacgactgcgaagccctttccgctggagccggcccgggcggcctccaccgcggcattcagagccaggatattcgtctgaaacgcaatgttttcaattgtttcaatgatttggctgatctcctggtgccccttcagaatatcggacatggcatccgtcagcgcagacatcttttcatggctcacagtcaccttttcgccagccaggccggacttttccttgacctgggtggaggcctcggcattttcccgggctgtgctgtcgatctcggatatggtagcggagagctcctccaccgcgctggcctgctccgtggcgccctgtgcgagcgcctgcgcgccggaggatacctgctcggcgccggcggaaacctggtccgcggccagattgatttgctgaagcgtgtgactgaggttgcggttgatgttgcgcacggaggccaggatattcgtatagtcgccctggtagaggtcataatccctcgaacggacatcaaagttcccgtcggccatctcccccaacaggtagccaatatcaccgatcagctcctgaagccgcgtggtgatctgccgggtagtgagcgaaaggacaccgatctcatctctgcgctcgtaagtggggacaggggaggacaggtctccctgctccagaagctgaaggcgctcggcgcaggcccggatcggattgccgatctcgcccgccattcgaaccgccaggaggatggcaatgaccaggatgacaattaaaagaatggcggtcagaagtgtgcttgtataggtggtgcccagaaaatccttaacgggcgcggtgacagcgacggtccagccgtcggtctggggaaccggggcgtaggccagatatttctgggcgccgcttatctcatagctgccatagccgctgttccccgcccgcatgtccgcgtgcagcgccgccagggcggagagggaggaatcctgttgggcctcctgctcaatgttctgaaccgatactgtgtccagcgtggtgtccgcaatcgtcgtaccagtggagtcaatcatgtacgcgccgctgttttcgctgatatgaatggactccatgatgtcattgaggaaggtttcatggggcacaaagtagactacaccggcgacagtgccgccctctatgccgttcaaccagacaggcgcggccaccatgatggacaattcccctgtaactttgctcagggttggcacggagatacagacctccccctgagccgcctgctggaaatacgcgcggtcggagtagctgtttccgtcaaacaggctcctgcccgacaaatccagcaaattgccgcgctccataccataagactgagcccagtggtctacaatccgctccttttcagtgacgggaacggcgccgtcgctgagctctggaaccatacccaggccgcgaaccgcgttttgataggacaacagctcgtaggaaacacgggtggcggcgagggatgcggtggactccaggctttgctccagcatcgaatgggagctgatgtagttggctgcaattcctacgccgccgcaaatcagggccgctgttgcggtcattgccaaaatgcggaccaagagcttttgtttgatgctcctcatgatagattacccccctaaatataagaacctatttcaccaatccaaaagaaaaaggataggcgccaaacacagactgctggccaattgattgggcccacgaaactcgtttgacacttatcccttctcttcctgcgcctgcctttgcacagccagtacaggaagcgatccttttactgaaatcatcagcggttattgaggtggttcatcagaacactggcgatgttgtcgcaggaggcctgaaccgtgactgctccaatatcatgggccaccattggcatgccgtagactacgcaggagtccttatcctggccgatcgtgtacgccccggccttccgcatttccagcaggccgctggccccatcccggcccatccccgtcatgatgataccaaccatgcggcagcggaccgaggcggccattgaggaaaagaggacatccaccgagggccggtgcccgctcaccttttcgcccggaatacaggagagtgtgtagcgcgggcccatgcgcacaaccttggcctgataatccgcaggcgccacaagcgccaggccagggcggatttcatcgccgttgacagcctcacgcacttccatttggcatagacggttgaggcgctcggcatacatcttggtgaacccgaccggcatgtgctgtacgatcaccatgccgggaatgttggccgggagccgcctgagtacgttcagcgtggcctctgtgccgcctgtggaggcgcccagaccgatgacggtctgctccggcgccccatcgccgccaaaacgcagcggagcggcgggggcggcagggtggggcaggttggcacgggataacctggcatgggaggccacaataattttatgggtcagggcctggaggaaggattcccggctctctaccgcgtcaggcttgcgcacaaagtccaccgctcccgcggccagcgcatcaaagacccgcaggttaagggaggagacgaggatgacggggagaggatgtgacggaagaaattgctttaaaaaatcaatgccgttgatgccgggcatttccacatccagcgtcattacatcaggggagaggtgctggagttttgtctttgcatccatggcattgactgcataccccaccacctcgatgcggggtgaggcggaaagcccctggatgatgacgctgcgtgccacagcggaatcgtccacgaccaaaacgcggatctttcgatttgtggtctgcataagtaccggaacctttctttgcgagatttactggtgcgtcccgagtggaagcttttgataaaccgccggggcggccgttcggaacagccgggtctgccccagagattcggagtgactgataaacaggtatccggttggatgcagggcatcgtaaaagcgccggaccagggcgtcccgggtcgcctgatcaaaataaatcatcacgttgcggcagaaaattacatcaaatttcagccggaagtgaatggggtccatcaagttgaacgtgcgaaaaataacattctgcttcagttggggcgccgccgtatagagacaggtggcgtcatccttcacaaaatagcgcttgagccattcaccgggcatatcagcgggcagcttgtactgccccgccttggccttggacagggcctgctgagagatgtcagtggccagaatccgggtgtcccactgggatgcctggggcccaaaaaactctttcaggtagatggagagcgtatagggctcctcaccactggagcagcccgcgctccagatggagagaacccggtctttctgatggcggcgggagagctccggcagtatcacatcgcggaaaaaggtaaaatggtcgggttcccgcataaaaaaggtataattcgtggtcagcttattgagtaccagctccagatcagcggggtcctgctttttgagcaggtggtccagaaaggcagagaagtccggatacccgcgctcccgaagggaatgggaaagacggctggtaatcaactgcttttttttactcaggtcaatcccgtagttatcctgaataaagcgcaccatgcgctgaaaatcagcgtctgaaacggacatatcgcgaaacagcatattcaaaacaggagcctgcactttctgccctaaggctggttgagaatttgaggacagtcaaagaccagcatggtctgttcctcggacagagaacacatgccggaaaccagattccgggtgtcctgagagggagagggcagaatcagtgctgtatccacatcaatcatcttctgcacagtgtccaccagaatacctaccaaggtgtcctcaatgttgagaatgatgatacagttgtcactctgactgggctgtcccagcagcaggcggatgtctacgatcgggatgatctgtccccgcaggttgatgattccccggatgtaatttggtaccaggggcagcttggtaatggcgtggttggtaataatctccaccacgtaatctgccgacacgccgaagagcaggttgtccgagcagaagagcagatacttcaccgtctgggcatccagtgccggggcaggtacgccctcctccggtacggcgttgaattggttatcctgatccatggttataatgcctccttaacgaaagggagagtagagattggccacatccagaataatgctgatgttgccatcccccagaatcgtgcaccccgcgatgccgctgcgcttgatgttgaagctgtttaggtagctgggcaggggcttgaccacgacctgctgttcgcccagcagctcatctacaaacaggcagtaggagagttcaccggcctccagccagatcaggatgccgtcctctacctgggtgcatccctcctcgatctgatagagctcccgcatgcgcaccacaggataaaagctgcccatacacttgaagatctctccgccggcagcgtcgtgtaccagttgatcggagtgaattttgaaggactggcggatattgtggatcgggatggtgaaaatcgagcctccgacagatacctccataccgtccataattgccgtggtcagcgggattttcaacgtggtggtcatgcctttgccaagctcgctggtgagagaaacagttccgcctaccgcttccacgttctgcttgacgacatccatgccgacaccccggccggaaaactctgtcacctcggtattggtggagaagccgggagacatgagaaagttgaggatttcacggtggctgtactccacatcgggggaggcaagcccgtttttgacggccttgcgcaatacggcctcatcgttgacgccctggccgtcatccctgatctcaatgataacctcgctgccggtctgccgggcggagagagtaatctcaccaacggggtccttgcccgcacggatgcggtcctggacatcctcctcgataccatggtccatggagttgcggacaatgtgcatgatggggtcgccgatgctgtccacaatggtcttgtcaatttccgtctcctcgcccaccagtgtgagcctggcctgcttgttgagctttttgcacatatcccgcacgatgcggtgcattttctggaaggtggcggacacggggaccatgcgcagggacatggacacatcctgaagctcatccgtgagcttgcgcagctgccgggcagatttggtaaactcatccaggcgaagacccttcagttcaggggaggaggtgaccatggattcggtgatgacaatctcgcccaccactgcggagagctgatccaacttgctcaggttgacgctgatcaggctctcgcggtgaggctggggtgcagactcggccttgggggcctcccgggaggaagccggggccgccggcttttccatcgggggggactgatgtacccgggcggagggtggggccgcctcctgatcgatggcctgctaggaacgcacagagccggcgttcgtgactgcatggattgcagcatcccgctgcgcctgatcccggaaatagagcgtaaagccggagtccacgatctgcgccgcggtgtcgggattgtgctccacatcggcgggaaggtattggaagctatcctcggagccgccgtcgcggattgtgctcacaagcatgaatgcccgcaggttctccatgccggcaccctcgtcaaagaagatctggagagcataggggaagccggggacggctgtcggaccggaatccgccggggccggcgcctccggcgcggccggcggaacctcggccggcgcagcggcggcgccattttgaatttgctgaataaaactattaactttttggagaagactgtcgatcgtctgagtgagaggttgtccgttttcaatgcgctcaatttccccgcggaaaaagtcgatgatctggaacagcaggtcgaacagggcggggcgcagcgcctccgggacaatctccatcgatttgtcacggacaatggcaaacagatcctccgcccggtgtgcgattgtcatcagggagctgtattccatcatggctgaagagcccttgatggtgtgcatgatgcggaagatcgtgttgacatcctcttcggaaaagctgtccttttcctcggcggccaaaacaaggctgtcaagctgctccagcagggaattggtttcgaaaaggtatgcctctaaaatgctgtcgtttccattgcccatcggtacatccttcctttgcgttgaacttctgatgttccgatcgacaggattggccaaaaaataagagcagaacgcgaaaaagatacatggagtggaatccggccgcattgccaccctctccaggaatgagattttagaaaagggtgatttgcacgtggcgaatttagtgggcgtgaccaatccggttcccaattatgacgcctcaaataacaaccgcacactgccggcagctccaaagccaagtgacaccaggattcagaacatcccggaccccagccgggtgggccggccggacgcccgtaccgatcagcagggggccaatgatgcgctgaactccggtgtgctgcgctatgattccaaccttcagtttttcctgcagcagatgcgggatatgccggagttgggggcggaactgtccaagctggtcacactgatgcagggattggtaaccacgcccggcttggcggcaggtgtgacagaagagttatccggatttctggaactgcttaaaatggaccccgatgcgttccgacagttttttcagacgcagatggaggcaggcaaccgatttgcagggcccctcttctccctgctgagggaggtttatcaaaagacgcccggcgacaccgtgcggggggcaattctgaactttgccaaacgctacagtgatttttccgccacgggtcacattggacgcagcatgctctccctgctccggcagctttcggactatctgccccagagttggaggggacagttggctgagctgacgggaaagctggaaaacggccttcaggccggggcgcgggcggagaatttagagctgctgcagggacagattctgccctacctgggttcttatatcaagcgttatcacgatatgggaacagcacggacgctgcttgggatgctgatgctgcatatggcccgctatgaaaacggcgcggaggagggggtcatgctggcgttccggcagttgggcggctatggagataccctggccggtctcaatcagttggacgatcagacgctgtggaagctgctccgggagaaccagtttaccaaggccgcccaggcggatacatttacggagcagctggcccggacggcgcagcgggcgctgcagggagaatacggcacggacctgcgggaggcgtttcaggagatcgtgcggtccatgctgctcaatgagagcgtattcctcccactgcaccataccattgtcccgctggagtgggagggcaggcggatgtactcggagttatgggtggacccggacgcggaggagcgggaggaggcccgggatgggcgcggggacggacataagatccagttcctgttcaagatggatctcccctcagtgggctttttggagatgacactgggggccggaaaggagcaggtggatgtgagtgtctacggcccggacagtgtgacagcccacagcggcctgattgcggaggatttagggcagattctggccgatcacggcctgaaggggagaagtgtccaggtacagaagcacacccgtccgctgacgctgacggaagtatttccgggactgtttgaaggggagcgcggtatcaatgtcaaaatctaaacagggcggttccgggcgcgcggtggccctgcaatatggcccgggcagtggtgcgccggtgattgtggcgtccggcatgggccacctggccgagcggattgtagaagtggcggtggacagcggcgttcccgtctatgaggacaattccctggcgaccattctgtcccagatggagctgggcagggagattccggaggagctctatcaggccatcgtggacatttacatttactttttgcagttcgacccgtcggacccggagaaataccgccgggagcgccgggaacggctggaggcgaagcaggcaaaggagtgagcatgcgatgagctataaatacatgctgctggacagccggggagccccggtggcccagggggtttccgaggatggaccggaaaaaaacgtttggcagctccggatcgcccacggggatatcaagcgggtgctggggcatgagtacatcagcctggtgggaacctcggagcagttcccggcgatggaagggcggattgtccggtgccgggataatctcgtctcggtagagtcggtgcgcatgctgggggaggaggtgcgccgcaacctgcgcatgccggtgcggtttgagagcttcctctatccggtgagcggccggtggcgcgggcggatgccggtattgagcaacgatctgagctgcggcggagcggcctttttctgcgcccggaagctggaggtggacgaggtagccgagattgtaatcccggttacagcagagccgctggtactcagggtaaagattttacgcgagcggccctctccggagccgattcctctctatgcggcggagtttgttgatatgctccgtgaggaagaaaatatggtctgtgaggccgtgttcagccttcagttccggcatacggcagaaatgtaagcagagcaagagaaaggatggcgaaacgatgatgaacctctggaagggaactgtgcgccgtgtaggcgccaccctgctggcatgcgtcctgctgctggggctgctcccgcagctgcctcgccaggccggggcagcctatacagactcctatttgcagcagatggtggattggggctttatgcggggggatatatcggggaacctccgaccggacaaccccatttcgcgggcggagtttgtgacggtgatcaaccgggcgctgggctatgagaagctggggggcgatcccttccaggatgtgccggattccgcctggtatgcggaggatgtggatatcgcctatacggagggctatatttccggcacgtccaagaccaccttttcccccgacagcagcattacccgggaggaggcggccattatcctcacccgaaatctgatgctgcagccggataccggcgagaacaccagctttaccgacagccgggagctgagtgagtggagccggggctatattgccacggcagcccggtacggcctggtgaacggctacccggacggcagcttccgccccaagaaccagattacccgcggagaggcggcgatcctggtggtaaaggccgtgggcaccccggtgcagacagccggagtccacagcctggggagcacctggggcaatgtaaccattacgagctccggcgtcaccctgagggataccgtggtgggcggcaacctctacataacgggcggcgtggatctgggcgagatcacgctggagaatgtgaccgtgctgggggagatcgtcatcagcggcggcggcgtgagcgagggcggagacgacagcattgtgctgcgcaatgtgaacgcgcccaagctgattgtggacaacatccccaaccagcagatttccatccgcgtggagggcgacggggtcattgaacataccagcgtgcgcaccgacgcctatctggacgaccgcacccccgcggggtacggcctgagcaggatcgccctggagggggaggacggcctttccctcaacctggcgggcaatgtcaaggaggtcacgaacctgacgcccaagtccagcattggcgtcgccagcggacatgtggataccattaacgtggacgaaaaagctacggattcgactctgaacattgcctcgggcgctgaggtggacaacgtgaacctggacgtggccacctccgtgaccggcgacggggacatcggccacctgaccgtcaacgccccgggcagcacggtgacgatgttgccggatcaaatcaccatccggcccggcgtggaggccaccattgacggggagaagatggacagtgaagcggcggcggagtcctcggcggacccgaggctgctggcgggctacccggaggtcacggatctggcgcccaccagcgccaccgcccggttcagcgctaataagaagggtaccgtttattgggcggtcacctcggtgaccgacggctccgtgggggtggacgatttgctcaacccctcgtcctacagccccaagattgtcaagagcggcaccctgagcctgaccggctccagccagccgggcagcgtcaaaatcagcggcctgacctccgacggctcctattacctgtccgccgtctttgtggacgcgcgggaggagcggagcccgctgaaggtcatctcctttactacgccggacaacaccgtgcccaatttcgcctccggttacccctatatgtccaaaatcaccagcacctccgggcaggtgacgaccatggccaccaagtcctgccggctgtactgggcggtgctgcccaagggggcgtccgcccccacggccaacgactttaaggccaacgccgtcagcggcaatctgggctttggaaccctcgatgtgaccaagaacgtctccaatacatttgacgttaacaacgtccctctggaggagctggagtcctacgacctgtacctgtggctcaccgacgtggacggtgggcagagttccgccgtcaaaaaggtgtcctttaccaccgtagacggtacaccgccccgcttcaataccaaccctacagtaaataaggtaaatgccacctctgtggggctgtatgccaacctgaacgaggcgggcactctgtactgggtggtggtgaaggagggggaggagtaccccaagcccctggccggacagtccggaaaggtggatttgagcagcgacaacgccaaactccaggtgtcggccggtatgaacgcactcaagaacgggaaggttaccatgaccgaggggaaggacgtctccttcaccgtcagcggcctggagaaagaaactgcttatgacctctattatgtggcccaggataaggcgggaaactactcggagacggtgggaaagattacgattcatacgctggatcccaatgcgcccactgtaacccaggagttcaccaagtataacggaaccgactccactaccccactgcccaataccgatgtccggctggtgttcagcgaggggattcaggacgcggggacgaaccagaacctgtatgagctctatcagaaggtggcggctggcaccgagccgaagtcaaagctggccgggctgctgcgggacagcattaagctctaccaggacaccggaaacggcccggccactcaggttgtggattacaaggatgacaaggacaactggacgatcaattacgagaatgtggtgatcaagcaggaggatggcaagacggtggtcgtgttcccgggttcgggcggaagtgccgatgccgccctcaacctccagagcggtgcgacttattactttgagattgaggccggaaagatcgcggatacctctgagagtaagaatgtcatgggtaaggtgactctggacaagtttacaacggtatttgcccaggtaaatatttccactgtcaaccaggctgaaatcacggtcggatcgggtcccgataataagaaaacggttaatgcggtatggaagctggaccctgtgaccacagataaagtaggcgacttcattgattgggatatgctcatttggacggataccaatctgagctttaacctctatcggagcaccgacggaggtccgtgggagcagttgaacaagaagggcgaagttacaattacgctttcctctgcaactgaaggctttctgggcgtcagtctgaccaaggatttcttgaaggtgggcgaaacgatgaccgattttgacccgctcaacgaactcaaggaaggacagacctacgagtacgccatggaatttaccagcgtgaacggggagagggacaagcaggcgtggaacggacgggtcaatatccgcgtcaacgtggtggcgggaaaagacaatgatctgcgtatgatggcgacatcggtgacggaacaaaactggatggacacagtggtaaacggcgatctcacagacattgggctgccgaaagactttacgttgaaagtgccctttagcgaccagagtatcccggagtttacaagcggataccccaagtttactcctggtgcgaccgatgcacagatggagctgctgctgaaccggccgggtacggtctactatgtagtggcgccgaaaggggatatcctgacaacggacaaggacggcaataactataaggatgagcctcactattccagcctccctatagaaggcgacagtacaattactatgccctctttcaatcagccgcaggtcatggatattttgaatccggagaagagttacagtaaaaatcccagtatcaagtatgacaatactgcatgccagtccagcgtggtaaagctttcggtggaggatctgtctccacagacagactatatcgtttactttgtcattcagaatacggcgcagaactattctgaggtacagtgttaccggtttaccacgacagatgtggggacgccctatattacgttgaacaaccagagcccggatgtacaatttaaaacctcggagagctcggagctgaattatgttctggtggcatataatcagattcccgattttctgaaaggaaaatttgccactgaggccaatatggaccaagaagatttaaagaagttccagagctctggcttgaatcaggatatgactatccttgaggcgctgattgaaacggtgcgtcagggaagcggaaatgaagggccctctgtctttgatatgtatgcaaaggcatctctccgcgaccgtgttgggaaattgattcggcggaatcaatccggcgacagcatgactaccgtggcgtccggcccgatcagcctggagaaaaatgtaccgcaggtaaagcagtttgagcagtacatgaacatgaatacactctattactgtctcgcggttgcccggaacaaggacggcacggaggatggctttaaggcgatcggcggggtcaatatcccggataatgatccgccggttctcaccgtaacgggtggaaaggccaacgccacgggtacaggctggtcgggaaccgtgacgctttcgttcagtgaaaatctgtattggctcagcgaggaccggcagacgctcaaggaggtctggacaaaggctccggccactcctgctgaaaagaagaaggcggtctatattctggacgaggccttcggcatcggcgggagtgcggcgaaaaagctgaaactggcgagcggggctctcgcctccccgagcggcacattcacattcagctataagggagtcgtggagggagacacgctggtgttctttaccaccggttacgccagcgatatgaacatgaacggacgtgggatggaagcaaagacaaaaacaatcctgacctatgtgacagaggcaggcggcaccgggcagttcctgacaaacggacgttttgtcattacgcaaggtgcgattgagggggattctcccactacgtagccgcgaatcatgttggaaagcaggggacgggcagaccctgccagtcccctgctttccagagaacaaaggagtgattttccgtgaaaaagaaggtgggggcaagggtgctttccctcctcctttcctgtgttttgctggggacgatgctcccggcggcggtggcttcggctgatccggcgccgacctacagcataaaggtggagccgtcgagtattgacctggtagagggcgagtccctcccgcttaaggccatcgtaacatcggatacaggcccgcttgatgaggatggactgaaaggcgcggggctgtcgatccgctgggagagcggggacattggccgggtaagcgtggaatcaacaggcaccctgaccaccaaagtgatggccgtaaaaacaggggaaacgaccgacgaaaaaaaggttaccattactgcctatctgaacagtgggacaggtgatatcggcaatgcaagctgtgagatcacggtaaaaccggcggtcactcctggaatatccattgacccgcctgccgttacggagattgatattgggcagaccctccaactcaccgccaaggttacaccggagggggcccctttgacctggagaagcgaaagcccctcggttgccaccgtgaacagcgctacgggtgaagtcaaaggcatggcccccggcaaggccgtcatcacggcgatttcgggaagcaatacggacacctgcgagatcacagtaaagggtatccttctggatgaaacctctctgaccatgaacgagcgggacacccacacgctgaaagcgaatccgtatggctcgctggggacgttgaagtggacaagcagcaaaccggaaatcgtcacggtcaccggggacggctacctctatgccaaggcccagggcgacgcggtgattacagtttccgatgccagcgggaattaccaggccgcctgctccgtcactgtcaagcgcaacaccgctgatatcattttcggctcggcgggggcgggggagccgctggccttctcctcccttcgctccaaactgcaaaaccagtgcagcagcgtgttgggaagctctctgcgctacatcagcggactgacagtggacacccggcagggtactctctactaccagtacaaatctgagggagataccggaaagggcgtgggcaccggggaacaatattatgccgatccgtctctggggcagatgtccctctcggagctgtattttgtgccgaagccggatttcagcggaaccgccgttatccactataccggctatgccagcgggagctcctttttccaggggacgattgaggtcacggtggaggagcaggaggatgtctcctactccgtggccggacagcagcccctctcactgaacgcggatgactttaaccggatttgccgcagccacacgggccgggaattgagctatgtcatcttttcccagccggacagcggccgggggacactgtattacaactatatctccgagcagaattacggcagcaaggtggacacctccaagcagtataagcgcagcgggagccccaacctgtccgacatcacctttgtggctgccgcaggctaccggggagaggtggtgatcccctataccggctatgacagcaacggaagctccttccgcggacgcattaccatccgcgtctctcaggctcagaacaccggggatctcacctacaccattgcccagggcggcaaagtgacctttgatgacgacgattttaacgacctgtccaaggctgtgacgggctaccccctggattacgtgcagtttgagcggccggattcctccaaaggggcgctttactacgactactccagcaatggcagctatgacagccaggtgacggaaggacgcagctactaccgttcctcctccccctatctccggcgagttacatttgtagcggggaaggattattccggcacggttcatatcccgtttaccggctgggacaccaagggcaaccgcttttccggcacagtggcggtggaggtggggcgcacgggtgacggcgatgtgcgctactccacctaccggaacggacggatcacctttgatgacggcgatttcaataccctgtgccgggagctgaccggcactacgctgaactatgtgcgctttgaactcccggacgcttcggaggggacgctgtattacaattacagaaacggcagctacgacagcaaggtatccgaaagccggaactactatcgttccagcagcccctatgtggaccggattacatttgtccccaagaaggacttctccggcaccgtagacatcccgtttaccggctggagctccgcgggagagaaattctatggaacggtaatcatcggcgtggacagcggcgacacaacgatacgctatcagacaaaatatggaaagcctgccgcattcgcggacggggactttgacgatttgtcggagctgctgaccggagagcacctgaactatgtgcggttccaactgccggactccggcgagggcactctctactacgactacgatgacgggaaatacgccagcaaggtgtccgccagccggaattactaccgctccagcagcgcctatttggaccgggtctccttcgttccggacgaaaatttctatggcacggtgaaaattggctttaccggatggaacacaaagggggagcgctttgagggcaccatcgagattacagtggaagaaccggccggcgccagtgaaattgtatataccaccctggggacggcgctgcccttccgaagccaggactttcgtaccgcctgcgccgcacgcggagagggcgagctgcgggaggtgcgctttacctccctgccctccgggagcgcggggcggctgtactacaactaccgggatatcagcgaaaaggggaccgaagtgcgcaccggtacccagtacaccccggacggcagtccgaacctctcagatctcactttcctgcccaaagcgggcttcacaggcagcgtccagattggctatgagggcacggacagccgtggaaagaccttccgtgggcagatccgcatccaggtaaatcagggatcgggctcccgttacttccaggatatgggcagctatgcctgggctgcgccctatgtggacctgctgtatgaggccggcgtaatcactggtaccggcggccagcgctaccgccccgccgacgcggtgagccggggggatttcatgctgatgctctaccgggcgttccagcttaccccggccagcggctccgggttccccgacgttccgccgggcagctactacgcccaggcaatccaggcggcacgggccgccgggatcgccagcggctatccggacgggggcttccatccccaggagcctgtcacccggcaggatgccatggtgcttctggagcgcaccatgcaggccacgggctggagcctcggggcagcgaataccggctatctctccggattccgggacggcggaatggtggcgccctatgcgcaggaggccatgtcccatatgatagagtatggtatcatcaccggtacgccggaacaaaaactgaatcccatacagtcgatttcacgggcggaaatggcggttatgctcgcgcgtgcaatcactttctaaaagaattcaaaggccccccggccatagtggaaacactatggccggggggccttttgcgttttatggactaatagtgtaagaaatatctaaaataatagctttctggatttcattatgtgaaaagactaaaatgggtattactataaatgaaatggagggaataaaaccagtatgcaaaaattagtgaatcagacctatcaattggcggaaaatgcagtggaatcgtttagaaagcagcttatattggatgaaaagagagaagcgaccatccaaaaatatactcatgatgttcgacgctttttatcgtatcacggaaaacagaccgtctgtaaggaggatgtgatccaatacaaggcctggctggcggagcattacgctgtgcgcagtaccaattccatgctgattgcactgaaccagtttttacgcttccaaggggccggggactgctgcgtcaagccgcttaaggtacagcggcagaccttctgcgataagaaaaaagagttgagccaggccgaatacttccgcctgctggaggcagcccgacgaaatggggacatgcggctccacctggcgattcagacgatttgtgcgactggaattcgggtaagtgaacttgcctatatcacggtggaagcggcccgtcttggaagagcaattgcaagcaataaggggaaaagccgtatcatactgataccaaaggagctgtgccgaaatttgctggactatgccagggagcgtggaatccaggatggaccaatttttgttacccgcggggggcggacactgaaccgcagcaacatttggaatgccatgaaacggctgtgcaaatctgcacaggttgggccggaaaaagtatatccgcacaacctaagacacctgtttgcccgtactttttataaaaaagaaaaggatatctcgcgtctggcggatatccttgggcatgaaaatgtcaacacgacccggatctacgttgtctccagcggggcggaacaccgggaacagttagaatcgcttcacctgacagttccgtatcaagcggcatgccaagatcaggaacaacataatgagacattatgttattaaaccaagtcggatattttgcaattatgaagcagcttttttagataatggagtataggcgaagacttactcggagcggctacttatcatacatataaaacaactgcgattttcacaactgtagccaaaaaaataaacttctgtttttgcgaatatgggacttgaagtaaatagaaatatggtataaaattagagtcgtattttaggggattttgtcgagtgcataacaacataatgtctcattatgttgttgaatcaagccggctgtttataggaaccacccaaaaaagagggaaggaaggcgctgttgtgaatattctgaccagcaactccatgctgatgcttcagcggtccatgggatttctttggagcaagcaggactgtattttaaataatctggccaacgcagaaacccccggttacaagacccaatatgtcacatttgaggagagcctgagggatgcggtccaggccgcggcggacaagccccagccgggcgccgccatgcgtgaggcaattgcagacaccccggtacagcttcacgaggcgcaggagagcgtccggatggacgacaatggggtggatattatggagcagtcggtggagctggcgcgaaatggctatcagctccagtatgtcatgagtgctatttcgggtgaactgtcgctgctgcgtaccgcaatccggggataagggggaatcgaagtggcgtttatgagttcaatgaacgtggtaggctcggctctgactgcggaaatgctgcgcctggatgtgatctctgaaaatataacgaacatcaacactacccgtaccgaggggggcggcccctatcggagaaaggttgtggtgctggaggagcagggggagcgcacgccgtttcagttggcgctggcccgcgccggaagcgcggcggctcccgcccaggccggaggggtgcgtgtggtggagatcgccgaggatccctcggattttaagctggtgtatgacccgacccacccggatgcaaatgcggaggggtatgtggagatgcccaacgtggatttgatcaaagagatgtcggacgccatggcggccaatcaggcgctgtcggccaacattactgcgtttaacgtcctgaagcaggtcgtggccaagggactggagatcggaaagtaagcctgtgccgcagggaatgggacggttttgcacgggacacacgaaggagagacgagtatgagtgtgcaagcaatcgataggattcagccgctgtggacggacttgcagacagagggcatgcgcctggatgcgggcgcggaagtgggcggtacccggcgtacccagccgaccctgttttctgatatttttcagtcggccattgaccgcgtacgggagacggacgcggccaaaaatgaggtggcatatcaactcgctaccggccaactggacaatccggcggcgctgatgacttccatcacggaggcgcaggcgtcgctggaactgttgattcagctcagaaataaggcagtggagtcctataacgagcttatgcgcctcagcgtgtaaggtttgccggagctgggggtaacaagtgtgcaggagaaaataaaaggatacctgggcaaggtggcaggttggtggaaggcggccgggaaaaaggtgaagctcttcctgatagccggcctgattgcggtcgtggctgtcgttgcagtcgtattggcgatgcagatgaaccagccctatacgaccctgttcaccgggctcaatcagacggaattaaatgaaattgtgtcctatctgtccgagcagggaatggccgattaccggattgagggaagcgatacaattctggtgccggcggagcaggaggtacggctcaaggcggcgttggcccagcagggctaccccaagtccggcttcgcctactccatgtatttggatcatgtggggagcctgaccacggagggagaacgggagcagttggagctctatgagctccaggatcgcattgcggcggtggttcgttgctttgacggggtccaggaggccgtcgtggatatcacgccgggggaggacaacaccttcattctggacagcgaaaacaagtatgatgccagcgccgccgtttttgtgaccatgcgggacggagcagagctcactcaaaagcaggtgcagggcatccgcaattttgtcagccactccgttcagggactggaaattgacaatgtcaccatcacagactcttacgggaacacctattctgcgggggatacctttacggatatccaggatttgtccacgctgaagctccagttggaggagcagatcaataataaaatccgcaccagcgtgctacaggtactcacaccgatttacggtacggagaacgtcaaagtcagtgtcaacagcattgtggatctggaccgcagctatacggactccaccgattacaatctggaggactgggccaatgacggcagtaccggcggtgagggtatcatcggggagaagatctatgagggggacatcctccttcccggcggcgacacggccggaggtgtgcctggtacgagcaccaatgctgatctgaaccagtatgtgaacgaggacggggaggcggatggagaaggccagatcgtccacgtctccggagataaaaaatacctggtggatgagacgaatcagcaggtggagcacctgtcgggcacagtgagcgatgtcatggtatccgtcacgatcaatcaggcggcggcggacggtacggatgcggccgcgctgtatcctcacgttgcccgggcagcgggcatcgccacggcagatcagcgggacaagatctcggtgttgatcagccccttctaccaggcggatgagcctgtgctcccggtgccggagggaatcccggcctgggtgatctacgcggccgcaggaggcggcgtactgttcctggtactcctgctggtgatcctcctgctgggccggcgccgccggaagcggcgcaaagaactggaggcggcgggactggccgccgtggcccagacggagaccgctccgctcacgccgcaggagggggcggatattatgaatcttcagacggaaaagagtatggaactgcggaaggatgtccggaagtttgccgaggacaatccagagattgcggctcagatggtcaagagctggctgcgtgagggggatggcgaatgagcgagacagctaccggaggggcagccgcttctcaagctgcaaaacagttgacgagacagcaaaaggcagcggccgtagtgatctctcttggcgcggagaaggcatcccagctctatcagtacatggatcccgatgatgtggaacagatcaccctcgaggttgcgaagctgggctatgtagatgccgccactacagaagacgtcctgaatgagtactaccagatgtgcctgaccaacaaggctgtaacggaaggcggcctggagtacgcccgcgcggttctcgaaaaggcgtttggagaacaggccgcagacaacttgctggaaaaagtaaccaagtccttaaaaaaccgggaattctcttttctcaacaaggcggatggcaagtcgctgtttgcggcgctgcagcacgagcggcctcagacgattgcgctggtgctctcctatatcgacccggagaaggcggccgccgtggtggaggaattggactccaatacccaagtacgggtggtggagagcatcgccaatatggaaagcgcgtctccgaccgccgtaaaaatcattgaggcggaaatggagaaaaagtttacaaacctgctcacttccaaccaggtcaaggtgggcggtgtggactatgtggcgggtgtaatgaacaacctggaccgcaccagtgaaaaaagtattttcgaccatctgtccgagcataatgccgagctggctgacgagatccggaagcggatgttcgtgtttgaagatatcgtcaccatggatgagcgctcggtacagcgtttcctgcgggactgcgatcccaaggatctggtgctggccctcaagggcgccaacagcgaggtttccaacaagatcttccagaatatgtccacccgtatggcccagagcatccgggacgatctggagatcaccaccaacgtccgcctgcgcgatgtggaggaggcccagcagcgcatcgtggggatcatccgggatctggaggagaaaaacgagctgattatcctcaagggcggaaaggacgatattattgcctaatatattcaaacgctttttgcagcccaacacctccgactttgtgtttccggacgtggaggagcttgtggaggaggagccggcggataccgcgggcgagcaagagggagagccggaggaatcagctccagaggcagaggaaaaggacacccccagcgcggtcgactttgcacagattcaggcggagaagattctggaggatgctaggcggcaggcggaggactacctggcccggcggcagatggaggcggagcaggaggccgagcaggtgcgccagcaggcccagtctgagggctaccggcagggctatgcagaagggctgcggcaggccggggtcgagggccaggcggagctgcagaagcagcgggagcagcaggccgaggagctgcaggcttttttggaaaaggccaccgctgcccgggaggagctgctgcgggagacgcggggcgagctgtgtgagctcagcctggccattgcggaaaaggtgatccatgtcagcctgaacagcagcagtgaggtggtggcacggatgatccaggtggccaccgaaaagctcaagcggcgggagtgggtgcacatctacgtgggcggctgtgccgccaaggaggtgtctgccattacgccggagctgatgacggctctggccggcctgtccgaccacatcaaaatcattccgctgtccgacgatgaggcgggcacctgcatcattgagatgcccgatgagatcattgatgccagcgcctccacacagctcaagaatatccgcgacctgatacacgagatatagggcggaggcagcgcaaggaagggacccaaagccatgttccaggagatgatccggcagattcagcgggccgagacgatcagttatacggggaaaattgaaaatatcgtcggcatgtccatcgaggcatccggcggacgggccgctgtgggtgatatctgtcagatctacaacggggacgcgggcggccaggtaatggccgaggtggttggctttaagaatgaccacatcctgctgatgccctattcagacatgagcggtatctctgcgggaaattttgtgcgcaacaccgggcggaggctcagcctgcgcatgggccccttcctgaaggggcgggtgattaatgcactggggcagcccatcgacggcaagggcccctttcagggcggcacgctgttctgtgtggagaacaaccactacatcaaccccatgacccgccctcccatccgggagcggatggagttcggcgtcaaggccattgacagcatgctgaccatcggaaagggacagcgtatcggcatttttgccggctccggcgtgggcaagagtaccctaatgggcatgattgccaaaaatgtaaaggcggatatcaacgtcatcgccctggtgggggagcgcggccgcgaggtgctggaattcatggaaaaggatctggggccggaggggatgcggcggtctatcctggtggtggctacctctgaccagcccgccatgctgcgcaagcagtgcccctccgtggccaccggaatcgcggagttcttccgggaccaggggtatgacgtgctgctgatgatggactcgctgacccggtttgccatggcccagcgggagattggcctggcggtgggggagccgccggtaagccgcggctacaccccatccatctacgccgagctgcccaagctgctggaacgcagcggcaacttccagaagggctccatcacaggggtctataccgtgctggtggagggcgacgacaccaatgagcccatcgcggacacggtgcgcggtattctggatgggcacatcgtgctttcccggcggctggccaacagcaaccattttccggccattgacattggggccagcatctcccgtttgatggcggacatcgtctccgacgagcacaagcggcttgcggcccgggtgcgggacgtgatggggatttatgagaaaaatgccgatctggtttccgtgggcgcgtacaaggcgggcaccaacccaaggctggattatgctttgggaaagatggacgggatcaaccagtttttgactcagggagtggacgaggcgttctcctatgaggaggatctggaggccatgcggaagctcctgtaagagaagaggggacagggatgaagcggttccagttcagcctgaatacagtgttgagctacaagcaacaggtgctggaggagctgcagaatgagcatggacaactcctttaccaggtacggcagcaggagctggtgctccaggcggcggaggagcgctaccggggcctgaacctggaattccggcaggcggagacggagggcctgaccatagccgaggccctgcggtatgagagcggcctgcgctttctggaggatgagatccagcgggaggccaagcgcctgcgggagtatgaggccgcagcggaggagaagcgcaggcaggtagtggccgcccggcaggataccgcctccctggaaaagctcaaggacaagaagtgggaggactatcagaagcaggtgcagaagggcgaggaactgctgattgaggagctggtgaccgcagcccgggcccggacggcggtttgaccgcccggagccacaccttgaaaggaggtgagaaccatgaatacaactgatttattgcttcagatgaccttggcagccacacagattgcccaaaacaccgctccgccggtcagcggccggacggaggatgccgatgaccggcgggacttctccactctgctggcagagaagcgggtggaggcggccggaacggagaccggacgcgcagtttcggagagccaaaagggtgaggttccggctgcggccgatgggggtgcgctcagccagggtgcgcagtccgtaccccaggcgccggggctggaggagctgttccggagcctgctgatgggcgcccaggcagcgccggagggcgacgtatccctccagccggtcccgcagactgcggttcccggcatggcccaggctccggctgcggcggaagaaggggccgtattgcttcagcccgagcagcagaccgccggaggggagcagctcccggtaccggcggagccggcgcttgcgggtgaggcggagtccacggtccaggcggaggtccttcctgccgcggaggatggcggtacagccacggcccaggcggttacccctgcggcccgggagagcggcgcgcagaccccggcggacgctggagagacggcgggccgtccggccggcggggagcaggagctgcccgagctggacagtgtgcagacggagggggcggcgcagccgctctttgaccggacagagcacatgccggtgaaggtgggcgaggcggataccctggacgccacggagcccgattttgcacccaggctggcaaaggccattaccgaagcggagcaggagggagccaggcatgtcgagctgaagctggcgcccgagcatctgggaaagctgtctgtcgagctgacgcaggggaaggacggtgtactgcacatcgtattccacgcggagaacgaacaggccatgaagctgcttcaggagcactccgcgacgctggtatccatgctgcacggcagccacagcggcgagatccaggtggaggtgccccggccccagcagggagagcagccctggcagcagccggagcagcagcccggacagcagcacggccgcaacccacaggaacagggacggcagcgccagagtacagaggacttcctgcagcagcttcggctgggcttgctgggcgtagaagcggagtaacagaaaaaggagtagcacgcaatgagcagtgaatttatgccgatggcgctggacagtctggcccgacagcagagcgcgcgggctgccggcagtggtgcgagctcccgcattacggaggaagagctggaggagctgggcattccggtaaacaagccgggagagaacgatatgggcctggactttaacgactttctccaattgatggtgcagcagcttcagaaccagaccattgacaacaccacggataccggcgaaatgcttaaccagcttgtgcagatgtccaccgtacagatgctgtccagcgttaagaccggactggagaccctggtggatgccagcaccctgacctatgcggcctccctggtagggaaaaccgtcacggtgggccaatatgacgaagacgggaagctccaggagattgagggagtcgtgacgggcaccggaaactatcagggggtacccgtgatcttcgtgaatgacgagatgtatcctttgaattccatcatggcggtgggcaagctgccggagattccggaggagcccgaggggcccggtgagggcggtgacggcgacggaacgggagaaggcggagagaatccgccggaggagagcgcccggacgatttgagcgggcggcaggggccgtccaaaggagggatagagcggaatggagcatgcggtagagggcctcggcagccccgcgctgggacggggccatacatacagcaccgggaaacagacctcttccggctttggagcagtgcttcagcaggagctggcccgggcagatgagcggcagatcgccttttccaagcacgccatcgcgcgggcggaggagcgcgggatcgcagtgacacccgcccttctggaccggctgaccgactccgtagagcgggcgcaggccaagggagcgacgaatatcctggcgctggaccagagcctcgcctttatcatcaatgtcccccacaaccgggtgattaccaccctgtcccaggacgagatgaaggagaatatctttaccaacattgacggcgccgtgatcctgtgaatcacagagggcaggaccgaaaggatgtcctgggggaggccggatgggccgtcccccggcggtgccggagaaatgtcaatgaatcagagcacgcaaaggagagcgaatccaaatggctttgacaggagcaatgagtgccggtatttccggcctgaaggcccacatggatgcactgaacgtagtgggcaacaacgtagcaaacgtaaatacccagggctacaagcccggccgggtcacctttatggagagtatttacagcacccagtccgccggctccgccggaacggctacggtgggcggtaccaacccccggcagaccggctatggtgtgggcatcggcaccatcgacctggatatgagcagtcagagtctggactccaccggacgggggatggactgcgccattcagggcgacggctttttcctggtgggagataagacccacgatatcgacagcatggacgccctcaagggactaaccctgacccgggtgggcaactttgagttccgggacggctatttgacggacggacagggcaatgtggtctatggatttatcacgcggtccaacggggatgatcccggaaccacgccgggagataagcccagcactgacttggttcccatccgccttcctatgaagtctaccgacccgaacagcaagggcgacgcggtttatgtgggcgtggatgatcaaactggtgcgaatgtatatccagacaatgatccggctgccacagtggacggctttgtagatctggagaacatcagcatcgacaagaacggtaagatcactggcaccaacaaggacaccggcgacccggtggtggtgggctacatcgccctgggcagtgtggaaaacctcaatggcgtgcttcataccgagggcccttattacacggcgggcaatgccgctggggatatccgggtgggtacccctggaaactccgtcaccggaaacctgagaaatgacaagatcacggacggaaacaacgtggttgaccccgattccgcactggctgagggcagcggcgccacactgatgaccggcttcctggaggcctccggcacggatctggccaccgagtttgccaacatgattatttaccagcggggctatcaggcaaatacccgcattgttacggtgaccgacaccatgctggaagagctggtcaacatgaagcgctaagaaatggaattgccgatctcccccacgcctggcggcgtggggggattgggcaggggagggcggcacgatgattgaactgagaaaaatgaacaatgagcgttttttgctcaaccacaaccaaattgagtgcattgagctgattccagagagcaaaatcgtcatgatgaatcacgactattacatcgtacgggacacggtcgaggaaatcatcgagaagatcgcaaagtataacgccaaggtacaggacattcaccgcgagatagccgtcgtggagcggtataaagagtgatgtgtctgctctgcatcttcgtgcgggaggagaaccaaagatgaacattgtttatttgctcggcattgtcctggcgttcgtatttgtaatattcggaattaccttcgatcccggcgggaccggagggctcatggtcggtccgttcaatctggatacactgatcaattttgtagatcccgccagtatcctgatcgtacttggcggtacgcttgcggtggtggtggcctgctaccccaagctggccaagtccttccccaagcacttcaaaatcatgctccggctggacgctttcaatccggaacaatatgtggacaagctgaccgagctggcgcagattgcccgaaagaacggcctgctcgccttggaggagaaggccaaggagcaggaagaccccttctttcagcaggcaatcatgctcattgtagacgccaacgacccggaccgggtgcgcagcattctggaaaatgatatcgagcagacctcggagcgccatcaggaggtcatcgccatgtatgaacggggctccaacgcggccccggccttcggtatgatcggcaccctgatcggactgatcaacatgctgaagaatctctccaactccgacatggagacccttggtcccagtatgtcggtggcgctgatcacgaccttctacggctctctgctggcccatgttgtattcaaccccatcgcgtcgaacctgacggcccgggacgaagaggagatcctttgccgtcagattatcgtggaaggcatcatggcgatccagtcgggcgagaaccccaaattccttcgggagcgcctgatgacctttatgaaccaaaaactccgggaaggcggagaatccggcggcggcaccggagagaaaaaagagcggaagcgccgcaaggagaaataagccgcggcttgcttcagggaggcggtacccacgatgaaaaagaaaaaaagcggcggcggcggtgccaactggatggatacctacggcgatatggtgaccttattgctgtgcttttttgtcatgctctactccatgtctaccctggacaaggaaaagtggattgcactcgtacagtcctttaaccccaccgaggaggtgacggaaacccagcccccctccgcgtccgggggtgagggaaccggaacccaggaggatatcgaccaggacatggaggagctctaccaggcgatgcaggactatgtccaacaggctggaatggccaatcaggtgaccctgggcgaaggaaacggctacgtctttatctcctttgacgacaccgtgttttttagtggagacagctacgaactacgggatgagggcaaggttgtattggacgaagtctcccagattatttcagaggtcagcagctccatcgacgagatccgtgtcctgggtcataccgcccaggccgtgcccggccaggtgaacaacgtcacggcggaccgcttcctggcctccaaccgtgccacagtggttactatttacctacaggaaaaagacataattgacccggcccggctggtcagcgtgggctatggcgagtggcgtcccgtgtccagcaacgacacctctgcggggcgtgcggaaaaccggcgtgtggaactgattgtcacagggctggacctggacgacgaggccggagataacattacacaatattataccatgcgggaaagtaccggtacttctgccaatccttgagtgtgcagggagacggggggaaggcccaaactctgccgaggagggatgaagatggcggaagttttatctcagagccaaattgacgctctgctgaacgcggcccgcaacggcgagatggatttggccgcgaaggcagagagcagttccgagaaaaaataccgtaaatatgatttctacagcccaaggaagttcaccaaagaccggcttaaaatgctcagcggaatctttgaaaattacaccaggatcattaactccagaatcaacggactgctgcataccacctgtgagatagaggtggaatccgtggaagagcagcgctattacgagttttccaacgcgctgttggagggggacgtgttggccctggcagatgtagcgctggaggggcaggtacagccggacgagacgccggtgctgttccacttttccactacgctgatgctgagcatgatggaccgcctgatgggcggcgacggagatgtggacagccgacttcccgccggctacaatttcaccaatttggagctgaggctctatgaaagcattgtaaaagacctgatttccgttctgggcggaagctgggagaattatatcgcgttggatttcaagctgcgcagagtggagacgaatccgactctggtacagctcattggcctggatgagacggttgttattgttgggatcaatatccgctttccaaactgctccggccgtgttgatgtctgcctgcccggaatgatgctgaccaatattttttccagaattgtgtcgttgaatcaggcaggacacgggagtggggaggacaactcggatgaaatcatggatatactgcgggattccacgctggagatcacggccgagctgggccgtaccgaggtaaagctgcaagatgcctatttcctcaatataggtgatgtcattgacctgggacatccgaaggacgagcccatctatctgtatattggaggaaagccatggtttggtgggaagctgggtgtgcagaacaactccatggcagtgaagattggggaaaactactataacgagggaagaagggacgaataagcgacatggcgcagaatatatttagcgcgatggaattggacgccatcggcgaaatgatgaacatcagtctgggctcttctgccactgcggtttccaacctgctggatcaccgcgttgatattacgacgccgaaggttacagtggtacccatcagtgagtttaccctgggtgagctggagcccgccatcggcgtggaaatcaagtatgtctccggtctggaaggcagcaatattatgctgctgaagcggagcgatgtgaaggcaattgtagagctgctgatgggaaccgagatcccagaggaggagttcgagctcaatgagctgacgatcagtgcggtgtgcgagctgatgaaccagatgatgggtgcggcctctactgctctgtccgattttctggggcgtccggtcaatatctcaacgccccagtctttctcgctggatgatttggaggagatcaaaagggagcgcttccacagcgaaaccgggatgctggtggcggtgcactttatcctggaaatagagggcgtcctcaagagtgagtttgtcaatatcatgtccgtggagctggcccgggagctgctggctggctttgggatgggcattcaggacaccggggaagcagaggcggatgccaccccagcggcacagcccgcacagccggagccctcctccggcgcaggcgggaagctgagccaggaagaaattgagcgtctgatgggcggcggtgtttccacaccggctccagagcctgccgcggctccgtcttccagcggaaagatgagtcaggaggagatcgaacggctgatgggcagcatgtccgcagccccggcgccggagccagctccccagccggcccaggcctatcaggccgcctccccccagccggtttatcagcagcctgtgtatcagcccccggtgcaggagccgcgggtcattaacagcaagccggtcgcgctgcccaatttcgcggcggcggaatcgctgggagccgaacagaaggaaaacctggagctgattatgtccgtacccctggaggtgtcggtagagattggccggacccgccggaaggtagaggatattttaaccttctccaagggctcactggttgttctggacaagctggctggagaccaggtggatgtctttgtgaacggcctgtgcattgcgcggggagacgtagtggttatcgacgataacttcggcgtgcgtatcacagaggtactccagaagccggaactgtggagcctgacaaacttcaagtgagactgaaataaaaaaggggattaagaacatggctaagattctgattgttgacgacgcagccttcatgcggaaggtgatccgggacacgctgaccaagaatggctttaccgacctgcacgaggcggtggacggcaaggatgctgtggaaaagtattttgaactccagccggatctggtcctgatggacatcaccatgccgaacatggacggactggaggcgctgaaggcgatccgcgccaaggacaacaaggccaatgtggtgatgtgctccgccatgggccaggaggccatggtagtggaggcggtacaggccggcatcaaggattttatcgtcaagcccttcaaggaggaccgcctgatgaaaacggtcaattccatcctggggaatccctgacgggagcgggccaatgccggaagtgctttggaccatctgtgcaattctgggcgtcctggtgctggcctatctgtttacccgctatgttgccggacggggacagggcggcggtccaagccgcctgggaaagcggatgcttacaattttggaccaggtggcggtgggaaaggatcaaaggctcctcctggtccgcgcgggcgaaacgtattatttcctgggggtgactcaggggagcatcacctgtctggaaaagctcactgccgaggaggccgaggcctggatgggcggcgcagacggcgccgccgcgcccaagatggggttccaggaagcgctgcacagcgtgctggagcagcggaaacaacagaggaggccataaccggtggatgcgctgatcaatgtaaatggcgagaacgtacagacccttcagatcctgtttctgaccaccctgttgaccctgctgccctccgcagttgtgatgatgacctcctttaccaggtacattatctccttctcctttctgcgctcggccatggggctgcaacagaatccacctaatatggtcctcgtgggcatcgccctgtttctcacgctgtttaccatgtctccggtcatcagtgagatccagaccaccgcatacgagccatatattgcggaggagattacccaggaggaatttttgcagcgggcggagaaacccctgaaggagtttatggcaggccaggtggaggagagctcgctcaagctctactgcgatctggcaggactggatacgccgtctgcggcatcggccgcggagctgccgctgcgggttttggttccggcctttatgacaagtgagctgaagcatgccttcctgattggattttacctgtacatcccgtttgtcctgattgatgtaatcgtggcctccacgctgatgtccatgggcatgattatgcttccgcccagtatgatctccatgccgttcaagctgctgctgtttatcgcccttaatgggtgggagctgctgttctcgaccctggtgcagagcttccgataggagaacctaaatatggaagtagttgacattttgcgggaaggggtgggcgtcgcgcttcggattggcgcaccgctcctgattctgagcatgctggtcggtattctggtcgccatttttcaggcggtaacccagatccatgagcagtccctctcgtttatcctcaagatgatcgtggtggtggctgtacttctggtgggcggtggatggatgctggagacgctgctggatttcagccggtatctgtttacgctgatgtaagggtgtgggacatggtcgattgggcacagctctatctctttgaactgatttttatgcgcatgtcgggctttctcctgtttaacccgctgctgggacgctccaatctcccggccatggtcaagaccggtatggcgctggtgctctccattctggtttttgggacggccgggacgggggtgccgcagccggataccctggtggagctggcgtttcgccttctgctggagctgggaatcggcctggttctgggattcgtaatgcgggtggtgttttccgttgtccagatcggcggagaggtgatcgacacacagatgggtatgacaatggcgcagatctacgacgccagcagccaggccaacctgtcggtgactgcatcactgctcaatatcctgctgattctggacttctttgcggagaatggacactataccctgatgcgcctgctgaccacctccggtgagctggttccttatggcgctgccgcctttggcgatggagtctacgcctatgtcattgagctgtttctcgcctgtatgctcctggcggtaaagctggctatgccgatcctggcagcggagctgctgggagaggtaggcatgggggtgctgatgaaggcgatcccgcaaatcaacgcctttgtcatcaatatcgagctgaaggtgatcatcgggctgcttttgttctttctgctcttgacgccgatcaacgaattcctgctggagctggagagcggcatgctctcggagctggggcggatactgcgcctgatagggggagcgtgagaaggctttggcagacagttcaaaaaccgaaaaagcaacccctaaaaagcggagagacgagcgaaaaaagggtaatgtctttttcagcaacgatgcagtttccgtggcggtgctgctggccagcttttttgtactcaagctgactgccacgccaatggtggagcagatttaccgctttttgcagtacgctatggggcttgtggccggcgcggcgcacactggattgcaggacaacctgagcggcctggtgctggagatgctgaagacctttctgtttgcggcgggaccgctgctggccactacggcggtggtagcggtggcggcgacctttttccagaccaagctgctggtttccggggaggcgctgaagccaaagttcagccggattaaccctctgcaggggatcaagcgcctgttttcactgcgcagcgtcattgaggcgctgaaggggattttaaagataacggttctgctgttcctgatctatcagttcctggtgggaattgtagatacctttacgaaatatctccacaccgatctggccgttgcctgcgcccacctggtggatgagggcttccagatggtgatgcagatcgccatagcctttgtggtgctggccggcgcggacgtgttttaccagtggtgggactatgagcggcagttgcgcatgtccaaacaggagatcaaagaggaatacaaacagatggaaggcgatccccaggtcaagggaaagatcaaagaagtgcagcgcaggatggcccaatcccgtatgatgcagcaggtgccaaaggcagatgtggttatccgaaacccgacgcactttgcagtggcgctgcgctaccactctgagacggatggggcgcccattgtcctggcaaagggacaggacgagctggccggacgcattgtgcgcaaggcggaggagcatcacatcgccattattgaaaatgtaccgctggccagggcgctgtatgccacggcggagctgaatcgggagatcccgccggagctgtataacgccgtggcggaggtgctggtgtacctctaccgcatggatgaaaagctgaagtagcggcgagaaagtaggagccttggagagctatgagacggatactgaacaactccatatcgctgctggtcgtgatcattgttctctttctggtggtgccgctgcccaagcaggcgctggacatcctgattgtactgaacattgccatttccatcatgattctgatgatcaccatgagcatctcggaggcgctggagttctctatcttcccctccctgctgctgataacgaccctgttccgcctgggcctcaacgtatcctccacacgcctgatcctctccgagggcggcgatgcgggtatggtaatcaaatccttcggtacgctgattacccaggggaatattgtcatcggaattttgattttcttaatcattgtactggtgcaatttattgtgatcaccaaaggagcggagcgcgtctccgaggtggccgcccgcttcacgctggacgccatgcccggaaagcagatggccatcgacgcggatttgagctccggccttattgacgagaaggaagcccggctgcggcgttataagatccagaaggaggccgacttctacggcgccatggacggcgcaaccaagatcgtcaagggcgacgccgtcatgtcgctgattattacggtcatcaactttgtggcaggcttaattatcggcatcgtgcagggcggcggagatctggctacggttttgaaccagtattccatcgccaccatcggcgacggtctggtgtcccagctcccggccctgatgatctccaccgctaccggtatgatcgtcacccgttccgtgtcggacggcagcctgaacagcgacgtgctgggacagtttaaggcccagcccagggcgatcctggccaccggcattattttagcgctgctggggctggtgcccggcgctcccacggcgccgctcctgctggtgggctgcggcctgggtattggcggcttcttgagcgaccggaagctcactgagcagaaggcactggaggaacagcccgccccggaggcggcagccgccccggagcttcaggcggccagcgaaaccgactacttcaaggacatcaacaatgtctattccctcctggcggtggagccgatcgagatggaattcggctacagcctgatcccgttggtggatgagaaaagcggcggcaagctgatcagccgcattgtgatattccgccggcagtatgcccaggatatgggctttgtcatcccctccatccgcctccacgacggtgcagcgctgggaaccaaccagtatgtgatcaaaatccggggggaggaggtggcccgaggagagattctggtggactattatctggccctggagccgtccaatccggcggggacgattgacgggattgagacggtggagccggcctacggcatcccctcccgctggattttgccggagaacaaggaaatggcggagatctacgggtatacggttatcacacccctgaccgttatgcttacccacctgtcggagacgatcaaaaagcatgcctatgagctgctcaaccgctcggagaccttgcagcttgtggagaatctgaaaaagacggagccggagctggtggccgatgtgatccccaacgtcatctcctacgccaacctggaaaagatcctgcgcagcctgctgcgggagggcatccccatccgggatctggcggccattctggaggcggtggtggaggccagtaccacgacccatgatatcgacatgatcaccgaacaggtgcgcggtgcattgggacggaccattacccggaagttctgcgaaaatgggcagcttcgggtagtgacgctggacgcggagctggaaaagaaggtactggccgccctgaccaagaacgagcacggcgtctatctggctcttagccctgatattgtgcagcagatcgtacagcaggtgggagagctgcggaagaaatttgaggagctctcccaaacgcccattctgctgaccagccagattatccgtgtctatctcagccgtatgctcgccacgttctatcccgatatctatgtgctctcctttaatgaaatcacgagcaatgtgcagatacaggccattggcaacattacacttcagccgcaggaaaagcgtgcatagagatggggaagggtatctgcatgaataagttaaaacagatggaaacggccctagcccccggcggaggtcagcaggcggtcgaccagatggacaatcagacccttctgctgcgctacaaggagacgggggatatggagctgaagtgggccctggtgctgcggtataccgatctggtacgccggattgcgattcagacctgcgggctgttcagcgggtttacccagctggatgatgtgatccatgagggaattttggttctgctcagcgctgtggacaagtatgaccccgaaaaggaggtcaagttcgaggcgtacatcgcaaagcggctgcggggaatggtgatcgacctggtacgcaagcaggactggattccgcggagggtccggcagaaggccacccggctgaagcgggcggctgaggagctgtccatagagctgggccatacccccagcgatcaggagatggcagactacctgaagctcagccagaaggactatgaggagctcctctctgaaacggcgttttccaacctgatgtctttcgaggtgcttttggacacctatgggaatgtaaccggcaaggcactgtccggcaatccgccggaggatgcttatcagcaaaaggagctgcacgaggtgctgcgccggggaatcgcctccctgcgggagaatgagcggctggtgctctccctgtattatgaaaaagagctgaccatgaaggagattgcacaggtccttggggtcagcgcgccgcgtatttcacaaatccataaccgggccattcagcggctccaggcctacatgaagcagtacataggagcgtagtacacagcagaagggagaaggccatatgacaaaagggttttacaacctgacctccggcatcctgtcccagagccgccggctggacacggttgccaacaacatgacgaatctctccacctccgggtataaggcggagcagtatacggacagcaccttccaggaagtgctgatcagccgggtgggcaataaggacaaaagcagccccaccgtgatcggtgaggagagctatatcctggcccccagccagctctatgtggactatagccagggaagcctggaggagacggggctgacgctggacttcgccatcgaaggggatggctttttcgccatccaaacggctcagggcgtcgagtacacccgcagcggcagcttttctctggatggggagggctatctctgcctgcccgcccatgggcgggtcctgggggcggatggacaaccggtctatctggccaccgaccgtatccgggccgatcaggcagggaacctctatacagagggcggcggctatgtgggccggctgggcctgtatgcctttgcggacaacgggctgctggagaaaaatgagagcggcctgttcggtgcgaatgggcaggcgccggctccctcccaggcgaagctccactggaaatgggtggagaataccaacgtggacatgctccaggagatgagcgatatgatgacggcccagcgggcgcttcagagcgccgcacaggtgctgaagctctatgacggcgtgctgaccaaggcgacaacagagctgggacgcttataagcagaggaggagaacgatgcttcaggctttttataccgccacggtgggcgcgcagcagcaaatggagcgcatgggagtccagggcaataatatggccaacgcgaacacctttggattccgggcggagaagcccgcctttgaggctctgatgtaccggatggtagacggtatcgacggacagcagctccccaagggcagcggtacccgcatggtgtccaccatcacggatttccgctccgcagcgctggaggagacggggcgcaagcaggattacgccattgtgggcgacggctttttcgccctgtatgacccggataccggagagatttcctacacccgggacggctccttcgccctgtcctcgtttcagcagacaaaggaggacggaacaacggatacactttactatctggcggatggagagggccggcaggttctggacaccaacggctatcccattgtggtgacggacgctgaggcgcgccagcctgtgggcgtgtttaccattcaatacctggacggccttcagcatgtgggcagcggccggtttgtgaccacggagaaaaacggtgcggtgtggatgagcccctcggaggtgcgccagggctatctggagagctccaatgtggacttggcttctgagatgggaaaggtgattgaggcccagcggacatacagctatgtcctgcgcatgatgcagacagcggacgaaatcgagacgacggtcaacaacctgacaaacggataggcagggaaaatacgtgaaaaattttaatgaactcagcggcctggaactggatacgctccgggagatcggcagcatcgggacgggcaacgcggcgacggccctctccagcctgctccagtgtgaggtgcgcattgaaatgccggaggtgcgcatcctcggttacaacgaggccatcgactggatcggtgggccggaggtgatcacggccggtgtgctggtgcgtctgggcggggaaatcaacggtattatgctctcggtacagcagatggactttatcaatcaggtgctgggccgcatgatgaaccggacggtttgcgaatatgggcagctctcggagctggaccgctcagccctggtagaggtgggcaacatcatgatctccaccttcgtcaacgccctctctggattggctggggtaacgattcagccatcggtgcctggctttgctgtggacatgcagggggcgattattacggtgcccatggcggagtttggaggacagtcggattacattatgaccatcggcaccaatttcatctgcgaaaagcacagcgtgccctgccgcctcctgctgtcacctgacgtgcgttccctcaatttcctgctgcggaagctgggtgttttggatgaatgacaagctggtggttgggattgccgacatgaaaatggcgcagggcagtgggatgctggtgacttacgccctgggctcctgcattggaatctgcttctatgatcccatgctcaagctggccgccctgctccacatcatgctgcccctgaatctggagacggggcggaagtccccgctcaagtatgcggataccggcatccgggagacgctgcgggaaatggagcggcgaggcgccaaacgggcgcgggttacagccaaaattgccggcggagcccgcatgtttgaggtagccggcggtggaaatctgggcaatattggacagcggaacattgaaagcgtccatatgacgctgcgtacagagggcgtccggctgctacaggaggatgtaggcggcacggtggcccggaccctgctctttgacgcggccaccggacaaggctgtgtccgctgctacggaaagccggagctcattttttagccggtaggaatagaacaatctgaaagtgggggaatgggtcatggaaaacaacaaagacggaattttattggagacggggacaaacgagattgagatcatggagtttaccatcgacggaaatctctacgggatcaatgtggccaaggtgcgtgagattatgctgtcggcgccggtgcacccaatgccccatgcccacccggcagtggaagggatttttaaaccccgggacatcgtgattaccgtggtggatctgccggagtatctcagtggacataccgaacccaaaggggaaaaggatctcttcattatcaccaatttcaataaaatgcacattgccttccgcgtccatacggtagtggggatcagccgtatctcgtggcgggacatccagaagccggacaacacggtttccgggggcgcagacggggttgccaccggaatcgctcagtgcggcaaggacttggtcacgattctggattttgaaaagattgtggccgagattgcgccggagaccggtatccagctcagtgaggtggatgctatgggtaagcgggagaagcgaggcgagccggtctgggtcgcggaggactccatcctgctgtcccagatgatccgtaccgcgctgactaaggcggggtataccaacctgcgcatgttccaaaacggcgcagagctgtgggaggcgctgcaggcgtgtaaggacggcgggggccccaccggacaggtttctattgtgattaccgacctggagatgccccagatggacggccataacctcaccaagcggatcaaggaggataaagagctgcaggccattccagtgatcattttctcctccctgattacagaggagatgcgccgcaagggcaaagaggtcggtgcggatgagcagttgagcaagccggaaatcgggcatttgatcggaattgtggaccatcttttggagcgcagcagacggaagcgggaggcaggacaggcatgagcagcaaatatatcgttcgtcagcccatcaaagaccaggcaaataagatcatcggctatgagatccagtaccatggggaaaaccaggcctttggcgacaacggcaaaaacgtcagggagaacgactttgccgcagcggacaccatttacaatttcctcaccatgaataccgataagctgctgcgcggctcactgaattttatgaccttcaccaccacgcttctgatgaaaaaaacgccccacctctttgacaagggggagctggtgatccagattgacgacagcgttatcattcatcccctggccatgcatatggtgcagcagtatgcaaaagagggctatcaggtggcggtcaatgaattccagtttgccccgcgctatctgggaatcctggaccggatcgactacattaagctgaacatccagaccacgccggagctgacgctgaaaaacatcatcgacatcgcccacagcatgaaaaagcagtgtatcgccgtggggattgaccgggaggaaacctaccagaaggccgtcaagctgggggtggatgccctggagggcccctatgtggcggaaaagctgaccacacagacccacagcagcggctatttgcagagcaacttcttccgcctaatggtggcgatgacgcgggacgagccggatgtggaggagattgagcagattatttccgtagatgctacgctgacctatggcctgctgcggatggcaaactcctgctattatgcgctccgccaccgggtaaccagcgtacgccaggcgatcatgactatgggcctgagcgaactgcgtcaatgggtctacctgctgagcgccagcaatgccgagaatcagatggaggagggcgcggaggagtttctcagaatgtcgttcatgcgggccaacttctgtagcaagctgatgaactacgcaaaggatatgccaatctccaagccggatgcctacttaatggggatgttttctaccctgaattatctcattgatgctccgctggcggagattctgaagcccattcctctgtgtgcggaggctaaggaggcccttttacagcataccggccgggctggaatgctgtacgatctggccctgagctatgagcatgcggattgggaaaagattgatagactgaccggagagcttggaattcctacgaatctgctgaccagtctctattttacctgtatggaagaggtaaaccgggtttggatcgaaatgaaccggccggtgcagggacagataaccgatgacacaaagatagatacctaaagtatccttctgttgctcagccatgaggagcggtgccgtccacaatggcggtgttcagggcggggaacaccaccgcgtccagggagtccgggtcgccggagcaggcgatgtactccaccgaagcccccttctcctccatggcctgggccacccggcgcatcagggaggacttgccgcagcccggcccgcccttcaatatgtagatggtttcggcctgctcgggctcaagcagctggtcgtacagggagtagaagccggtgggggaattggcgcccagataaaaacaaacctttgcttccgcttgcataaatgaccctccaagtctctagtttctcactccagcgtatgcgtggagggggaggggggtgcggcgcggtatggttgccttttgcctggaggctgtggtacactataaaaaaagagagggggtgagtctatgccgtatgagaagctgcgcctgaccgccatgaccacggccggtgggtgaggggccaagctgggaccgggtgtcctgcaacagattttgtccgggctgccccggacgcttgagcccaacctgctggtgggctatgactccagcgatgacgccgcggtgtaccgcctcacggatgagctggcgctgatccagacggtggatttcttcccaccggtggtggacgacccctatgactttgggcagatcgcggcggccaatgccctctccgacgtgtacgccatggggggcgagcccaggctggccatgaatctgctggccgtcccctcctgcctgccgccggaggcggtgggggccatcctggaggggggcgcggccaaggtggcggaggctggcgcagtgaccgcaggaggccacagcattgaggacacggagcccaagtacggcctgtgcgtcagcggcctggtccaccccggagcggtactgaccaaccggggggccagggagggggatctgctggtgctcaccaagcccctgggtagcggcatcctgaccaccgccgccaaggcggagctgctgagcggggcggagtaccgggcgatgacggatctgatggcggcgctcaaccgggacgcggcccgggcggccgtgcccctgcggcccagcgcctgcaccgatgtgacgggcttcggcctgatcggccacgccagggagatggcggagggggccgggtgcaccattgagctctggccggggcgggtgcccatcgtgccccaggccctggagctggcccgggacggcatcatcccggcgggggcctaccgcaatctggagtttgccgggccggaggtggagacggcggggaccttcccccaggcggtgctggactgcctctacgacccccagacctccggcggcctgctcctggccattgcggaggagcggggggcggagctgctgcgccgcctggcggacgcgggggtgaccgccgccgccgtcgggcgggtgcgcccccggggcccgcggcgcattgtgctcaaaccctagccggacagggcggcgggaggcttgtacctcccgccgccctgtgttatactgtagaaaaaacaggggggcggaagcatggaaaccatgattatcggcatcgcggggggaaccgggtcgggcaagaccaccctcaccctgcggctgaaggagcactttggggaggacgtgtcgatcctctaccacgacaactactacaagcagcacgacgacatgccctatgaggagcggtgcaggctcaactacgaccacccggacgctttcgacacggagctgttgatcgccgacctccaggcgctgcggcgtggggaggctgttcacagtcccacctacgactacaccgtgcacaaccgggcggcggagacggtggaggtgcggcccgcccgggtgattctggtggaggggattctgatcttcgtggaccccgccctgcgggagctgatggacatcaagctctttgtggacaccgacgcggatgtgcgcatcctccgccgcatcatgcgggatgtgaaaaagcgggggcgctctctggactcggtggtgcagcagtacctcaccaccgtcaagcccatgcacgagcagtttgtggagccctctaaacgctacgccgacctcattgtgccggagggcggcaaaaacgcggtggccctggacatgatcatccagcgggtcaagagccatatggagcaggaataagagcagagaggggccgtgccgccggtttggcggcacggccccttgtttgcgcggaaagcgcggggggagcggactccggcacaaggacgcaggggcggccccgccgcttcgccctattcgtcctcctccgcgggatagaggcggcgcagggcgaagagcccgcagcagatgacggcacaggtgcccagccagagcagggacagcagagcaatcagcagctccacccaccgccagttcgccagataggggagcaggcagaaggccacccggaacaccgcgtccgcgttgcggcacagccgcaggcggcggctcaggggggagcggccgccctcccctgaccgccggtcggccagggcggccagatcggtgagcagttggaagtggaaatagagggccacacaggtgatcagggcggagaggagaaagaagcggccggtgaactccgcgccggtgaggagaaaggacagccagtccaccccggacaccgcgcccagcaggatgcagaagggcctgagcaggggcagatcccgcagctctccggccagcaggccgatcgcggagaaaatcaggaggtagccagcccagtcggggagcacatccaggttgttcaggcggaagtgcagatggatgaggagataggcccaggcgatgcggctcagggcgcttcggatgcctgcgtgattcatggcgtcacctccgcgggataggcggtgcaggtgtatctctggtttccatagacaaaatccagggagagcgcggagagcccctccaggccggagtcgtcagccgcggcgtgccacagaccgctgactccgggaaggtcataagcggtgagcacaaagctgtcaaaagcgggagagccatcggaggaaaggggaacgcagagcacggcgagggtggacagaaagtcgtacggaacacctccggatttgcgctccaccctcagttcgctgcgcttgcagcaggaggtaaacgcggcgtgaggggcgggaacggggctgggacggtcgccgccgccgatgcggaacgtcctgccgccggcccagccgccgtctgagagcgacatgtacccaacccagatgtcggagcaggtgagaaagtaggtgagatcgacctctaggcgcagatctaccgtttccgccgcgtaggtgatgtgggggatatggtcgtcgggggccgggatcgctccctcatcggggaggcgcagcgcctccagctcccccagcggctccactgtccagaagtccccgtcgggccgtaccgccacctgctggtacacgatgccataggtgttgtcctccgacagaggggagaaaaacagcgttccggtatagccctccgccccgtcaggcaggaggttcattaccgaccactccgccagccaggaggggcggtgccagtggaagcccagggtccagaaaggggagtcctccagctccacctcttggtaggggaccagggtgtccttccaaacggcctcccgcccctcctccggcagcaccatggcatagtacagggggctgtcgctgagcagcgccttggcataggtgtccaaggctccggccacggtggtggggcggttgagctgtgcctgagccagggcaagagcgccccggtcggttccgccgggcacctccaccgccccgccggtaccccccaggcaggtgagggccagcaccacggccacacagcccgaggccagggccatcccggcggggtagcgcctgaagcgggcgatagcctggatgcgggccttgatgttgcgcccgccgttggccatggaggaggtgccgggggcgcgggcgtaccggccgtcggccatggacaggagaatcacgccgtaggcgcggcgctcctccccctccagccgctccagcacccgctggtcacagagggcctcgcagtcgttctgtatccggtcgcagcagtaccagatcagtgggttgcaccagtgcaggcaccgcagggcgcacacccccaccccggcccacacgtcgccatggcggaggtggagcagctcgtggaggagcaccttgtcgtccaccggccggtcggggagcgccagcaccgggcgcagggggccgcagacgaaggcgctctccagcccgggcagcaccaccacccgccggggggccttcaggccgtaccgcgccgctacgccctccacctgggccagcacctccggggcgggggagaggccccgccggatggcaacgcgcaggcgcgtgtaggaccggaaaaaccacagggccagcaggagcaccccggcggcgtagacgtagaagaacacgtcggtgatgctccccggcacaggcaggccgcggggaaagaggggcaccggggccagcacctccgttacgccgtagggatcggtgagaacggaggacagggggagttccacctggagcctggccgcctccagcaccgcccgcccgccgggcaccagggtgcggcccagcaggccggcgggcaggagggcgcgcagggccagaatggcccacaccccgtactgccaccggggggagagcttgtccagaaagaggcgctttgcggcgagcagcaccgccgccgccacggacagggccagggtctgagcgagaacaggccagaggttgtccacggctcacacctccatctcgtccagcagcttcctcagctcgtcccgctcctggggggtgagcttctcgtccttcaaaaaggcggccaccagcttgcccgccgagccctggtaggcccgctccagcaggccccggcgctcggcggcggcgcagtcctcccggctcaccgccgcccggtagcggtggggggagctctccttgcggatgtccaccaggcccttggcctccatgcgggtgaggtaggtcagcaccgtgctgcggctccagcccgtatccggacgcagagcgtccaccacggcccccagggccagcccctccggggccacccagagggcgttcagcaccctccactccttgtcactcagcttcatgtcacagccctcctacagttgtcgcattcgtaatgatactacacctgtaggagctacctgtcaagagcggttgtcaattttgccgaaatgggaaaaagggctttgagggggacggcggatgtggtaaaataacagattgaatgaatgacaggagaggatgagaaagatggacaagctcggctttgacaatcagaagtatctggagctccagtcggcccacatccgggagcggatccgccagttcggcaacaagctctatctggagttcggcggcaagctctttgacgaccaccacgcatcccgggtgctgcccgggttcgagccggacagcaagatccgtatgctcaaggagctgcgggactcggtggaggtggtcatcgccatctgcgccagcgacatcgagaagaacaagatccggggcgatctgggcatcacctacgacgtggacgtgctgcggctcatcgacgccttccggggggagggcctgctggtgggcagcgtggtgatcacccagtacgccggacagcccgccgccgacgccttccgccgccggatggagcacctgggggtgcagacctgcctccactaccccatcgcaggctacccccacaacaccggcctgattgtcagcgacgggggctacggcaaaaacgactatatcgagaccagccgtcccctggtggtggtgacggcccccggccccggcagcggcaagatggccgtctgcctctcccagctctaccacgactacaagcgggggatcaaggcgggctacgccaagtttgagaccttccccatctggaacctgcccctccagcacccggtgaacctggcctatgaggcggccaccgccgatctgggggatgtgaacatgatcgaccccttccacctggccgcctacggcgaaactacggtgaactacaaccgggacgtggagatcttccccgtcctctccgccatgtttgagaggatcatgggggagtgcccctacaagtctcccaccgacatgggggtgaacatggcgggcaagtgcatcgtggacgacgaggcggtctgtgccgcggcccggcaggagatcgtccgccgctactacaccgccctgtgcgaccgccgggtgggcgccgctggcgacgagctggtgaacaagctggagctgctcatgcagcaggcccatgtggatccctccatccggcccgtggtggccgccgccgcccaggtggccgaggagaccggcaaccccgccggagccattgagctgcccagcggcgaggtggtcaccggcaagaccaccgacctgatgggcgcctcctccgccaccctgctcaacgccctcaagcgcctggcgggcattgatcaccagcaccacctcatctcccgggaggccatcgagcccatccaggccgtgaaggtcaaccacctgggctccgtcaacccccggctccactccgatgagacgctgatcgccctggccatctccgccaccaccaacccgctggccaagcgggcgctggatcagctctccgccctgcgggggtgcgaggcccactccaccgtcatcctctccccggtggacagcagcacctacagccgcctgggcctgcgcctcacctgcgagccccagtatgagaccaacaagctttaccacaagtaggaagaatggttgagcactggcacttccgcagatccggagtgtgcccgtcatcgaaaagaacggatttctcaccagcttttaaactggtgagaaatctgttccttctgctttcaggggaaaggagagcaaaatgagaatataccgtctgttggggctgctctcggtacttgccgaggtagagcatataacggttcaggagttggcggtgcggtttgaggtatccaggcggacgatcctccgagatattgaaaccctgaacgatgcggggttccctgttgcctcacggtcggggagagggggcggagtctccatcctgaagggataccggcaagacaaaagactgctttccagggaggatatcgctagcctgtttaccgccctggatggattaaagagccttgtcggagatggctcggtttcggcactgctggccagactggttccggtcccagagactgacgcacgctcccgcagccgctatctgcttgactacaccccgtggtttacggacagcattacctggaaaaagctctctgagctgcaccgcgcaatttgtaaccgcatggtgtgcaaaatggattatgtgtcaaaaacagggcgccggacccggttggtagaaccccataagctggtgttcaaacagtctgactggtatttgtatgcgttctgtcgggagcgaagcgcgttccgcctgtttaagctcaggcgtatcgtctcctgcgtcccctctggggagcgcttttccacgcgccaaatggacgaaacaacatttgaacagcggtttggagggggcggcctgtctgccgtgaaaaaggacggatattaccagattgtcctggaatatgagcgccgggacgcatttaccctgacagagaaaatagatgcctgcctgttggatgcgcctggtggggggagtgacaccggccggatctgtttttatgcccccgaactttcctttgcacgggagcttgtcatggggctgctgggcaaggtcagggtggtcgcgccacctgagctccgtgaggagctcagagatgagctgaaaaagataaacgacttttacaaaaggtgacagctaagctgtcaccttttttgtgttaagctgtctacagaaaggtggtatgaagggatgaaacaaatcctggtatttatttttgatggctatgcggactgggaaccggcctatgtatgtgcgcagttaaatgcacctggaactggatatgcggtgaaaaccattgggcttgaccgggcgcccaaggtgtctatggggggcttccgtgtcacgcccgattttactgtcgctgactatccgcgggatgccggcctgctgctgctgaccggcgggacagcgtggctggagcggaaaaatgacgctgtcttgccggttgtacgggaactggtcagatgccatatcccggtggctgcaatttgcaacgcggtaaacttcctggcggaaaacggttttttagaccagcgcagacatactgggaataccctgcccttcctcaaatcccaggctccgcactataaaggggaggcatatttcgttgaggcggaggcggtttgtgacaacggcattcttaccgccaacggattcggagcgctggagctggcaaaagagatactgcggctgctgaaatttcggtcagagcaggagctagcggaatggtatgcatggaataaattcggcctgtattcgccaggacacaaggggcgtaccccaagcggactgtgatctgcccggtatcatcgggtggccggatgggcaaagcggcgggggatacgctgctttaaagagagggccgggctgaaatcagcccggccctttttacatattgggttagtcggcctcgtcctgcatcgccttggcggcctcgatggccttctcctggacggcgggaggggcgtcctcgtagcggacgaagcggaaggtgaaggaaccgcggccctgggtcatggagcgcaggtcgatggcatagcggcccatctcggccatgggcacttcggcctccacgatctggttgccctcgccgtcggggttcatgcccatgacgcggccccggcgcttgttcagatcgccgatgacgtcgcccatgtagctgtcggggatggtgaccttcagctcgccgatgggttccagcagcacagggctggcctggggcataccggtcttgtaggcgatctgcacggcggtcttgaaagccatttcggaggagtccaccgggtgataggagccgtcgtacagggtggctttcaggtacaccaccgggtagccggccagcacgccgtgaaccacggcctcccgcatgcccttctccacggcggggaagtagttcttgggcaccgcgccgcccacgacctcctcgcaaaactggagctcctcggtgtcgcccggctcaaagcgcatccacacgtcgccgaactggccgtggccgccggtctgcttcttgtggcggccctgcacctccaccttcttgcggatcttctcgcggtagggcacccggggctcggagagctcggcgtccacgccgaagcggctcttcagccgggagagaatcacgtccatctgcatgtcgccggtgccggagaccaccatctggcgggtttcggcgttgttgacccagttgaaggtcagatcctcctcgttcaggcggatgaggccggcggcgatcttgtcctcctggcccttggtcttgggggtgatagccacggagtagcagggctcggggaaggggataggctccagcttgaccaccttgcggggatcagagagggtgtcgccggtcttgaccttctccatcttgccgatggcgccgatgtcgccgcactccagctccttgacctcctcggccttcttgcccttcatcacgtacaggcggcccagcttctccgtggcgccggtgcgggaattgaccagctgcatgtcgggcttgaggttaccggagatgaccttcacgaaggagtacttgccgtactggtcggagacggtcttccacaccagggcggcgggcagggcgcctgggaagggcacgaactcgtccacctcgccgtcggcgttctcgcccatgagggggcggccctccaggggggagggcagcagctccacgatgatgtccagcagcatgcgggtgcccaggccggagacggcggagccgcacaccacagggaagagggacaggtctttcacgccctggcgcagaccctggatcatctcggcgtaggtgaagtcctcaccggagaaatacttgtccatcagctcctcgctggtctcagccaccgactccttgagggcgtcgtacagctcgtccagcacgggcttcttgtcgtcggggacgtcgatctcgatgcgctcgcccttggggccggcctcaaaggcgcgcttgtggagcacgtcgataaagccgatgaccttcttgtccgcgtcccagatgggagcggccacgggggcgatattcttgccgaagcgctcccgcagggtgtcgaaggctgcgttgtagtcggagttctcctcgtcggtcttggagatgtagagcagccggggtagcctgcgctgctcgcacagcttccacgccttctccgcgcccacgctcatgcccgccttggcggagcagacgatgatggccgcgtcggccacctggagggcctcgatcacctcgccggaaaagtcaaagtagcccggcgtgtccagcacgttgatcttacagccgttgtactccacgggagccaccgcggtggagatggaaatctgacggcgggtttcctcagggtcgtaatcgcaaacggtattcccgtcggcgggattgcccagccgcacggtgccaccggtcaaatacagcatgctctcggccagggaggtcttaccatttccaccgtggcccagcagacagacgttgcggatgttttgtacggaatagctcatacttgtttcctctccttacatttggaatcgtctgggcagggctcccgagggggacggaggactgcctgttgttcattatacattaaatcaaccggagatacaactgaaattttagaaaaatcgcgcaaaataccccgcagcagtccgcaggggggaaatttgcacgcgggagaggggaagggaatgtccgccgggggacaagcttggggccggagccgagcggggagacagactcaatgtgccgcagccgaataaaaacacgcggccggtaacaccggccgcgtgtgcaggtcaggagggttccgcagtgatgggactcccgtccagagggacggagtaaagagccccgtcctccgtctggaagcggtaggccgtcccgtcctccgaccggccaagggaggtcagaggcgtgccgggctggcccagccactccagcagcgcctggcgtgcgccctcctcggtcagggcggaggaggggggctgggtgtcctgcggggcgtcctcgggcatcagggacatgacggagggccccgcggacggggtaggctggagctcggagacaggcggcgcggagacagacggctcctgagcagatgccggtatctggccgccctccggtccatcggcgggtcgcgtcacgtcccggttctggggcctctcaccggcggagcggtcctcctggccggcaccgtcggcgctgccgccggcggcctcggtgggctccccggcggggcccgcgcggtcctcctgagccggggcggtttgtccggcggtcccgccggaggccggtccggtcaacccggcaagattggctctgggtacgctcccggagctgtccggagggctccagaggtgcacggcctgcccgcccaccagtacaagcaccagcaccgcggccagagaggcccaggagcgccaacgccactggcgctttctggtgtggaagggggtgcatttggaggcgtggaccgccttcatgatatcgtccttcagcccggcggggggctcctccgccagagtgggcagaagctggtgcagggtggagagatcggcccgaagcgcccggcacgccgggcactgggccaggtgctcgtccagcgccccggcctcctccgccgtcagcgccccgtcgagctgcgcgctgatgagctccagcgcctgttcacaggtcagcatgccgccgcctcctttccgtcccgtggatctggtttatgctttggacgagggggagccgaaaaagttcccctgttccagcaaatatttgcgcagggccagccgggcccgggcgatgcgggacttgacggtgccctcctccacccccagcagggcggcaatctccccataggagaggccctccagctcccggagaatcagcacctgccggtgctcctccgacagggcccgcaggcccgcccgcagggtgtcccgcagctcctgctgctccgcctggcggtggggactgtaccgctcgtcgggcagttcggcctgccgggcgccctcctcgtcgtccagggagaccgtcatggacagggtgctccgccgcttctcccgccgcagaaagtcgatgcacacgttgctggtcagccggtagagccaggtggagaaggagctctccccctggaatttccccaggcccttccaggcgttgagaaaggcctcctggcacagctccgccgcgtcgtcgggattgcccgtcatgcgcagggccagatggtagatgcgcccctgattctgttccaccagggcggcgaaggccccctcgtccccttgccgggcccgctgtaccagcgcctgttcctcggtcatgcctttctcacctcctcgccggcgcgtttgccggcggtcagtccctcagatcccgctgtatgcctgcggtgatgcggtcaatgtcctccaaagtggagattttgctgatctgttccttataataccccgcgtagggaacccccttgaggtaccaggcgtagtgcttccgggcctccaggcaggcgatgtgctctcccttctgagcggcggagaggcggaactgccgcaccgccgtctcgcaccgccgggccagcggcggcaggggcgggacaggccgcccctccagggcggcctgggcacgcgcaaagagccagggattgccgaagcagccccggccgagcatggccatgtcggccccggtgtatttgagaatgtgaaccgcgtcctccggctcaaagacatcgccgttggcgaggacggggatggacacggcctcctttaccgcccggatatagtcccagttggcccggccggagtacatctgcaccttggtgcggccgtggaccgccacggcggccacaccggcggcctccatggcctgggcgaactccacgcagttgatggagcccttgtcccagcccagccggaatttgacggtgacgggccgtccgcccgccccccggatgaccgcctcggccaccttcaccgccagctcggggttcctcatcaggccggagccatccccggagttggccaccttgggcaccggacagcccatattgatatccagaatgtccgcccccgacttctccgcggcgatgcccgccgcctgctccatgcaggcggggtcgctgccgaagagctgcaccgccgccgggtgctccccctcgcccagctccagcaggggaagggattttttgtcctgatagcacagggccttggcgctgaccatctccgtcacggtgtaccccgcccccagctcccggcacaccgtccggaagcccaggtcggtcactccggccatgggcgccaaagccagctttgaatttatggtgattttgcctattttcacagtgtcccccaatgtgttataaatagtaaatgtatcataccacaaaggcgggggttcggcaaggcatggattcccggccaccgggtgatactatgaattgcgatttgatcaaaaaggagactataaccatggataagtatgtctgcgatatctgcggctacgtgtacgaccccgctgagggcgatcccgacaacggcgtggcccccggcaccgcctgggagagcgtgcctgagagctgggtatgtcctctctgcggcgtcggcaaggagcacttctccaagcagtaagacagcgcaaaaaaacgcctgtaccatgtcggtacaggcgtttttttgcggaaaaacaggcttactgctcgtagcgtgtccagtcctccacaggctggaggccggtccaggtttcgtggacagtgtcggccttgcgcccgtagtcgtggctgttggtggcctcctggaccgccagatagtaccaggcccccggcgggttgtcgggccaggtgatcatgccgtccagtagatcgtccgcggtctcgggcaggcggcccagcacccggttcaccagtgtcatcgcctcggcccggctgatgctccggtcaggggcgaagctgccgtccggctggccttccacccagcccttcaccgccgcctggttgatgtactccgccgcccagtggccggagatgtcggtgaagcggtcgtcgccgtggtagggatcgctgtcaaagcgggcggcgatggcagcgaactcgccccgggtgatgggtgcgtcggggtcaaagaccgcgggggcgcggccctccacgatgcccatggcctccatggtggccacggcggtggcgtaccacgcgtcgggggccacgtcgtggaaggggctggtctcggtcaggtattccgcccgggcctcgtcggtgagcaggcggaagaagatggtggccacctcggcccgtgtgatggtggcctcggggtgaaccaggccgtcgtcccggccgatgatgtaggcgaaatggtcgtcgccgttgagccggtcgggcacgccggtcttttcccagccggcgtacacggtcttgttggcggtcatgcggatgtcgtcgatgggctcggtcagggccttatcggcgtaccagccggtgaaggtgtagccctcccggacgggctgcttgtccagctctaccagggtgttgcggcggtaccgctcactgtcgtacttcgtgccgccgttgctctcatagcgcagggtgtagtaggtggtgccgccgtgatccccgccgccgtgatccccgccgccggtgtccttttttgcccaggacagcacaaagggagagaagccgtaacggtcctgatccacaatgagctggatgccgtgctcggtcagcacgacctcctccacctgcagggagagcgttttgttgctggcggccccgcccttttcattgttgatgtttgcggccgcctgattcaccatcgcctgcacctcgccgttggttgtgtactcgcggtgcaggccggtgaagtggaacacgtcgaagtcatagctgcccgccgtctcataggtgatcccgtcggggtagggccagtagatgacgagctgccggtcagccttgacccagacgttgccgtctccggcgtccaccaggtcgaagtatttgctctcatactggcggccgttggggttgtccagaccaagcgcgtcggcgttgtcgatgacggccttttccagcatggtctggcccacctcggattccgcgccgccgtccagctcgtagctgctgagcacgtcgtcgaacaggatgcttggctgctcatcgcccaccatcgcccagttctcgtggccgttgacggtgtacttcgtgcccgcgggcgcaactacgcccgcgttggagccgccgtccgtggcggtctccgctgcggctgtgtcgccggcggccgcctccacggtgctgtgcgcactgtgaaccgcgtcgaaggtgtagggctcacccccggtggcgtcgttggtcaccgagcggacggtcagcgtgccaacgccgtaccgcagggcgtatttctggccgttcacctcggcatacaggccggtgttgcccgcaccgctggcgtcggatgtgctgatggcggcatagaggtgagtgaagtggtttccggcgatgttgtctgtactggcgggaatggtgcacgcctcatccgcaaagtagaggcaggaggcatcggcggcggtggcggggtccgccgagacgatatcccacacctttcggccgtcctcgccgatggcctgctggcccccttcgccgccgtagggcgccagcttccaggacttttccgtaccgtccgcgccggtgccgtggaaggtgacgccagccagatgctccgccgggatttcgctgctctccacgtagaaatggggggcgggaattccgctgtcggcgtcgggaaggtgggtgccgtcgacgtcctcccaatagtcggagctgccgccgatatacagggtcatatccaccggcgtaatggtaaccggcccgacctcctccagggtgatggagccgtagaaagagaattcataatttgcatatgcgttcctgatacatgggccatccagcgcccacttgccgctgtagctcagtactgagccggactcgggggccagagcctggccgtccccgcagaaatatgcgtcggtctgttcccagaggtcggttccctccatgtagtcgccgacgccccgctcatggcaggacgtgtggccggaggggggtgtgctcaggttggccatatcgtcgccgaaggcgaaggcaaacatggactgataccagccgtcataaccggcagtctgaagcccggactccggccactttagctggaaggtgtcttccggcccctttccggaggggaagtaggcccagcgcatcacttcagggtgtgtcttctctaactcagtaaattgttcagcggtgcaggagaatttcatggcattgcccttctggatatcctcaaagaaggcgggggcgaccgccatgatcgcgtcaaaagaggcgtaatccgtgctgttcttcttgttataccaggccacaaagtagtttgtcaggctgtcataaccctcttccgccagggtgtcgtagagggtgacaatctgctcaagcgaaatattgaccgagctggtgttaaacaggtctttgagcatctggttggaaaccatgctgctggtaaaacggaaggggatccactgtccgtcatagcccagcacggggagcagttcactctgttccatgccgcttgtatcggcggatgccagggtgaagctgccgggtttgtagcggtaggaattcccggactcattgtggatttcaatgtcaaactgcgccgcgttaccaggatactgcacggtatctgcaagggcgtccgccagcttgctcagctcaagaacctggtcgccctctgcaccctcctggatggtgtagaccagcttggcgggcgcgtccccggtttcttcgacaaattcacagcttaccgtgtcggactgcggcttatagtccacggtgcaggtcggctccggccagtcgatttcggcgccgcccgactgggtggcaggctctgccgcatatgcggcgggtgttgttatcagcagcgtggaaagggcgagcagcgctgacaagactcgctttttcataaaaaacgttcctccttattcaaaacaggtgcctctatataaacatccgaaaatggatgaccatttggagggggagggcgaggagctgcgcctctttcgggctttgttgggaaacctctgttttttcagcctgcgggcagaagtgtcaaaacatgcagacaaaacaaaagctattgctaaatttttagcaatagcgcttgtttttgcccttcatttgtggtatattatgtaaaaatatgaggacagacgtttgtttgaaaaggtagaggttttcaaacagagagcacctgccggactgcaaaaaacagcccccggaaccttttggttccgggggctactgtttcatccgttccggcgggcgagcttgaggaccagagcggtgcggtcgtcggcggcgcccacctgggcgccgctgtcgtcgatgagagcctgggccagctcccgggggctgccgccgtcaaaggcggccagccggtcccgcacccactggtcggatgcgctgccggccacgccgtcggtgaccagaaggacacagtctccggcctccaactggaggcgggtcacgtcgggggagaccccctccccggcggtgaggccggcggggagggccgtgccggtgatgcggctgacggagtagccctttttcacataggtgggggcggcgccgtacttgtacaccccggcctcgccagtgaacagatccacccgcagcaggtcgatggtggtgaagccgccggcggcctcgtcgttgcgcagggccagggcggagttgagggtgcgcagggcgttctccggccggacgcccgcccggagaaactgctccagcaggcggacggccagggcgctctcctgctcggccagggagccggagcccatgccgtcgcacaggagcacatagagggagccgtcgtcgtgcttgaaccaggcccctgtgtcgccggatacggtctggccgtccttctttttggcggccaccccggccacggccatcaacggctcgctctgtaccagcaccagccggtcccggcggccctcctccacggcccggagggggaagttcaccagcttggaaagcttggctgtcccctcctcggtgcggaggggggccagccccgccccctccagctccaggcggaggtgcccggcctggtcgtaataggcggccaggcggcaatcaatgccttgggcggtcaggtattgccgcaggcgcttttcccgcaccgggtcgggcaccagctccgcccccagctcggcagccgccgtgttcagcaccccggccagctcggcatattggcggcacaccgccgagcggttctcactgaggcggctctggaactgccgccggcacagcagggcggccagctcctcgttggcggcggagagaaactccgggaacttcatgcagcggttggagaagtaggcggggaagtctccgctctccccccggccccgctccagcatggcggggagggcgtcgttgagggcgttgaaggtggagacgtagtcccgctgccagcaggcggtttgcagggggcagcgcttgcagatccgcccggccgcccgatcgaagacggatgcggcgtcgttgtcattgggtgcggcggggtggaaggccgaccgcatggactcgtacaggctcttgaaggcggctgccgtggcctccatccgggcgcggacataggcgcgggcccgctcctgggtgtcgtgccggggctcccgggccaccagcgcccccacctggcgcagggcgcgctcggggaggaccagaaagaccaccgaggcgataaagacctcgtagagcagggagaggtgaaggccctccgaccaggtccacagcaccgccagggcattggagagcacataggccagggcggcggccagcctcccctgccggtggaacaccccgcacatcaccccggagagggcgaaggccatggagtagaagggcatacctcccgccgccagatccatcccaaggccgcaggccacccccaccgtggcccccacgccgatgccgcccttgtaggcggtggccatcaccgccgccgcggcggcgcagcggcccaccgacaggtcgcccagcagggtgatcttggacagggtgagcagcagggtgcccgccagaatgagcaggctcaccgtctgccgggaggtgaggccctcctcctcccgcttttccgtccagggggtgaaggcgatgcggtagaagtaggccgacgccccgcacaggagcagctcggtgccgaagaagatcaggccctctggcgaccagccccggtcagataagtacacaaagcccgtgatgccgtccatccccgccgccgccaggggcatgaaccagctcttgcggtaagccttcacgtcgaagaaggcaaaggccagggagaaggccaggatgcagccggccacgtaccgcagcccctcggcgaagccctggaaggagagatagccgaagcaggcccccagcagggcgcagaagccgtccagccccgagccggaggccgccaccagccccagcccgaagggggcgtatccgccgaaaatctccgccccggagagcatggcccccagcaggaagcggatgacgcactcggccgcccgcaccagggcgggggcgcgcagaatgaccttgccggtctcccgggcctcctcccggacacgggccgcctttgtcttgagtttctcttttgtcgccatggttccgtctccttttccaaatcaggcttgtccgccctcgttgagtgacagtataacccagtatttggaaaaatgtggtcggaacgcggcgcgccgggaaaaaggaggggaagggatgaaaccgaaggggcggtttctcagcgtgtcaaaaaagtggccacggccacttttttgagagggatgtgcgcaagatggacctcgattcctcagggaaaagtcggcccatcttgcgcgagaggtgtcatttccgaggcgcatgtccccggaaatgacggattttcatttgattcctgcggctgcggccgcaggaactctgcgaggctttcctccgggaaaggttctttgacagtctgtgaaaccgcgggggcggtttctgtgttaagatcagtgagagcgcgctcgaaaccggagcagggaggtggtatggttggaggagcgggagctgctgcgccgcctgcggcggggggacccctccgccctggaggagctgatggaccgggacatgggctttgcctgcggcctggcgggctctgttctgcggggccgccccagggacgcggaggaggtggtgtccgacgccttcctggccctgtgggagcacgccgggcaggtggaaccgggcaagctccgcccctggctgggccgggtggtgcgcaacaaggccctcaaccgcctgcgggcgctgggcggtgagctgcctctggaggaggactggctggcgctggagcccgaccggcggcccggcccggcggaggccgtggagcaggccgagcgggcggagctgatccgggcgctgctgaacggacttccgccccaggatcgggccatcttcctgcgccattactactacggccagaccgccgccgacatcggagcggccctggccatgccgccgtccacggtgaaggtgcgcctgcaccgggggcggaggaagctgaaggagctgctgatggaaagggggtattcctgtgcctgtgcggatgactgacctgctggacggctgggaggacggctcggtggagctgccgccgcccgccgggatgtccccggagcggatcaaggagagaacgatggaacaaatcagacaaaccaagcggccccgccggcgcatgggcgtccggctgctggcctgcgccgccctggcggcggtgttcaccgtatcggccatggcggcctatcacctctgggggccgggagagctgttcgaccccttcttcaccctggagagcgccccgctggacgacgggcagaaggagctgctggatcagatcggcgccaccaacctgccccccgtcaccagcaacggcgtcaccctcacccctctggccgccattgccgacgagcacaccctctacctccgcctgcggctggaggccccggagggcaccgtcctgcccgacatgggggagcaggaggatcacatcgcccacggtgtggggctggtcgacgcggacaccggggagcggctcaactggggcatgcagaaggcccggttcctcccggacgacaccccgggggacaactccctggagctggtgttcatgcttctgggcgggccaaacggggccaactgggtggacggcacctcgaagacattgaccatcaccgacctgattctctgcccccgggagccggaggatgccgagaagacgtatctggagggggagtggagcttctccctggactccttctaccagggaaaggaggtagagatcaacaccataggggccgtccgatgggatgaggagacggagcggatggtcaccctggagggactgacgcgctcccccctggcggcctcctataccatctcctacccggtggaggaaagctgggagtttgtcgatctccaactggaactggtctacaaggacgggtcctccgtgacgattgacggcggcggtgggaagggcagtcacggccccgacggacagggcggaaccgactattttaccggcgtccgcaattttgacgcgcccctggatttgcgtgagctggatcacctccagtacggcggctgctgtctggagattctcggcgaacccagagcggtggtggaagcggacaccgccggggcggtgtggtacgatgagacgcaccagaacacactggtgctggaaaagctgtccttctcctccctcagcctcacctaccgcatgcactatgacaccccggagagcgccaccctggccgacaccgggatccgcctggtgctggccgacgggacggaaatccctgtggatggcggcagcggcacggcgggcgggacctttatggagggcaccacctactttgacgcgcccgtccccctggaacgggtggatcacgttctgtttggcgatatccgggttgagctggaataagtatggaaaaaagtgccccctgcaccgcagaggggcacttttttgcaaaaaatgggcaggaggatggacaagggtaaagaaaagtgatacgatgagtttggaaaacgaaatagacaggaggctgtacccatgaaacggagacttgccctgtccctggcggcccttttgctgttgggctgccttaccccggcgctggcggcggagggggacgccgaactcagcctgtaccagcagtatggcccctggggcgagtggccccaggagcagaaggacgcggcggaggagacctggacggacggccagtgggacaactactggacggagtacgacgcccagatgtgggcggcgctgaaccggtacaacgaggactacgatcggtggagctatgcccgtttcggggacccctgggacgagtacctccgggtggagaaggaggaaatgggaatgccctaccccgacggcatcaatgtgagcctgaacggggcgtatctggacttcggcggcacggcccccctggccgcgtcggggtgcaccatggtgcccttccgggcctttctggaggggctgggggcggaggttgcctttgacgggagccgcatcgcggcggcgctggagaacggcgacagcctggagctggtcctgggggccactgagctgaccgtcacccagggcgggcggatcaccaccttggacatgggggcggccccctttgtacgggatgggcacacctacatccccgtccgggctgcggcggaggcactggggctggacgtatactgggacgatacctatgaggcggcccatctgaccgactacgccgccctgacggcggagctggacagccggtttaccgccgccaacgggatttgggctgcgatacgggataccattccccgcgaggcgggcaagggctatgagtccacagcatccatgcgcctctccgccaccctgtacggggaggaggagcacgacaccgcctcgctgacgatggaagtgaaacagctcacccgggacggcagctaccgcatggagcaggagcagcaggtggatctgggcggtctgggggacaccctctttgcgggtctctccccggaggagctggcccagctcgaaaaccacagcgtcaccctctacgaccgggagagcggcaccctctaccaaaagggcgtacagctctatagcctggagggagagccgttacctgatgacgtttgggtgagtactcaggtgggggagctgcctgccgtgaacaccctgtcgctccccgggacgctgggcgagctgctggtggaggcgtacggccatagctggtattactaccgctccagcccctgggagacggtgatggactccgccctgcccgtccgcctgctcctggacgacggcaacttcacccgcagcgcctccggtggacggaccaactatcgctgggcggtggatctgcccgccctgctggagcgggcccgtatgctgggtgttatggaggacgcgcccgctgtggaggggctgcctgctctggacatgcatggggaggcggtcctgcggggcggtgcgctggagaagctggacggcagcggacagatggagctggatgtgctgggcatcccagccgacgccggctttaccctggatgccgctccggggcgtctggagctggagatggagttcactggggcttacatcgggaaggtggagctaagcctgaacgggagggtcacggaaaccgctgcgcagcccgtcaccacgcctccggcgggggagacggtagagcgcctcgaggtgctctccggccaggtggagccgggcgtgcccgccgatttcggcgcggcccgctatgtccagtgcctgctggatgcccgactggggcgtgggtatgacccggagtttctgaccgcccttggggagacggaggagagcctgtccgcccaaattgcggaggagaacgtacaggcgctctgcaacctgctgataattgaattccccaccgaggagatccgcggagaggcggccggcctgctggaggagctgtacgccaaggcggactataccgtgggggccgccgtcccgacgggaaacggctccgaggtggagataacggtgcggcccgtggatgcgctggcgcgggtaaacgatgcactctgggagcggctggacgcgttcaatgcgggctacaccggggatacgtccacagacgagggatatgcggcctatgacgcggcctgggcggaggatgcgctggccctcttccgggagaagctggccgaggcggagtatctgtccgagacggtctgcaccgtgaccgttctggacgggccgggcggcaccattgaggccggccgcgactccctggatacagtatacggcgcgctgttcccaatttggatgctccaggagacatgaacggaacaaaaagggggcggcgaaccgcgtatgcggttcgccgcccctgtgtgtctggcctatagctggtcgctgtctaccagaatgttgtcagtgccgtgctgctcgaactcggcaatataggcgtcaatgcggctggacagctcctcatagttgttctggtcgatggaggcgtcctccatatcccggcgggccagatcctcggccaggatatcgaagaacacgttgttctcatattccatgatcgcctcgtggatgccgccctcggcaaaggcgcgggagggcaccacctcgccctgccagtcctcggccagcacgcccatgccctcctcccgggccttggcaaagagcaggctctccacgtcgtcgtaatccttgaaccggtcgtcgccgcgggtggagttcaaaatccagttgccgatataggccatatccagcaggcgccggaattgtttggtcgtcagttccagcttcatcacacgaaacctcctcgctgtcatgacgttgcggggcgtgaacggccatcccctacctcatattatagtcagccccgccaaaatgtcaaacggggagagcgtcggaaaacatgaaaacgccccttgtcttccggtaaattttcgcatatcattatacagataacaaatttgcgctctttttattaggaggaatcgccttggatgacagacccatcggcgtgttcgactccggcctgggcgggctgaccacggtacgggagctgtgccgcctgctgccggaggaggatatcgtctatttcggggacaccggacgggtaccttacggcagccgctcccgggagaccattgtgaaatacgcgcggcaggacgtggccttcctgcgcaccttcgatctcaagactatcgtcatcgcctgcggcaccgtgtccaccaccgcgctggacgtgctggcggcggagaaccccatcccggttctgggagtggtggccccagcggcccgcgccgcggcccgggccacccgaagcgggagcatcggcctcatcggcacccaggcgtccatccgcagcggcgcctacgagcggctcatccgggcggagaacccggcggcccgggtgctggcccagccctgccccctctttgtacccctggtggagaacggccgcttccgccccggcgacgtggtcatcgagacggtggcggcggagtacctggccccgctgaaggaggcgggggtggacaccctggtgttgggctgcactcactaccccctgctggagaaggtcatcggggcctatatggggccggaggtgcgcctcatcaactccggcgccgagggcgcccgggcggcggcggactgcctgcgggagcgggacgccctggccgggcccgggcgggggagctgccgctgctttgtcagcgaccggcaggaggacttctcccgcctggcctccactttcctgggctgggatgtagcccaggcggtggagcaggtggatatcagccaatattgaggggaaagccctttacatctgaggctccattgggtataataatgtgcaatttgcagtttgaacgtgggacaaggaaggaacaaccatggagaacaacgtgattatttccatccagggaaagcagtcctttgaggcacagggcgatgacaccatcgagctggtcacggagggctgcctggagcccgacggggacgacggctacaccctgagctatcaggagagcgagctcaccggcctggagggcaccctgaccaccttccagatcgagcgggaccgggtcacgctcctgcgggtgggggaggtcaactcccagatggtctttgaggagggccgccggcacctgtccatgtacgacaccccctacggcgccctgtccgtaggcatcaacacccgcaagatgcgggccgagctggacgccaggggcggcagcatcgagatcgactacgccatcgaaatcgaccacgcgctggcgggccagaacctgttccgcatccacgtgcgggagaaggggccggccatcaagcagtgactatcccgcgcggcgatttcgatgagcgcgccagttggcgcgtacaaagatttcgccttgaggcgaaaccttgatgccgcggcaatttacttgccgcgagcagataaaaccggcaggggcccccgcggcacctgtgccgtggggcaatcgaccacgcgctggcgggccagaacctgttccgcatccacgtgcgggagaaagggccggccatcaagcagtgactatcccgcgcggcggccggctgcgcggcacacagagagatgaatcgaaaaggagatagaaccatgtccaacatgatccaggcggcccgggagcaggtcgccgctctgacccaggcggcctatgagaaggccgcggcggagggcctgctgcccgccggcgcggaggtcaaggccaccatcgagattcccaaggatgtcacccacggggattacgcctcctccttcgccatggccggggccaaggccctgcgcaaggccccccgccagatcgccgaggtgatcgtcagccatctggatctggccggcaccttttttgacaaggtggagatcgccggccccggcttcctgaactttaccctgggcagcaagtggtacggcggcgtgctcgctgacatccaggccgagggggagacctatggcgcggtggatgagggccgcggcgagaaggtgatggtggagttcgtctccgccaaccccaccggccccatgcacatcggcaacgcccggggcggcgtgctgggcgacgccctggccgccgtgctggagcgggcgggctacgacgtgtggcgggagttttacgtcaacgacgcgggcaaccagatccacaagttcgccatgagcatcgacgcccgctatctccagttggtgctgggggaggagaacgtccccttccccgaggacggctaccacggcgacgacatcaaggagctggcccggggcttctacgaccagcacggcgccggctggaaggacaagagcgaggaggagcggcaggcggccatggccgagtacggcctgtccgtcaacatccccaagatgaaggaggatctccgccgctacaagatcgagtacgacgagtggttcctggagtcatccctccacgacagcggctatgtggccgagactgtggagctgctggccggcaagggctggacctatgagaaggacggggccctgtggctcaacaccaccgccctgctcaagcagaagttcctggccgagggcaagagccaggagcaggtggacaagctcgacctgaaggacgatgtgctccgccgggccaacggcttctacacctacttcgccgccgacatcgcctaccaccgcaacaagctggagcagcggggcttctccaaggccatcaacatctggggcgccgaccaccacggccacgtggcccgcctccaggccgccctggacggcctgggcctggacggctcccaccggctgatcatcgtgctgatgcagctggtcaatctcctccaggacggccagcccgtccgcatgtccaagcgctccggcaaggccatcgccctgcgggatctgctggacgaggtgagcgtggacgccgcccgcttcttcttcaactcccgctcctccacctccgccctggacttcgatctggatctggcggtgcgggaggacagcgagaacccggtctactatgtccagtacgctcacgcccgcatctgctccctcattgcccggctggccgaggagggacacctcgtgcccgacgcggcggcggtggatcccgccctctacgccacggcggaggagaaggcccttatcaaaaccctgtcccaactgcccgaggtcatccgcctggccgcccgggattacgatccctccggcgtcaaccgctatctggtgaccctggccggggagtttcaccgcttctacaatgcctgccgtatcaagggtgaggaggcggcggtgctcgccgcccgcctcaagctggccgacacggtgcgcgccgtcatcgccaactgcctggccctcatcggcgtggcggccccggagaaaatgtaacaatcgcaaatgcgcggcgccgggggccacctggcgccgcgcggctgcggcgggctggggaatcctgtcagtacagcatggcggttccttacatttgtataaaagaaataaaaactttttcttaataatctgttaattggtatgtaacactcttgtaatctttttgaaacgtggtatgataggcactacgcgcagacggggcgtctcccgcagcgcgtgctccatccgcccaaactatggaggattacaagaatgactatgttggaacttgtcaagcatctcaattttgctgtggtggttctgtttaccctgctctacctgtaccagggcttctatgtagtggtggggctggttcgccgccgctggcaggaccggcaccagccaagccgcctgcaccgcttcgccgtgatcgtatccgcccgcaacgaggagggggtcatcggggaactgctggagagtctgaaccggcagaattatccaaaggagctgctggatctctatgtggtggccgacaactgcaccgacggcaccgccggggcggcccgccgggccggcgcgttcgtgtacgagcgcttcgaccaggtacataagggcaagggctacgccatggactacctcttccgccgactcaaagaggaggggaaggactgctatgacggctacttcgtctttgacgcggacaatctggtggacgccaattttgtcgccgagatgaaccgcaccttcgaccagggctacgacgcggtgacctgctaccgcaactccaagaacttcgcggccaactggatctccgccggctactccatctggttcctgcgggaggcccggttcctcaacttcccccgcaccctgctgggcaccaactgccacgtgtcgggcaccggcttcctggtgtccgcccgggtcatcgaggacaacggcggctggcccttccacctgctcaccgaggatatccagttctccgtggactgcgccatccagggcaagaggatcggctactgcgacaaggcggtggtctacgacgagcagcccaccaccttccgtcagtcctgggatcagcggctgcggtggtctaagggcttctaccaggtggaccgggagtacaccctccccctgctgaagggctgcttccgccggggccgcctgggtacctcctgctacgacatgtttgtcaccgtggcgcccggcatgctgctcaccctgctgatgatcctctttaacggcgtgatcctggccgcctgcctcacccagccggcctatctggccacccgcatcatccatgagaccgtgggcttcatgggctccgccgtgtggaatttctatgtgggcctgctgttctacgggctgatcacggtgctgtccgagtggcgtcacatcgacgccgcgccggtgcagaagctggggtatgtcctcaccttcccgatctttatgtttacctacattcccatttccattgctgcactggtgcagaaggtggagtggaagcccatctaccacaccgccacgaaaaaaatcaacgagctgggataaacaaagaggggccgcggatactcccggcccccctttgtttttgtctatatgaggctgtacttgcattcccatatcgttttgtgatatactatctcccaatcatgcatccatgcaattttaggaggaataaaacaattatggacaccatcccccccttatccctgcccatcctgctggacggagccaccggctccgagctgtataagcggggcatgcccgccggcgcgtgcacggagcagtgggtgctcggccacccggaggccctgctggagctccagaggggttatgtggcggcgggcagccaggtgctgatcgcccccaccttcggggccaaccgggtgcggctggagcagcacggtatcttcgggcaggtggcggactacaaccgccggctggtggagctgtcccggcaggctgccggcggccgcgctctggtggcgggggacatggcccccacggggctgttcatcgcccccttcggggagagcagctttgaggagctggtggccatctataccgagcaggcggctgccctggcggcggcgggggtggacctcttcctcattgagaccaccatgaccatgcccgaggcccgggcggcggtactggcctgcaagagcgtgtcggatcggccggtgtgggtcacctttacctgcgacgagaacggccgcaccctctcgggcaccgacgtgctggccgccctgatcgtcatgcagggcatgggagtggacgccttcgggctgaactgctcctccggcccggcggagatgctggagcagatgcgccgccttaccccctacaccaccgtcccgctcattgccaagccaaacgcgggcctgcccgagacggtggaggggcaggcggtgtaccactgcccgccggagaagttcgcctcctacgccgccggcttcgcggcggcaggcgttcgtatctttggcggctgctgcggcactacggcggagcatgtggccgccctgtgcgccgcggtggaggcggtggatttctccgccttcgtcccgcccaggcgggatcctgatgtgatcccctgcgccagtgagaaggaggcccggttcattacgcccgacatcgatgtgggggagaccatcgagtgcacctccgatctgctggaggatattctggaggcggaggagaacgccccccagggcgcgctgaagatcgccatttacgacgaggacgacctctacacctttgccgagaaccaatacgcggtgaaggatgcgctgtgcctctggaccgacgtgcccgagctgctggagcaggccctgcggctctaccagggccgggccttctgggacggcaccggggagctggaggcggccttcctccaggagatggcccggaaatacggcctggtgctgctgtaaatcccgtcaagtcccctgttccaaaatcagcgaaaccgccaaaaagcacgccctgtttttggggcgcgctttttgttttgtgccttgacgggctaaccaagatacggtatcataggagacatcaagaacataagaacacaagatgtagtgccaagcctggacggggtgtctttccctgtgttggcttttttcatgaaggaagaagggggcggacagccatgacactgacaaagatccgcaagcgggacggccgcctggccgagttcaacgaggagaagatcgcccgcgccattgagaaggcgttcaacgccacctacaagcccggacggggggaggaggccagaaagctggccgacgaggtgctctccatcctggaggtggaggggcaggcccagcccgatgtggagcacattcaggatctggtggagcgggtgctcatggacaacggctatgtgcagaccgccaagtcctacatcctctaccgggaggagcgcagccgcgcccgggagatgaagacccggctgatgaagacctatgaggacatcaccttctccaaggccaaggactccgacatcaagcgggagaacgccaacatcgacggggatacggccatggggagcatgctcaagttcggctccgagggggccaagcagttctacgacatgtttgtgctcaaccccgaccacgcccgggcacaccgggagggggacatccacatccatgacctggacttcctcaccctcaccaccacctgctgccagatcgacatccaaaagctgttcgaggggggcttctccaccggccacggcaccctgcgggagcccaacgacatcgcctcctacgccgccctgtgctgcatcgccatccagtccaaccagaacgaccagcacggcggccagagcgtggtcaacttcgactacggcatggccgacggcgtgcgcaagaccttcgcgcgggtgtaccgccagaacctggcccgggccctcatgctgctggagggccgggaggacccggagagggagctgagggcctttatggcgcagctcaaggccgacaccgggctggcgcccaccctggaggactggggggattacgccgccgccgagcgggcggccctggtccccgccttcggcacggcggagcaggtggagcgggcccaggccttcgcccaccagcgggcggtgaaggagaccgaccgggccacctaccaggccatggaggccctgatccacaacctgaacactatgcactcccgggccggggcccagacccccttctcctccatcaactacggcatggacacctcccccgaggggcgcatggtgatgaagaacgtcatgctggccaccgaggccggcctgggcgggggagagacccccatcttccccatccagatctttcgggtcaaggagggggtcaactacaaccccggcgagccgaattacgacctgttccagcttgccgtgcggtgctctgccaagcggctgttccccaatttttccttcctcgacgcgcccttcaacctgcagtactacaggcccggccacccggagaccgaaatcgcctatatgggctgccgtacccgggtcatcggcaacgtgtacgatcccagccgggagatctgcaacggccggggcaacctgtccttcaccaccatcaacctgccccggctggccatcaaggccaggggggatctggacgttttcttcgaggggctggaccggatgctggatctctgcgtggagcaactgctggagcgctttgagatccagtgccgcaagcacgtatacaactaccccttcctcatgggccagggggtgtggctggacagcgacaagctggactgggacgacgaggtgcgggaggtgctcaggcacggcaccctcaccgtgggcttcatcggcctggccgagaccctcaaggcccttgtcggggtccaccacggggagagcgagaaggcccaggtgctgggcctggagatcatctcccacatgcgggcccgcatggacgaggaggccgccaaacggggcctcaacttctccctcatcgccacccccgccgaggggctgtccggccggttcgtcaagctggaccgggcccgttacggctccatcgaggggatcaccgaccgggagtactacaccaactccttccacgtgccggtgtactaccccatctccgcctacgataaaatccggattgaggccccctaccacgccctcaccaacgccggccacatcagctatatcgagatggacggcgatcccaccgacaatctggaggccttcgagaaggtcatccgctgcatgaaggagagcggcatcggctacggcagcgtcaaccacccagtggatcgtgacccggtgtgcggcttctccggcatcatcggcgaccagtgccccggctgcggccgcaccgaagccgacggcgtgccctttgagcgcatccgccgcatcaccggctatctggtgggaaccctggaccgcttcaacaacggcaagcgggcggaggagcgcgaccgggtaaagcattcggtgtaatggggacggggacaagcctagggcttgtttgaaaaatatcaacatgcccaatcgacgggtcttttgtcccctggacggcgcaatttttccttgaaatccgtcaggattcccgcgaaaaaattgcttgccagcggccccaaatccctcgccgctgggcacatcgccaatgttcaaacaagccctagcgctgcctcgtaggggccgatgcccacatcggcctgctcaaccagtcttgtagaggagagataccatgtcagacacgcccgccatccgtctcaagcggggagagggccgcgccttcaaggccggcggcccctggatttacgacaacgagattgcagagattctgggcgaacccgccgacggcggcatcgtccgcatcgaggactacaacggctaccccctgggggtgggcttcctcaaccgggcttccaccatcgcggtgcgcgtcctgtcccgggacgccggggccgtcatcgaccgggatttcctggagcggcgggtgcgcgccgcctggcagtaccgcaaggatacggtggacacctcctcctgccgggtgatcttcggggaggccgatttcctccccggcctggtggtggacaagtttgccgacgtgctggtggtagagtccctggccctgggcatcgaccggctgaaatccaccattctgtctctgctggtggatcttttgaaggaggacggcatcttcgtccggggcatctacgagcgcagcgacgccaaggtgcgcctcaaggagggcatggagcgggtgaagggcttcttgtccgaccccttcgatccggtggtggagattgtggagaacggcgtccgctatcaggtggacgtggccgaggggcagaagaccggctttttcctggatcagaagtacaaccggctggccatccagcccctggcccgcggcggccgggtgctggactgcttcacccacaccggggccttcgccctcaacgctgccaagggcggcgcggcggaggtgctgggggtggacgcctcggagctgggggtggcccaggccacgcagaatgccgccctcaacggcatgtccgaccgggtacgctttgcctgccgcgacgtgttcgagctgctgccggagctggagcggaagggcgagaaatttgacctggtgatcctggacccgcccgccttcaccaagtcccgcgcctcagtgaagaaggcggtcaccggctaccgggagatcaacctgcggggcattaagctggtgaaaaacggcggctatctggccacctgctcctgctcccacttcatgacgccggagctgttcaccaagaccatcggggaggccgcccgggacgcccgccgccgcctgcggcaggtggagtaccgcacccagtcccccgaccatccggtgctgtggggggccgaccagtccctctacctgaagttctatatcttccaggtggtggacgacgcataaagcgaacagggccgccgcatccgcggcggccctgctgtttgagggaggaagcgccatgcgcatcgccaataccgtatccgactccatcgtggacggccccggcctgcggttcaccgtcttcacccagggctgtccccaccgctgccctggatgccacaacccgggcacccacgatccagccggggggcgggaggtctcggtggcggagctggcggcggagctgtccggcaatccgctgaccgacggcctcaccctctccggcggggagcccttctgccaggcggcggagtgtgccgccctggcccgcatcgcccgggaaaggggcttgaacgtgtgggcctatacggggtatacttataagagactgctcgccggagaggtgccggacgcgctggccctgctggagcaggtggacgtgctggtggacgggccctttgtggaggcggagaagtcctacgccgccctgttccgggggagcgccaaccagcggctgatcgacgtgcccaagtccctggccgccggggcggtggtgctgtgggagcggcccgaccccctggcccacttcacccggccggagtcgtgagtccgggcggccacaagggccgcccctacagacgcggatgaccgcacaggcccgggcgtaggggcggggcttgtccccgcccgccatctggaggcatggctgtgtggccgacttggagacacgcgggccgcctgacacgctgtttcccccgaagcggcacaaatccgcggcggccgggcggccacaagggccgcccctacagacacggatggccgcacaggcccgggcgtaggggcggggcttgtccccgcccgccccgcaccggcgtgtggacggcggggggatgcgagtgccggtccctgcggtgtgcgtgtaggggcggatgcctacatccgcccgtgtgcagccagccccgcgccggtgcgcaggcccagcagaaaggcgtgggcggcggcaaaggcccgaattgcctcgatatcagtccatagatccggcgtacattcgtttttgaccagatcgtgatggtactcgtccgccgcgtccatgggcatggcgtctatatacgactggatatactgggtatacaaaaattgtacaaagtccgtcatttcaccacctccaatgtcgtgtttattatacaccactttaaaagttgtgtcaaggaggatttgcacatatggagaagattatggagacgtttggcaaacgtctgaaggaactgcgaacccagaagcacaagacccaggtggaaatggcagaactgctggagtgtacagaccgtcactatcagagaatggagtatggctatgtaaacgtaccctccctcacactgcttgctttggcggactattttcacgtgacgaccgattacttgctgggacgggaggataccgatgaccatcattgacaaggagacctggccccgccgggcccattacgactttttcacccccatgtccgaccccttctacaccctgacgttcccggtggacgtgacacccctgcgggcctggtgcagggccaatgccatgcccttttacccggccatggtgttcggcgtcaccaaggccatggaggcggtggacgccttccactacaaggatcgggacggggtgatcgtccgccacgacacccttgtgcccagcttcaccgacctgaagccgggcagcgagctgttccagattgtcaccgtggaggcgggggaggacgcggcggacttctgccgccgggccaaggcccaggcggcggcccagaccgagttcatcacctccggcccctgggacggggatcagctcgtctacttcacctgcctgccctggttccccctcacagccctgaaaaacgagaaggatgtgaatccctccgactcggtaccccgggcggcctggggccgctgggaggaggaggggagccgcacccgcctgctgcttagcctggagctgaaccaccgcctgctggacggcgtccatgtgggccggttttatgaggcgctgaaccgctggatggaggggctatgaccgcggaggagtttcgggcccgctggacgggacatgtgcccaaggtgcaggacgtgacgggggagtacgccgtgctggtgcccctggtggagcggccggagggcctgtgcctgctctacgaggtgcgggccgacaccctgggccgccagccgggggaggtgtgctttcccggcgggcggctggagccgggggaggacgcggtctcctgcgccctgcgggagacgtgggaggagctgggcatcccccggccggcggtggaggtggtggccgagctggactggctgacccaccaagggggctttgtgctctatcccgtcctggggatcgtggcgccggaggcggcggagcggctccgccccggccccgccgaggtgaaggagaccttcttcgtgccggtggactggctgcgggcccatccgccggaggtgtatgcctacccgctggagccccgggtgggggaggacttcccctatgaccgcatcggctttccccagggctaccgctggcggggcggccgggtggaggtgcccatctacgcctgggagggacgggccatctggggtctgaccggccgcatcacccgccgcctgctggagggtatgccatgagagcgccggagcggctggggccctatgtgtaccgccagtcggacacctgcttccccctggggggcgacagcctggccctggccgcctttgcctcggtgcggcggggggaccgggtgtgcgatctgggctgcggggcgggggcgctgctcctgctgttggccgcccgggtttccccactggccctctccggtgtggaatactgcccggaggacgccgccctggcccgccagaacctggcggaaaacggcctggagggggcgatttacaccggagatctccgcgccgtgtgcaaaaccctccccgccgggggcttctccctggcggtctccaacccgccctacttcaaggcgggaagcggcggctgcggcgggcccgcccggatggagggggactgcgccctggaggactggtgcgccgccgccgggcggctgctgaaaaacgggggacgcttcgccctcgttcaccggccggagcgtttgtgcgatctctttgccgccctccgctccgccgggctggagcccaagcggctccggctgctccagcacgggccggattgcccgccctccgccgtcctgctggaggcggtgcggcagggccggccggggctggagattctgcccacactactgtcaaaccggaggtaatatacatggccggaacgctgtatctggtacccacccccatcggcaacctgggggacatctcccggcgcatcgcggacaccctgggggaggtggattttattgccgcggaggatacccgggtgaccctcaagctgctcaaccacctggggctgaaaaagcccatgctctcctattaccgccacaacaccggggcggggggcgaggcggtgctcagccgcctgctggccggggagagctgcgccctggtcaccgacgcgggcaccccggcggtgtccgaccccggcgaggagctggtggccctctgcgcccagaatggggtggatgtggtggccatccctggtccctgcgccctggtcaccgccctggcggtgtccggcctgcccaccggccggttcaccttcgagggcttcctggccatgaacaagaagaaccgccgcacccacctggaggaactgaagggggagcggcgcaccatgattttctatgaggcgccccacaagctctgtgccaccctggacgatctggcggaggcctttgggccgggccggcgcatctctctgtgccgggagctgaccaagctccacgaggaggtgcggcgcaccacccttggggaggctgcggagtggtacggggccaacccgccccgtggagagttcgtgctggtggtagagggcgcggccgggacggcggcggaggcccccaccctggccggcgggctggcccgggtggaggcgctgcgggccgagggcctctccctgcgggacgcagtgcggcaggcggcgcgggaaacaggcctggctaaaaatgaactttacgaccgtgccgtggggaaaaccggcggctgcgaataaaactgtgcggaaaaaaggacatccttatttagaagtatttggaatcgaaaatattactattagtattattggaaaaccgcgaaacacctgcggtttcgatcgaaaaaagggacaaaaagagaagaaaacaccttgctttttcagaaaaagcaaggtgtttttacaatatgaaacgaaaaattattttaactgaagctctcgaatgcagttgggacagacgttctttcccttgaagttgattacatcttttgcgtcatcgcagaaaatgcaggcgggttgatactttttcagtacaattgaagccccatctacgtaaatttccagcgaatccttttctgcaatgtccaacgtacggcggagctcgatggggagcacgattcgccccagttcatccaccttgcgcacaatgcccgtcgatttcataagagttacttcctttccctacgaatttccacatatttccgtcattatctataaactgacattattataacatatcgtattggattgtcaatcgaaatctggaaatctttacgagggaaagcggggtttttcgacgggcggtggaaaagcagtttacaacagcccggatcgcaggcatgtttcctgcggacagcccgtataaatgggggaagacggggaggtgtccggtatggcaatgacagtgatctggaccgggatggtggtggtctctatcctgtgcggtctggcgacaggaaacggaccggcggtggcggctgcggccatggagggggcggccgcggcggtggagctgtgcctgtccatggcgggggtgctctgcctgtggatgggggtgatggaggtgatgcgccgctccggcctgtcggatgggctgtcccggctgctccggccggtgctgcggcggctttacccggagtttgcgcgggaccgggaggtgatggacaccatctcggccaacgtgtcggccaacctgctggggctgggcaatgcggccactcccctgggcatccaggccgcccggcagatgagccgccgcactcccggacgggcctcagacgctttgtgtatgctggtggtgtgcaatacggcgtccatccagctcattcccaccacggtggcctcggtgcgcctggccgcggggtgcgccgccccctttgatatcctgcccgcggtgtggctggcctcggtcatttcggtgtgcgccggcatcggggcggtcaagctcttcggccgggtgtggagggggtaggcatggagttgttcttcaccatgctggtgcctctgatcattgccgcggtggccttgtacggtatggcgcggcgggtggatgtgtatgacgccctggttcagggggccggggaggggctgggggtgctcctgcgcattgtgccgcccctggtgggcctgctcacggcggtgtatatgctccgcgcctccggggcgctggagctggcggcccaggcgctggccccggtgctcaccgccctgggcatcccgccggagaccgtggcactcctgctggtgcggccggtcagcggctcggcagcactgggggtgggggcggagctcatcgccacctacggccccgactccctgatcggccgaacggcggcagtgatgctgggttccaccgagactaccttctacaccatcgcggtctacttcggcgcggcgggcatcgtcaagacccgctatgccgtcccggcagccctctgcgccgacctggcgggctttatggctgctgcctgggcagtgcgggtgatcttctattagcgggcgccggccatgcacaaacgcaaatagcgcggaaagccgcccccgcctggtgtgcaggcgggggcggcttttgttcaaagggtgaaatcctcgtccttcagcttgctgaagtcgggtgccaccggcggcggcggcacccgcttgagggggtcgtacttgaaggagcggcagctcccgccgggggcgactacaccctgtttggtacagaggattttctcctcgtccagtggggtgccccgctgacagtaggtgcacctgggctcgatattcttctgaaacagcatggagctccctccctctctcataacgtctcattataacacgctccgatgcctcttgccaaggctttttcgcgctgcggcggccgccacaaagaggaaaaagaggaagagcacccaggcgcagaccagagagataaccagtgtgcggtggaaatccatgcccgcaatgccagccacctggtcggccaggtaatcggagaccggcgcctccagcggaaagaggcggaccaggacggcgatgaacagggcggacaggccgccgtggagcagcttgcctaccagataggtgcccacggacaggccgctgcccccgatgaaggagagcacctgacagtggacggagatgccggcccaccccagcatgaaggcggccagaataagcttgccgctgagggtgccgtcgccggagagagtccacacaccggaggagatctccagcgctccggtaagcagacgttgggcccactccggggtgaggccgaagggggcgagcaccgtccccagcacctgggccagcccgggcaggaagccggagcggataaggagctgaatcaccacggtgaaaaagaccacaaaggcgcagatgttcagcgtggacagaaaggagtttttgatggagccggtaaaggctgttgtgaagcgctgggcgtggaactggggccgggactgccgctcctcccgccgggcggttgggccggccttgtaaaaacggaagagaatgccgatgcagatggaggcggccgcgtgggccagatagagcagcactcccacccggctactggcgaacaccccagcccccaccacgcccagaatgaaggcgggaccagagttgttgcagaaggccagcaggcgctcggcctccgtcttggtgcacatgccgttctcgtagaggctgatggccgtcttggctcccaccgggtagccgccgatgaagcccagggcgaaagcggaggcgcaggccccgctgacgtggaacagggggcgcatcagtccctccagcagacgtcccaggtatcccgccaaccccagttccaccaccagggaggagagcacgaagaaggggaacagggagggaattatgacgttgtagcacagggccaggccgcttttggccgcctccatagagggctggggatagagcatcagggccagggtggcgcacagcagggccagacccaggagcaggtcgcgcaccctctctttggacaacagcctggacataggcttcacctccgtcctaaatgggtatgcgccggaggggaaaaggttgcctgtccggagaaatttgacagggcgggaaaggcgtgctatgctgaggtatccaagtcaacgccagagatcagaaagggagggatgccgatgggcatacagtattggaagcaggacgggatcccggtggcggagctgaccgggccggagaagcgcattgtggatgcgccgtcggccctggagctggccatgacggcgcgccatgaggccggggcctccgccctgctggtggacaaggcggcggtggccgaggactttttcatcctcagcaccggcctggcgggggagattttggagaaattcatccagtaccggatcaaaatggccgtctacggagacttttcctgctataccagcaagcctctgcgggattttatctatgagtccaaccacgggagcgactttttctttgtccccgagcgggaagaggcgcttcggctgctgctgcggacggctggaagggagtgaggaaggatgaccgaggaggaacgtatcttccggggggagttgtttgcctcagaggagccggagctggtggagaagaagcggagagcccaccggctcagccagaagtataatgagacgtttgaggacgatgcagaggtgcgggaggcgattctccgggagctgctgggggagctgggggaaggcgtgtgtatgctggggccggtgcgctttcactacggctgccacacccgggtgggaaaccattgcttcatgaacttcaacttcaccgttcaggacgatgcgccggtgatcatcggcgaccactgcaatttcggacccaacgtgacgatcgtgacgcccatgcaccccatgctgcccgacgagcgccgggggatggtgtgcgacgatggggtggagcggtttttgtgctatgccaagcccgtgaccatcggacacgactgctggttcggggcaaacgtggtggtctgccccggcgtgaccatcggggagaactgcgtcatcggagcggggagcgtggtgacccgggacatccctgcgggctcctttgccgccggcaatccggcccgggtcctccgcccaattacggcggaggacaccgtccgcggccgcttctccggcatccggggggaataaaaaccgagggcctggataactcgtccaggccctcgcagtctatcgaaaaagtcttttcgacagactgctgaactttttgaaccccaaaagggttcaaaaagttggttgatccaacgcgaaagggaaccctgacggttcatctccgcaccaagtaccgccgcaagcggcggttgtgctccgaatcgccctgcggggcagcctttcacacgatccttccctccgaatcctccaataggagggtttatagacagcctcagaggcccgaccaacgcgtccaggccctccggctatttggtctgaaaaatctcccggaacagggtgtagtcctgctccagcttgggcaataatgggtaagagccccggtggagcacccagtccacgaccacgccccggaagtggcggaaaaagaagtccgccgtccactccaccgaccagccgggcagaagggaaccctcctcctctgcctggcgcaggcagtccagcatggcgcgcagggtatagcgggtgggatccatggaggaggcgtcgtcgggagcatccagccgccgctggtaatagcgggccaccagctcccagccctgggcctcaatgaaggaggcgtaggtggagagaatcagccaaagccgctggggcggggcgtcagtctcgtggccggacagggcctcctccatgtaccggtctaggggggaaaagccacgggagagcagatcctccttggaacggaagtggtggtaaaaggcgccggtggtaatgccagcccgctggcagatatcccggacggaaaccttgtcaaagctgttttcacgggccagctccatggcggcctggagaatggcctgctcggtctgctgcgcctgctccttccgacgctggcggtagtccatggattgtccctccttccccttgacacggctggtattcagccgctataatagtgacataacgatgttatgcgggttttgccactctgattatagaataggatgattgccttgtcaaatccggaaaagattgcgctgctcaccgactccacggcggacctgcccgccccgatgcgggagggtaagcccatctatgtggtgccgctgaaaatccgctgcgaggacggcgagtactccgacggggtagacatcaccgccgagggggtatatgagcggctccaccggggagagttgccccgcacctcgctgcccgagggcggcgtggtcagcgacacgctggatcaaatccgtgccgacgggtacgagagggtgatcgccgtcatgctctcctccggcctgtccggcacctacaacatggtgcgcctccaggccgagcagcgggacgatctggagatcgccgtctttgactccaggagcggttccctgggcatcggcatcatggtgcttcagctctgggaggagatcctgtccgggtcctcctgggataccctggtgcgcgagcgggcgccccatctggtggcaaacaccttccctttcttctcggtggacaccctggagtacctgcgccggggcggccgcatcggccgcatcaccgccctggcgggcaccatgctgtccatcaagcccatcatcaccttctcggacgacggacagctccagagcatcgccaaggtgcggggccgcagacaggtgcaggacaagatcctggagctgctcagggcccggttccaatccggcagacggtacaacctggccgtggccaacggcggcgcgccggaggagatggcggagtttacggcccggctgaaggccgagtttcccaactacgagcatttttgggagggggtcatggacgccaccctcagcgtctatatcggcgacggcgttatcggcggcggcatccagttcctggactgaagtaaaactcccccggcaatgccgggggagctttgtgtttattccaccacgcgcagctccttggaggcgtggttgagcacctcgcagccgtcctcggtgaccagaaccagatcctcgatgcgcacgcccagcttgcccggcaggtagatgcccggctccacggagaagaccatccccggttcggcgacggcggggctggaggcgctgttgtccggcggctcgtggcagtccaggccgcagccgtggcccagccggtgggtgaagaaggggccgtagcccgcgtcttcgatgagcttccgggccgcccggtcgatgtccttcatcgggatgccggggcggatgacggcttcggccgccagattggcggccttgacggtctcatatacccgccggccctcgtcgctcaccgagcggaaaaacaccgtgcgggtcatgtcgcaccagtagcgccggatggggatgaaaatgtctagaaccacgctgtccccgtcccggagcaccgtcccgttgggggcgtggtggggatcggcgccgttggggccgaagcagaccagctgcccctcgccggagcggtaggcgccgtgctgccggtagaggccctccacataggcggccagctcgctctccaccgcgccggccttcacggcggcgatggccgcctccaccacctgatcgttgatctgggaggcgcggcgcatggcggcgatctcgtcggcgtccttgtacttgcgggcgtcgtccaccggggcggagcccagcaccggcgtcacgtcgggccgggcggccagaagggcgatgaggaacttgctgggccaggccttgtccacccccagcgtgccggggaggagggcggcggccagcgccgccgtgggctcgtcgctgtcctggtggagcaccagctccagcccctcctggggctccagggcgaagagggtattggcgaacagccggcacgtgccgtcggcgcggatgtaaagcgccagcatccgctccatcggctccacccagtaccccgtcaggtagtacaccgaggcggtggaggagattacaatctgggtcagtccgtcccgctccatgttgcggagcacccgggccagtctcgcttgattcataagacatgtcctttctgtcggtaagttctaaccttattataatccggattgtcaagagcacaaaaacggatctcccgcgacagagggagatccgttttttagcgttatgcgagggcggcggagacctgcgcctccatctcatccagcgtcaggccggacaggccgccatcggtctgggatagctgtgagagcgtgccatccgctgtgtcataggcgaagcggccctcgggaccgttgagggtgatataagccccgtccccggtggagcgggcgaagagaaaccaggtctctcccacctccggcagcggctcctccggggaggagcggactgcctccggcgcggtttcaaccaccagctcaatagaggccgacgtgcccagaaggcggtcggtcacatcagcggtgaaggtggtatagcaaaggtcggtgtccgcgtcgcgctccgtcccggctgctccggtgatctccaccaggccgatgaagtcgctgtccgccgcgaaatcttccacggtgtcgtaggacttggcatagcagcgggagacgtagagcagctcctcgccgccctccgcgggggcggcgaagcgggggaggaggaacaggcccagacagacggccgccagggcggcgcacccgcccgccagaagttttgtgtgtcgcgtgatatggatgcctcacttttgaatggatacgcgcagagcggggatattctattccgtccgctggaagaagtcaagaggggagagagaggcccgcccccggccatgggctggggggcgggcgctttgtcacacgcggtagcgtttctgcttgatataggagcagtggaggagggcgtgggccttgtggctgccgggctcaccaaggaagtcggcgtagaccttctgcactaccgggttctcgtggctgcggcggtaggtcatgccctcatcctgcctgtagagggcggcggcccggagggccttgatgtcggtgaagttgcgcacgttggcgtgctggatgggctggccgccgccgttgatgcagccgccggggcaggccatgaactccacaaagtcgtattggagggagccgtcccggatgccgtccagcacccgcttgacgttgtgcaggccggaggccacgcagacccggacggtcttgccgggcagctcataactggcctccttgactccctccatgccgcggacctcttgatactccagaggggccatgcccgcgccggtgagctgctccaccacggtgcgcagggcggcctccatgacgccgccggaggcgccgaagatggcggccgcgccggtggagacgcccagcatgggatcgaacgccccgtcgggcaggtgctcgaagagcaggccggcctgggtgatcatgcggcccagctccctggtagtgagggacacgtccaccggcatacagccgttgggcagccgctgctcctcccgcagtacctcgtacttcttggcggtgcagggcatgatggacaccacgaagatgtcctgggggtcgatgcccgcctgctcggcgtagtaggtcttgaccagggagccgaacatctgctggggggacttgcaggaggagatgttgcggatcatgtcgggggcgtgctgctccagataccgcacccagccgggggagcaggaggtgatgagggggagggtgccgccgccgttgaggcggcttaaaaactcggtgccctcctccagaatggtgaagtcggcggcggtgtccacgtcgaacaccttgtcgaagcccaggcggcgcagggcggtgaccatcttaccctccacgttggtgccgatgggcaggccgaagcactcgcccagggtgacccggatggagggggcggggcccaccaccacgtgcttggcggggtcgttcagggcggccagcacgcgggcggtgtcgtccttctcggagagagcgccggtggggcaggccacaatgcactggccgcaggagacgcagtccacctcggccagatcccggtcgaaggcgcagccgatgtgggtgtggaagccccggtcgttggggccgatgacccccacctcctgggtcttgcggcacacggcggtgcaccggcggcagaggacgcacttggagttgtcccgcaccaggtggggggcggaggcctcaatctgggggggcatgttgtcgttggcgtaccgcaccgcgtcgatgcccaggtcgccggccagttggagcagctcgcagtggctgttgcgggagcaggtgaggcagtccatccggtggttggagaggatcagctccagggtgagctggcgggatttgcgtacccgctccgtgttggtgtagacctccatcccctcggccacggggtagacgcaggaggcaaccaggctcttggcccccttcacctccaccacgcagatgcggcaggcgccgatctcgttgatgtccttcaggaaacacagcgacgggatgttgaagcccgcggagcgggccgcctccagcaccgtggagccctcgggaacggtgacggggatatcgttgatgcgcagagataccatcttttcgtccatgtccgttccctcccttactgcttgtagatggcgtcaaagcggcagtgatccatgcacgcgccgcacttgatgcacttggactggttgatgatatggggggcgcgcaccgcgccggagatggccccggtggggcagccctgggcgcagcgggtgcagcccttgcacttggtggggtccacgatgtactggatgagcgccttgcacaccccggcggggcagcgcttctcgtagatgtgggcctcgaactcctcccggaaatgggtgagggtggagagcacggggttgggggcggtctgccccaggccgcacagggcggactgcttgatgtggtggcacagctcctcgatggtgtccagatcctccggctcgccgttgccctcggtgatcttggtcagcagatccagcagccgcttggtgccgatgcggcagggggagcacttgccgcaggactcgtccacaatgaactccagatagaacttggcgatgtccaccatgcagttgtcctcgtccatgacgatgaggccgccggagcccatcatggagccgatggcgctgagggactcgtagtcgatgggggtgtcgatgagggaggcggggatgcagccgccggaggggccgccggtctgggcggccttgaacttcttgccgcccggcacgccgccgccgatgtcctccaccaccgtgcgcagggtggtacccatggggacctccaccaggccggtgttggtgatcttgccgcccagggcgaagaccttggtgcccttgctggtctcggtgccgatggcggcgtaggcatcggggccgtggttgaaaatccaggtgatgttggcgtaggtctccacgttgttgagcagggtgggccggtcaaacaggcccttcaccgccgggaagggggggcgggtcttgggctcgccccggtggccctcgatggagcgcatgagggcggtctcctcgccgcagacaaaggcaccggcgcccaggcgcagttccagatcgaagtcaaagccggagtcgaagatgttcttgcctagcaggccgtactccttggcctgccggatggcggtctccagccgcttgacggcgatggggtactcggcccggacgtagatatagccctggtgggcccccacggcgtagcccgcgatggtcatggcctccagaatggtgtggggatcgccctccagcaccgagcggtccatgaacgcgccgggatcgccctcgtcggcgttgcagcacacatacttgaccccgtcggggctgaccgcgtcggcggtgaactgccactttttgcccgtggggaagcccgcgccgccccggccccgcaggccggaggccagcaccgtgtcgatgacctgctggggcgggatctgttcggtgaggattttgcccagggcggcgtagccgtccacgccgatgtactcgtcgatgctctccgggttgatgacgccgcagttgcgcagggcgatgcggtgctggtgcttgtagaaccgggtctcagccagggaggtggccgggccgtcgcccccctcgttcttgttgagcaggcgcttgacgatgcggcccttgacgatgtgctcggagacaatctcctccacgtcgtccaccgttacgtgggtgtagcacgccccctcggggtagatggtgacgatgggccccagggcacacaggccgaagcagcccgtgcgcaccacctgggcctccttgtccatgccctgggcggccaactgcttttcaaactccgcgatgatcttgggactttcggaggaggtgcagcccgtgccggtgcagaccagaatatgggaacgaatcaagctcatctcacgccctccctcattccgccgcgccgatggtgtactcggtcaccacgcggccgttgaccagatgctcgctgacgatggaggccaccttgtcgggggtcatctttacgtaggtgaccttctcctggccgggcacgtacacctccacaatgggctccagccggcacacgccgatgcaccccgtctgggacacggtgacgtttttcagctcccgcttggcgacctcctccaaaaaggcgttgagcaccgggcgggctcccgccgcgatgccgcaggtggccatacccaccaccacgcggatgcggtcgtccccggagtcccgcaaatcaatctgctggcgcatcttatcacggatggcctgtagctccgctagacttttcatggttttacatccccttctgttcttgtaacagcgcttcctgttcctgtaggtaatcccggatccagaggatcagctccggctcggccagggagagctctggcccaagcagggcgcgcagctcctccgtgtccaggcgggccagggcgtcccccctccggtgcgtatagtgcagttccagctccggcgcgccctggatgagaagggtgatcgtgccggccatgtctcccaccggggggcagtcgatgtgcgaggcgacaaaaacggcggtgacggcggtgccgacccccagcgtactttcaatcgacagggagccgccggtctgctccgccgccaggcgcagcaggggcagcccaagccccatcgctcgggtggtgcgggtggtggtgaaggggtcgctcacccgggccagcagctccggggccatgcccgtgccgtcgtcccggatggacagggtgatggtctccccctcctccgtcagggtgatgtccaggcgcttggcctgggcggtgatggaattctgggcgatatccagggtatagagggcgatctctttcatgggggtccctcccttgcggcgctttggagccaaaaccggggccttccggctccgcgggcggggacaagccccgcccctacattacagcccttgaagatatcctccgtaggggccgacaccccagggcagcctctcttgcccctgcggggcaattcgccttctgccctcatcggcccgcggcagctatcctccaccctcgccgtaggggcggcccttgtggccgcccgtcctctccggcctgccgcagcgttttcctgaacgcgccgccggcccgcgggcgggtgtgggcacccgcccctacctcccgacgcggggggcgccccacgttcagggccccgcgcgtacccagcgaagcggttcgcgtggggaaaggaggcccagcggcgggagtgagctttcgggcttgcccggaagcgaatgatccaaagcttgggccgacgctgtcacgctgcgggttgggcgcatggccgggtcgctaagcggccattccgcgaaaaatgccgctgggcttcgcccagcctgttttttcgcctccatgtcctcttagctcccctatgcgcctaccctccgcgcttctacttatacatatccaaaatcgggccgacctggtcgggggtgaggcggccatagacgtcattattgatcatcatgaccggggccagaccgcaggcgcccacgcagcggcaggagtccagggagaacttgccgtccggggtgatggcgccggggacaatgcccagcttctgttccacggcgttgagcacggcggccgcgcccttgacatagcaggcggtgccgagacagacggagatctgatactttcccttggggttcatggagaactgggcgtagaacgaggcaaccccgtacacctcggacagggggatgtccaagccttcggccaccatgatctgaacctcctcgggcagatagccgaagatttcctgagcggcttggagcaccggcatggtggcacctggctgtcccctgtgctcggcgatcacctgccgcaggcgctcctcctgttccgggcttccgcggtaggggacgacggttttgcagtttggcatggatgcgtccttcctttctgaaactggttagtttagtttcgctttttctattataacgccaaatcatttcttgtaaagactgtccaaaatgacaaaatatgaactattaagttcaaaaattagcccaagaaaaaatgaagggtagaaaaaaaccgctccgttgggcagggcgggcgtatcggagtggcgtcgaatacagaccatgcacaggaaagcggttctttattgttaaatctttaacaaaaatgagtataacacatctaactatgtttgtaaagagaaaaatttaccttgtaccctgcagccaatagagaacggcggcagccgtccgctccggcagctccatggcgtgctccgcctcccagacctgatccaggtagtgggcgtcagagttggtgatgagccgaagcccggccaggtccgggcggaggcggaactccggcgggcattggcgggatacttccgccagcgggaatcccagctccggcatccacaggccaagcacccccagaagagagaaggaggggcggtcgatgtgtgcaggaaaggccgctccgccaaaggcggcggccagccgggatacctcctccaggccgatgtcggtgtgtccggcgaggaagcgggggtcctctcccagcaccaggtctcccgcgtccatatagatttgatggccaaagacggcggggtgattggacaacgggggcaggcggcgggatacatacgcctcgaactcctccccgtgatagggggtggggaagagacagactacgtggatctcctcccgggtgcacagctccatccccgccagagccagcaggcctcgctcctccgccgcccggcagaaggcggcgcagttgccgcaggtgttgtggtcggtaagggccacaatatccagccccgccagcgcgcacatggccgccaggttgacgggggtcatgtcctcactgccgcagggcgacaggcaggaatggaggtggagatcgtagtaatacttcatgtaaaactccttttcaggataacaaaacggcatcgtgcctatcgcccgaagcgcgccacaaggcgcgccgagggttttcgcggaggcgaaaacctcgccgcagggcggattcactccgcccgaggaagcaaaagggggtccccgcccggcgttgccgggtggggcgacaggcaggagtgtaggtaaaaatcgcggaaatactttgtgtagaatttgcttttaaaataacaaaatgatatcgagtgaggaggcattacccggcagccagcgccccggacaaacgggcggcggtgtcaaaggtatcctgtccggcccccagcagattgacgcccttctcctgagcgcggcggagcaggtcgccgtcgggggcgaccccctcggtgagaatgacgcaggagacctcagccatgagggccacggcggccacattctggttggacatgatcgtgagccaggcggcgtcctgtccggcccggcccagcacccagctcagcaggtctccggcgtagccgccggaaaccgggcggtcgggctgggccagatggaagggggtcagggagagggcttcggtcagttcgcgtaccgtcataaaaaactcctccttgttgtataaagaggccgccgtgagacgcagggcgcttcacggcggcggtagggtctattcggacggctcctggcggcggcggaagggcgggggcaggtagtcgtccgcctcctccttgctgcccgccatggagcgcatgcgctcccgcaccttgaaaatgcagtcgtcctccgaggcgcggcccagtaccacgtcctccgcgaaggcccggcaggagggcgctccgcaggagccgcagtggaggccgggcaggtgggactccagctcctggatacgcaactgtttgctgatggccatctcccggtcctgatccagcacgaaggtaggtaagtactgtagctccttgtccctccgcacgatatcccgcgcctctccatgaaagaggaaacggttgcgggagaccggcagacccttgagcaggcccttgatgcgaagcttggccgcgtagggattctccacattgaagcagccccccacgcacccctgggtgcaggctgacagctccagaaaatcggcctccggcagacggccgtcttcgatctcctccagcatgcggatgacgttctgaataccgtccaccgccacgcagcgctcccccaggcgggcggcgctctcgccgccgcaggaggcccagcccaggcctaggataccggcggaggccatgggggtgatctcctccagctcccgcatgggattgagcaggcgcaggtagatgtcccggatggcgaaggccccgtccagcaccgggcggctgagcccctcggagacccgggcggccgtcaccttggaggagcagggcacgatggcgaatacgccgatggcctccggcggcaggccggtctcctcggctgcctcccgccgggccagaatggcggccagctccatgggcagaatggtacaggccacatggcccatgagcttggggaagcgcatgcggatgaggcggagcactgtgggacaggaggaggagatctggggcgtcaccttggacgggccgccgctgatgctctgccgctcaaagtcggagatcatctcggcggccttagccacctcatagaccttgtgaaagccgatcttcaacaggccgttgagcacaatatccacgctgtccaggtgctggaactgcccatacagggcgggctccggcagggccacgcagtattggtactgcttcagaatgtccagactgtcgcccaccgacttgatggccttgtggggacagatgcggatacagcttccgcagtcgatgcaccggtcgggcagaatggtggccttgcggccgcggacccggatggcctcggtggggcagcacttgatgcaggtggtgcagccccggcagcgcttcagctccaggaccaccgaatgtctcatggacatggagccgcgtcacctcgcttttccaagctcatcgcgctcaggaaaccttgattttaaccgtaacggtggtacccttgcccacctcggtgtcaatggtcatctcgtcggagtagcgcttcatattgggcaggcccatgccagcgccgaagcccagctcccgggcggtctgcccggcggtggagtagccctcctgcatggcctgctccacgtccgggatgcccggcccggtatcggtcatgcggataacaatctgattggcgtccacctccacctcggcctggccgccgtcggcgtggatcaccatattgatctcgccctcatacatgcagatggacgcacggcggatcacgtcctggggcagtcccagcttcttcagcgtcagcttcattttgctggaagcctcgccggcctcgatcagatcgccgccctccacagggtaaaccagtctaattgtctccatcacaattccctcgcaatccattggaatataacaggccgcacgcctcgtacatacgcttggggcaggtcataactacaatgtcacgctcctccgccagagacagaatgtccggccccggcaccttaccccgcacaaagacaatacatttcatctccaccatatctgcggtgcgcaccacctgggggttgaccaggccggtgagcagcagcgcctggttcttgacaaaggccagcacatcgctcatgaagtcgctgccgcaggcggaaaaaacctcccggtccagatgctcctccccccacagcacctcggcgtgcagaatcgtcttgatatcagacagcctcattggccactcctcctcccggaagggaaaactaaactgtaagttcaatggtattgtaccacaaaccggcgcaaagtgcaaagggttcgttgaaatattcacaaagttttgagattgaacggcttggttttagtcaatccgtgcagttgacagttggatagggcatccgatataatatactttaacggagtaaagcgataacccggtgcgaagccccgttctatttcaaattggaatatcgaggaggccatctgtcatgggaaacgaacgtgtttacaacttttccgccggcccttccatgctgccgctggaggtattggagcgggcaggagccgagatcacaaactaccagggctccggcatgtccgtcatggagatgagtcaccgctccaaggtgttccagaagatctttgacgacaccaaggccaagctgcgcgccctgctcaacgtgccggagggataccagatcctcttcctccagggcggcgcctccacccagttctccatggcgcccctgaacctcatcggggccaccggcaaggccgactacgccgtgaccggcaacttctccaacatcgcctacaaggaggcgcagaagtacggccagatccatctggccgcatcctccgccgacaaaaaccacacctacattccccagcagagtcaactggagctggaccctgaggccagctatttctactactgcgccaacaacaccatctacggcaccgagtggcagtatgtcccggagacgggcggcgtgcccatcgtgtgcgacatgtcctccgacatcctctcccgccccgtggacgtgtccaagtacggcgtcatcttcgccggcgcccagaagaacatggcccctgccggcctgacggtagtgatcatcaaggaggagctggccgggcatgagctgcccttcacccccctgatgatgaactacaagaccatgatcgacaaggactccatgtacaacaccccgccctgctggtgcatctatatgctggggctggtcctggactggctggaggagcaggggggcatacccggcatggaggccatcaagcacaaaaaggcgcagatgctctatgacgtgatcgactcctcccggctcttcacctgcgccgtggagcccggctcccgctccgatatgaacgtggtgttccgtaccggcagcgacgagctggacgccaagtttgtgcaggagagcgtggccgccggtttcaccaacctgaagggccaccgctccgtgggcggcatgcgggcgtctatttacaacgccatgcccaccgagggcgtagaaaagctgtgcgactttatcaaggcctttgacagggcgaattgagcccgctgcccgcccacggaaccaagcgttttgccgaaggcaaaaccttgatgcggggcggatttactccgcccgcgcagataaaatcgcttggggtcccgcaaaatgggagattttgcgggcagggcggcatgcgggcgtctatttacaacgccatgcccaccgagggcgtggaaaagctgtgcgacttcatccgggcattcgataagaacaactgagcgttcggcttaccctggggccctgcaaagtggggcgcggcttacgccgcgtacaggcattttggccagcggacaaaatcttgccgcagggcggattccctccgtccggggaagtaaaatcaggggctcccatggaaggcgtgtagtttcatccgggcatttgataaaaacaatgaaggggagagggctatatgtatcgcatcaagacactgaataagatttcccccgccgggctgtccgtactggaccagacccgctacaccatcagcaccgatgtggaaaacgaggacggtattttggtccgctcggcggacatgcacgactatgcattccccgatgccctgcgggccgtggcccgggcgggcgcgggcactaataacatccccatcgaccgctgctccgaggcgggcatcgtggtattcaatacccccggcgccaacgccaatgcggtgaaggagctggcggtgtgcgctctgctgctggcctcccgaaagatcagcgacggcgtggcctgggtgaaggagcaggccgccgccggggcggacgtggagcaggcggtggagaagggcaagagccagtttgtgggcccggagctgtctggcaagatgctgggcgtcatcggcctgggggccatcggcgtgcaggtggccaacatcgccaccaagctgggcatgaccgtgttcggctacgaccccttcctgtcggtggacggagctctgtccctgtcccggctggtccaccgggccatggatctggagaccatttataagaactgcgactacatcaccctccacgtgccccagacccccgagaccaagggaatgttcaacgaggacgcattccatatgatgaagggcggcgtacgcatcctcaacctggcgcggggcaccctggtcaacgacgacgacatgctggccgccctggacagcggcaaggtggcctgctacgtcaccgacttccccaacggcaaaatcctgcggggcaagaacgtggtggccatcccccatctgggggcctccacgccggagagcgaggagaactgcgccgtcatggcggcccaggagctgaaggactatctggagaacggcaacatccagaactcggtgaacctgcccacgctggtgcagccgtggagcggcgtgtcccgcctgtgcatcatccaccgcaacgcccccggcgccatcgccagcatcactggagtgctctccaaggacggggtaaatgtggctaacatgacgaacaagtccaagaaggactatgcctataccgtggtggacgtggacagccgcatcggcgagtccgtggccgacaccatccgcgccctggacgtggtgctgcgggtgcgcctgctcaatcactaaacagccgcaaaaaacgcggaggaacaccggttcctccgcgtttttttcttcggcgtgcgtcaggtttccgcgttcccggccgtactgtaaggtgaaagggggcgaaccaatggaggaggttttggatcataaccaggaggcggagcagattttccggcagtacggcaggctgctggagctggtggccgccgctcagctccccggccgcccggaggacgcggaggagtgcgtccaggacgccgtctgggcctttgtagagggcagggcgccgtgggatcccgcgcaggggagtaagcagacctggctttgcgtgctggtgcgcagccgggcaaaggaccgccgccgcgccctggccgcccggatggaggagccactggaggaacactctggcctggcggcggcggatcacgcggagagagctgcggtgcgggacggactgcgccgggtgctggaggggctgagccgggaggaacggaggctgttcaccctgcggtttgtctacgggctctcttctgcggagctgggtggcgtactggggctgtcgcccaacggggtggacgcccgggtgagccgcctgcggaagaagctgaagcggctgctggcccggcaggggctgggcctgtgggaacgggagggaaccaaatgagatactgtgattgggacgaggtactggaccgggatggtctgctgatactcacggaggaggcgctgacgcctcccaggcggagccgggcacccctgaggcggctggcggccgcggcggcctgcgcggggctggtgctgggactgatgaactaccgggccgtggccgccggggtgggggagctctgccgctatttcgcaggcatcggcgccacggcggatgacaaggcggagctctgggtgctggaggagccggttacctggacggagggggactggacctacgaggcggatgctaccctgcgcagcggggtgctggaactggaactcaccatgagcagccgtttacctgccgatcagttgccctctccggtggagctgcggctgggcctgtcggcggacggggagccgctgcacaatgccgtccacaccatcactccctacagcgtggcggatgccggggaggggagcggctacccccgctaccgcctggagcagggttatcagaccactgcatccacccgcctccgctgtacgatggccgccccgccgccggaggactgcgccctccatgtcagcggtctgggcgtccaggggggagtgttctccctccgactggtgccggcagagacgccccccacggtacagaagacttggacgctcccccagggggatatgaccatctgggtggcggaggacggctcagccatatccgccagcttcgacagcacagagtggtggggctggcccttcgacatctcctttatcggcgcatcgggagagcgctatccctgccacgacatcacaggcgcctatgagctggacggcaccgagcggttcgaggccatcaagccggagggcatggaggaaccggtggacgcagtgtgtatcggcggagtggctgtggagagaattcaggatgccggcggcagggccgaccacctgtatgaaagtctcgactgggttatcgagctgccctgagccccgcaaaaacgtccccggagggaattccctccggggacgtttttggatacgggacagacagaggcttacagggggtgtcccttggcggccacccgcagttcctcgtccggccgcagcgtggcacacccggcgggcggggacaggccacgcccctacagttcctttttacagtaaatcttccgcgcgatgcaccaggaggcggcgtaggccgccgcgcacaggacggtcaccagccagggcagggcggcggccaggccgggggtgggcgggggaagaaggccccgctggaagagcaaaagcagagccatgccgccgccgaagaagaggatgaacacaaagtagagggctgcccggctgcggctcacccccaacagcaggagaaggggcaggttgacggcgttgaccgccagggccaggccggtacagaccagcaccgccagggacagagcgctctccggcccctccatcagggcggtgaggaagagggaaatcccgccgctgagggcggccagcaacagggcaagcaggtacttgccgtccaccgtcccgcgccgtccggcgggggtggcggcggcgtaccgctcccagtgcacagcctcgtcatagctgaagcaggtggtggggagaagggtgccgtagagaaccgccaggccgcacagaaaagaggcgtccagcactccggcggcagtgagcgccagataaagccccagcaggagggcatagtaccaaagctgccgccggagcagcagccagtccttgtagagcagtccggccatgcttagaactcctttcgggcatagatggcctgggcaatacagtaggagagggcgaagccgcccacggccaggatggcaagcaggccgggcagggcggtgagcacccacgccgggggcgcggggagggcgaggccccggtcggccgccaggcccagcagggcaaagccggcgaagaccagtaaaaagagcgccatgctcaccatgcgggccttctccgccccaaacttgagcagcagggggagcgccaccgcgttcatgatcagggcgatccccgcacaggccagggcggacagcagcagctcggacaggggctcctccagcccgccggccagggccagcacgaccagcagcagggagacaaacacggtgctggccagggtcaccagcagggtgaacaggtacttgcctgtcaccaccccccggcggcaggccggggtggcgatggcgaagcggttccagcggctcacgtcgtcggaggtgacggtggtcataggggtgatcagggacatgagcaccaccatgccgcacagcaccgaggcggtgaacactcccgacaagcacaggccgccgtagaccaggaaaaagaccaggtaggtagtcagatggcccttaagggccagaaaatccttgtagatgaggccggtcatcgggcatccccctttacggtaaagaccataatatcctccagcgacaccggctccaccgccagctcggggtggaaccgggcgaaagcccgccggtttttcaccagggcctcacagccgaactggccggagcgcacccccaccagcagggcggggtccacccgctccagctcggagcggccgcacaccagcttgccgtaggtgtccagcagctcatccttggcccccgacaccgccacccgccccctgtggaggtaggtcacatagtcggccaccttctccagatcgctggtgatgtggctggacaggagaatggcgtgctcctcgtcctgaatgaacgccaggaactcgtccaaaatttcgtcccgcaccaccgggtcgaggccggaggtggcctcgtccaggatcagcaggcggggcctagcggcaaaggccgccgcgagggacagcttcatcttcatgcccttggagaaggtcttgaccagctttttgctggtgaggccgaatttctccaggtaatgctggtacagggctccatcccagccggggtagaggcgggcgagaatgctccccacttggggggcggagaggccgtcgtggaaggtggtctcgtccagcaccacccccacctgggccttgaccgcccgctcgtccgccaggttgtccaggcccagcacctggatctccccgccgtcccggcggaccaggttgaggatgcacttgatggtggtggacttgcctgcgccgttctccccgatcaggcccatgatggtgccgccgggtacggtgaaggacacgtcgtccagcttgaaggagccgtagtccttggtgagatgggacacttccaatgcgtttttcatagtgtttcgtctccatacagaaggttgagggtctcggtgagctcggccagggtgacgccgccggccttggcgacgtccaccgcatgggacaggtgctcctcggcccggcggagggtgtcctcccgcaccagctccgggttctggggcgccacaaagcaccccttgcccggcacagtggtgagaaagccctcccgctccagctcctcataggcccgcttggtggtgatgacggaaatgcgcagctccttggccagcagccgcatggagggcagggcctcgccctccttcagctctccccggagaatgaggcccttcatctgccgggtgatctggtcatagatgggtacgccgccggaattgcggatgatgatgtccatggtacaccttcttgatgtcatactgtatatattcagcatacacagtatgacatatggaattccccttgtcaagagggaaaatgagggttacactgttggtagctacaaagggggttggaaagcatgtacgcacccatactggagattgacaccaggaaaatcgaggagaacgcccgaaagctccacaccttctgcgccctgcggggggtggagctggcctttgtcaccaagggcttctccgcccgccccggggtgatccgggcggcccgggccggcggcgtcacccgcttcgcggacagccgcctgaaaaacatcatcgccgccaagaccgccatacccggcctgcactacctgctcatccgcatacccgccattgacgaggccgaggaggtggtgcgctgggctgactgtagcctccagagccagattgaggtcatccgcgccgtgtccgatgcagctgtccggcaggggaagattcaccccattattctcatggtggacgtgggggatctccgggagggggtgttcggccgggagcagctggaggagattgcggggcagattctgggctgtcccggtgtggagctggtagggcttggcaccaacgtggggtgttacggaagcatcctcccctcggtggagaacacacagatcctggtggagttgcgggacttcctcaatgagaagtacggcttccatatcaaaactctgtccggcggctccacctgtacactcaagctgctggaggaggggcggctccccgcgggcatcaatcacctgcgggtgggcgaggggctgctctacggcgaagacaccaccggcatgcgctttctggaggggtaccataccgacgccttccacttcaaggcccaggtggtggagctgcgccgcaagccgtcggtgcccatcggggagcacggccgggacggcaagggggagctgcccgaataccccgaccggggggtccacctgcgggccatctgcgccgcaggcaagcaggatgtggcctgggccgccctcacccccaccctgccgggggcggagatgatcggcgccagctccgaccacctgattgtagacgtggaggggtgcggaggccgggtaagggtgggggactggctggacttccgctgcggctatatggcggtgctggacgccaccacctccgcctatgtggacgtgcgggaggtgtgaacggcctcctccgtgggcagaacgaaaacgagagcggaagccggatggcctccgctctcgttcactttgtcgaaaaagcctcgcagagttcgcacccgcaggcgcgaagcaaataaaagccgttttctccggcggcatgtacgccggagaaaacacttctcagcccgcaagtgtgggctttgtccgcagaaaacggacaaagcctgcgcgcggtgggctgcatccggctcgaaaaagcggcgaagccgctttttcgacggtcaaagaaagcggaagccgtccggcttccgctctctttggttggattcacttacttgtggtccacagaatacatatgggtgatgaggtccagcaccttgttggagtagccaatctcgttgtcgtaccaggacacgaccttcacgaaggtgtcggtcagggcgatgccggcggtggcgtcgaagatggaggtgcgggtgtcgcccaggaagtcggaggacaccacggcgtcctcggtgtagcccaggatgcccttcagctcaccctcgctggccttcttcatggcggcgcagatctcgtcgtacttggcgggcttggccaggttgacggtcaggtccaccacggagacatccagggtgggcacgcgcatggacatgccggtcagcttgccgttgagggaggggatgaccttgcccacggccttggcggcgccggtggaggaggggatgatgttgccggaggcggcgcggccgccgcgccagtccttcttggaggggccgtccacagtcttctgggtggcggtggtggagtggacggtggtcatcaggccgtcggtaatgccccagttgtcgtgcagcaccttggcgatgggggccaggcagttggtggtgcaggaggcattggagacaaagttcatgctggagtcataggtctcgtggttgacgcccatgacgaacatgggggtgtcgtccttggagggggcggacatgaccaccttcttggcgccggcgtcgatgtgggcctgggccttctccttggtcaggaacatgccggtggactccacgacatactcagcgcccacctcgccccaggggatgtccttgggatccatgcaggcgaagaacttcacagtcttgccgttgacgatgatggcgtcgtcggtgtactcaatggtgccgtcaaactggccgtgcatggtatcataacgcagcatgtaggccatgtaatcgggggtcataaagggatcgttgatacccacgaactcgatgtcggaacgggagatacccgcgcggaacaccagacggccgatccggccaaagccattaatgccaactttaatgctcataatgaatcgctccttcgttctaatttgattcttaaatgatttccaattgcgcgcctccattataaacgaatccgcgccgaatgaaaagggggaaaacagaaaacttactggggaaactgtataaatttacaccggcactatcggtaaacgcggtggtttcgacatgattcgacatttctgcttgagcggcgggtcggattttgctatactgacgttatcatacccttacaactttacggaattcctgcgcaagctatggcaggactggaaaggaggtcggcggcatttggatgagaagagagaggatctgggaccgctcctggtagagcagttccgtcagcagatgaacaacctgtccgcagcgattcagttgctcacgccggtggtgcgggagaaggcggggccgcagtacgacccctatttggccattctgcaccagagcctgtaccggttgattcgtatggtgggcaatcttgagtatctggaactgcctgagggagagctccccctgcgggagggcacgctggatctggccgggctgtgccgggagctgggggagcaggtgtctcccctgacggcgctggctggcatccgcttttcctatgaggaggagatagggagcctcctcacccatggagacggggcccagctccggcggctgctgctcaacctgatcgccaacgccgtccgcgcggcgggagagggcggagagtccggcctgcgcctggcccgccggggcgggcgggcggtcctcaccgtgtgggacaacggaccgggttttctcccggaaaccgatgagcgggagctgcttcagcggccgggcagcctgggtcttggactgaaggtggcccgccgcatcgccgccctccacggggggagcatcgtctttgagcagcgggaggagcggggctcccgggcgatcgtgtccctgcccctccggccgccggagccgggcgagctgctgaaaacgccccggatggggtttgacggcagcggcggattttccgacacgctcatcgagctggcaggcgtgctgccctaccgggcctttttcccggaggatgtggagtaatacagtgcagacggcgcatggctgaggccatgcgccgtctgcatatcagggaggaaaggaagggaaagaatttagttgggcaggtattccagggggtcaacagtggagccgtccagcgacatgctgaagtgcagatggctggccagggcgctctcggcgatggcggtgccgcccaccgagcccagcacggagccggcgccaaccgtgtcgcccaccgccaccgtgggtacggaggccaggttggcgtaagtgctggtcagtccgccgccgtgctccaccacaacggtggtgcccatcatggcgtcctggaggacggcggtgaccgtccccgcggcggccgccttgacctcagtaccggcggcggaggcgatgtccagaccgtcgtgggtgcgccagtcgtccatggtgggattgtaggagagcacctccaggctgtagtccgtcagaatatctccctgtaccggccaggtaaagacggtgggggcagcctgtggagtgggctggggcgtggccgacggcatcgccgagggcgtggccgccggtacagcaggggacgcagggacggtgtgctccggcgcaggggtggccgccgggcggttcatgaggcccgcgtccaccggcgtgggccggggagagggggtgacggtgatctgggcggtgcccgccacgggggcgtccggctcatccggggtgagagaggaaaagagataatagcccgaaattcctattgcggcgacgcagaggaacaggactatgtagaagcccttgccctccagaaagtcgcccattcgtttcaagaatggttttttcatgctgtttagcacctccgagcctattgtggacaggcctgggcttggatatacatggaaaacaaaaaaatttcccttgaccttccacggggtgcagggtgtattaagagaacggcgatttaagaaaattttaatcttctcttcatggcgtcttacataggattctggtatgctggtagcctatctggaaaatatgaacgaactgcgaattttttgccggaggcgttgacatatgacaacttgtcgtctaagcttatgacagcttgtcaggcgaggaggtgccctatgcccagcgcgacgttttacaatctgccggcggagaagcgggagcgcctgcttcgggctgccagggaggagttctcccgcgttccctatgagagcgcctcggtgaaccggattatccggtccgccggcatcccgcggggcagcttttacatgtacttcaccgacaaggaggagctgttcggccacctgatggactcctatggcgcactgctggagcgccggatgggggagctgctggagcagcgggagggggacctctttgccgccttcctggacctgtttgaccacattcaggcccattggggggacgggaaataccgcgagatggcggacatactccgctgcaaccggcagatgcagcccggggtcctgctgaaccgggaggggcctgaggcgagcctggctcgcctgcgggacagggtggacctgtcccgactggatctgcgtacggagaccgacctttctgatatcttccacttgctggtctccgccgtagccggtacactggtagcggccggggcctcaagcgatccggcgggcgcgcgggcccgtctgatgcgtgtatttggcatccttcggcggggcgcggactccaaggcggtccgccgcgaagaagcatagcaaagaaaaggagaaaccactatggaagcaacccaagttaagccagaaacgacggtcgcccctccggaggggccggggaagaaaagcccgcagctcacgcccccgaagaagaagcggaagtgggtcaagcggctgatcatcctcttggtgatcgtggcgctgctggtgctggcgctctcccgctgcatgagtgcgggaactcaggtgctcagcagcgcgtacctgccctacaccgccgcgatgcacgacatgacggtggccgtctcgggcaccggcaccatcgagcccatccagtcctacaaggtgaccacgctggtcagcggcgagattctggaggccccctttgaggaggggcagaccgtccacaagggcgacgtgctcttccgcatcgacgccagcgacgtggagaacaacatcgagcagctccagctcaacgtccagtccgctcaactggcccttaatgacctgctgaagacccagagcgacaatcagaaggaccgcaatgtgaaggccgatgacgccggtgtgatcaccgagctgcacgtggaccgcggggacagcgtcaccgtcggcaccgtcatcgccgacgtgctggaccgggatcacatgaagctgaaggtgcccttccactccgccgatgcatcgggcttctatgtgggtcaggccgcgaccgtcaccgtgaacggcaccgccgagacggtgagcggaacggtggagtccatcgccgccaccgacgaggtgggacccggcggcaccctggtccgccaggtgaccatcttggtcaacaaccccggcgtcctgtctgaaaccagccagggaaccgcctccgtgggaggggcggcctgcgcctccggcagcagctttacttatgcctcctcctcccagatcacggccaaggccgccggcgatctggacgtgctcaatgtcaaggagggcgaccgggtgtccaagggccaggtgatcggcgttatctctgaggccgacctggagacccagattgagaatgcacgcatcgctctggaaaacgcccagctctccctgaagaacgcccaggagaagctggaggactacaccatcacctccaccatcgacggcgaggtgatcgagaagaacctggatgtgggcgacaacatcagcggtctgtccaattccggcgcttccgtcacctacccggccatcatctatgaccgctccgagctcacctttgacatggacgtggatgagaaggacatcagcaagatccaggtgggccagaaggtggagatcaccgccggcgcactggacgaccagagcttcaccggcgtggtggataagatcaacatcaacggcaccaccaccagcggccacaccagctatcccgtcaccgtgaaggtggagggctcccccgaggcgctctaccccggcatgaacgtctccgccaagattatcgtggaggaggtgggcagcgtgctcgccctgccggtggaggcggtggagcggggtaacactgtgctggtggccaaggagggctgcctggatgaaaacggcgtcatcaaggatctctccgccgccgaggagcgccaggtgaccctgggccgcaatgacgacgagtacatcgagatcgtggacggcctggaggagggcgaagtggtgctggcgctgagcccccagggctccagcctcatgagtgcgatggggatgggttaagccatggaacacctcattgaactcaaggacgtctacaagatttaccagatgggcgaggagaccgtccacgccctggacggcatctccctgacggtggaccccggggagttcgtggccatcgtgggctcctccggctccggtaagtccaccgccatgaacatcatcggctgtctggacgtgcccacctccggcacctaccatctgggcggcgtggacgtgtccaccatggacgacgaccagcaggccgaaatccgcaacaagatgctgggcttcatcttccagcagtacaatctgattcccaagctcaacgtgctggagaacgtggagctgcccctcctctacgctggagtgtccgctgccgaacgccatgagcgggccatccgctctctggagcgggtggggctggcggacaagtgcaaaaacctgcccagccagctctccggcggccagcagcagcgggtgtccatcgcccgggcgctggcgggcaacccctcggtgatcctggccgacgagcccaccggcgccctggactcccgcaccggccgggaggtgctgggcttcctccagaagctcaacgccgagggggataccgtggtgctcatcacccacgacaactccatcgccgtcaaggccaagcgcattgtgcgcctacaggacggaaggatcatctatgacggtgatgcccacgacccaaaggccgtggtacagccggagctggacgaggaggtgggcgcgctgtgaatgtgagccaatccttccgcctggccctcaagagcctgatggtcagcaaggtccgcgccctgctgaccatgctgggcatcattatcggcgtggcggccgtcatcgtcatcgtctccctgggcaatggcatgcagcagtatatgaacgcccagtttgagcagatcggcgtcaatctcattcaggtggccatctactcttacggcggaaaccgggaggtggagccggacgacatgtacgccctggcggagaagtacccccagtacattgactccgtcagcccctacctcagcgcctccaccaccgtgcgccacggcgccgacgaatacgaccacaccagcgtgtacggcgtcagtgagaccttttacaacgccgaaaagggccagacggccagcggcgaccagcttgaggaggggcgcttcctcagttatgtggacgtggagcgggaccagaaggtgtgcgtcatcggcagctacctcaacgaggatatgtttggcggggacggcctgggccagaccctgaccgtggggggcattccctacaagatcatcggcaccctggcacagaaggccgactccaccgagggcagcggggatgacctcatttacctgccctatggtatggtggagcagctcaacgctgccagcgggggtatgggcatgaagatgtacctggtcaccagcaccaccaaggagacctcttccgccgccaagggcgtggtggagagcctgctgttccgcatctaccaggatgagaacgcctacatggtcatgacctccgcggagatgatggacatgatggactccatgctgggggtgctcatgaccattctggtggtcatcgccgccatctctctggtggtgggcggcatcggcattatgaacatcatgctggtgtcggttaccgagcgcacccgggagatcggcatccgcaagtccctgggcgccaagggccgggatatccgcagccagtttatcatcgaggcgggtaccacctccgccatcggcggcgtcatcggcattattctgggcgtggtgctggccaacgtattcaccgccctggtgggcgttgtgatggccggtgcggagggcttctccgccgtacccagcgccggaggcattgcggtgtccttcggcgtcagcgtgggcatcggtattctcttcggctacctgcccgccaacaaggccgcaaagctgaaccccattgacgcgctgcgctatgattgacggtacaccggcccgcccttgccgaaccggcgcggatggtatatgataataggcaggggccggcgctcccgccggcccgccgtttccattttcacgagcatgagaaggagaaaagcaatgaaacaacgactgttagccggcctgctggccgtggtgctggtgctggggctggctccggcggccttggccgccgcgccggccgaggaggaggccgcccaggtgctggccgccctggacattatggtgggcgacgagagtggtaacctgaacctgggcgccaccgttaccagggccgagttcaccaagctggcggtggccgcctccaccagccgggacgccgtaggcgacacggtgtccgtcaagccctaccccgacgtgcctcagagccactgggccgctccctatatcaaggcggcggtggatctggggctggtgcagggcgatctgcacggcaacttcaaccccggccgttccattacgctggccgagggcgtgaccatcgtcctgcgcctgctgggctaccaggacagtgacttcaccggcgtctggccctccggccagatggcccagtaccgggccctcaagctcaacgagggcgtcaccgccggacaggacagcgccatgacccgccgggacgccctgtacctgttctacaacctgatgatcaccaaaaacaaggagggctcctactacctgaacgtgctggagcccaccctcagcctggtgaatgccgccggggagctggaccgggtggccctcatcaactccgctatggagggccccgtggtggccgccgctggctggcagtccagcgtgcccttcgacgccggcagcgccacggtctaccgcaacggcgccaagagcagcctggccgcggtgcagaatcaggacgtggtgtactggtcggagtccatgcataccctgtgggcctactccgacaagatcaccggcacctatgaggcggcttctccctcggtcactagccccacctccgtcaccgtggcgggcaagagctacaccattgagaccacctccgccgcctatgccctctccgacctgggcggctaccagattggcgacagcgtgaccctgctgctgggccgcagcggcggcgtggcggcagtgggcgaggccgtggcggccgacaacctcatctacggcgtcgtcaccaaggtggagagcacctcttacgacgacggaaagggcggcacctacaacgcccgcaccgtcaccgtggccggtaccgacggcggctcctaccgctatcagaccgacaataagagcctggacgagggcgatccggtgcgggtgaataccgacggcgacaccatcgaggtcaagcgcctgaccacctccaccctgaccggcaagatgagcaacgacggcactaagctgggcacctaccccctggctgacgacgtgcagattctggacacctacgagagctgtacccccatccgcatctatcccgaccgcctgaagggcgtgaagtttgacggcaatatggtccgcttctatgccctcaacgcccagggggagatcagccatctgatcctcaacgacgtgaccggcgaccttcaccagtacggcgtcattaccagcgtggaggaattggatctgggcaccatgatgggcatttcctcctcctatacctacgacgtgggcggccagaagctcacctttggctctaccaacgccatctacaatctgaaggtaggtccctgccagatcaaaatggagggccccaacgccgtcgagcggctgtataacctgtccgagcgcaagctggacagcgtcagcggcagcaccgccgtgggcaccaacaaccagaagtacactctctcagacaatgtggcggtgtacgtctatgagggcggggagtatcagctctccagcctggcccgcatcagcggagggaactactccctcaccggctggtacgacaaggacgagagcgccggcgggcgcatccgcgtcatcatcgcccgctgaccagcacaaaaatcaaacggaaccgccccggagccatttgctccggggcggcctgtttctacagcaccagggccacgcaccagcataccgtagcccccagggcgccggcggccacgtaggcgggggcggggatatgccgccacaggcggctccagcgggagttgcggcggatatacccgtcagccacccggcgggcttcctgaagcacatcgtccgccgtcacgcctctgccgaaggcgtcctccttcaaaataaaaatcgcctgctcaaaaaagcgggggtcaggcgctttgaccacgatgacctgtctggacacacctttcaccaaccgggacacatcctttcctgttttcttccagtatggccgctttttagaatacctattccggcggccggaaagaattgccgctcatatccgcccgtttgccgccgtacactattgccaggaatggaggcgaaggcatgacgcagaagcggcggctggcgtgggcgctggcccttttgtttgtggtgaatattgcggtgatctccctggcccagcaggccgaggcggccacctaccggcagggctccagcggtgagcaggtgcggaccatccagaccaagctgaaaaattggggctactatgacggtgcggtggatggcatctacggcagtcagacggcccaggcggtcaaatactttcagcggaagaacggcctgaccgccgatggcatcgccgggccggccaccctcaaggcgctgggcatgtcctctggaggcggggggagcagcagccagcagaacagcgcggcgctgctggccagggtgatctctgccgaggcccggggcgagccctacagcggccaggtggcggtgggggcggtgatcctcaaccgggtggagcacccctccttccccaacaccatcgccggggtggtgtaccagccgggggcctttacctgcatggtggacgggcagttcaacgagccggtggccgactcggcctaccgggcggcccaagatgcgctcaacggagccgatcccagcggcggagccatctactattttaacccggacacggccaccagtgcgtggatctggagccgccccctcatcaagaccatcggcaagcaccgcttttgcgcgtaataaaaagcagcccccggagttcactccgggggctgccgggttaaaattcgatctccctgcgggcggttacgccccggtcgtaggggtgcttctctttgaccatgtgggtgatgtagtctgcccggcgctccagcgcctccggcagactgtggccggtgagcaccacctccaggcccgcgggccgctcgtccagaaaggcgcagagctcctcctggggcaggaagccccggagggcgtcgatcacctcgtccagcaccagcaggcgggcctcctccgcccgggccagctccgccgcctgccggaggagcgtccggcagttctccgccaccacggccttctcctcgtcgttcatctggaaggtgaacttgtggatgcccttgctgcgcaggacggtgagggtgggaaaccgctccgccgccgtcagctccccgcaggggctgcttttgaggaactgggcgatcaccacccgccgcccccagcccgcacaccggaaggccagcccgaaggccgctgtggtcttacccttgccgtctccataatagatctgcaccaggccattttcttccgccatgccgccacctcgtttcactcagataagatcagtatagcagaatggggcatggggcgcaacgaaaaaagctgtccccgcggctgcggggacagctttttttggagaggctcagaagcggtgcagcttacttcttgtgggccgccatccagtcgcggttgtacttgtgctcgttgaccatcagcaccaggagcacgttcaccagggccacgccggcgaacaccaggtaggccatgcggatctggccgccggtaatcttctgcaccacgccgttgaccaggaagcacagggcagtgactgcaccctggatggggaagatgacactgttcaccttgtcgaagccctggcggccaaagatggaggtgggcagggaggtggtgaagttggcggagccgccgatgcccatggcaatcatgaacagggacacgtagaccagcggggtcacggaatccacagcggtgaagttgagcagcagggcgatagcataccagataccgaacatgaccatggtcttcttggtgccgatagcgtcgtcaatgacgccaaccagccaggagccaaccacgccgcccagggccagaatggtcatgacgttcatagcggcctgctgagagaagccgagctgagtgttgcggataaccaactggctcatgacgcccacagagcagatctggaaaaagccggtggtaatggccgccagccagagctccttggtggccagcagtttgccggtggtccacccgccgtccccctcgacggcgtccttggtgtcatactccttctggtagatctcgtcggagacgttgtcggggttgatgccacgctcccagggctcgttgcggatgaagatcatacccaggatgcccagaacaatggcggcgatgccgatggggacgatgccggtggaaaagttctcgccgatattggtggtgcccgccacggtaggggcgatcagaatggctaccagctgcacatagaaagcggaggcgaagttgtggcccatggtggtatagcccataaccacgcccttctttttggggaaccaggaggccaccagggtgccgcccgccacatagccggcggacatgatgccgccgtacacgaagcacatgcagacggtgtagataacgatgctgggggcgttgcaggccaggatgtaagcgatgccggagatgatgcagcagataccggaggtcatgcgcgcgccgatcttccggttgacctggccggcaatgatgaagaacacgacacccaccagaccggccagggagttcatgttcatgatgtcgccctgctccagccccaggcggtaggccacattgggggcggtgatgttggcgccgtcgttgcacatgccgacgtacaggaagaacatcagcaggcagtagatgatgacgacccagcccacgccgaagtcgactacggacttgcggttatctttggttggttttgccatacgtttccctcttctctctgtgatagattttgccggaacacagcccggcatcctttgcggactataatttaacggtttgcaggctatctttcaatccccacaattcggtaagcaaataaccaaaaagtaagtagaaacagtgtggtaagtgcgcaaatttgtgcaatatagcaaaaagaggtagggaaattttggcggagtgttccataaagaatagaggtcaaaatactgatatcgtcagtttccacaaccttattgttaaatatttgtcatgtgggataagggtataaatggaagagcgccggagggcggagatttcacaaaacgttcacaggcctgttatactttatccaactctgaatgggaaaaaggtggtatcttatttttacagccaaggtaccagacaggcaaggcgatagaccgggaatgcgcgggaggagaaatgctatccggggcgcgttcgaatcaccggcttccctgcatactgctccccggctgtgggggcagacaaacaacaacacgccgcaggcgtgagaagataaaaaaacgcctcccggagctggtaccagctccgggaggcgctgttgtcaggtcttacttgccaacgatctcggcagtgtccatggcgatcatgagctcctcatcggtggggatgagcagcaccttcaccttggagtcggcggaggagatgacggtctccttgccgcggacgttgttggcctcggcatccatctttactcccatgaactccaggccggaggccacggccatgcgggtagcggcgtcgttctcacccacaccggcggtaaacacgatggcgtccacccctcccatggcggcagcataagcgcccaccagcttcttaacactgtactggaaggcctccagggccagctcagcccgctggttgccctccttggcggcgttctccaggtcgcggaagtcggaagacacgccggagatgcccagcacgccggacttcttgttgaggatggtcatcatttccttcatgtcgtagccgtgcttgcccatcaggtactccaggatgccggcgtccagatcaccggcgcgggtgcccatgggaacgccggccaggggggtgaagcccatggaggtgtccacgctcttgccgccatccacggcggccacggaggagccgttgcccaggtggcaggtgatgattttcagctcctcaatgggcttgcccagcatggcggcagcgcgggcggagacatagcggtgggaggtgccgtggaagccgtagcggcggaccttgtcctgctcatagaactcatagggcagggcgtagatatagctcttggcgggcatggtctggtggaaagcagtgtcgaacacacccaccatgggcacaccgggcatgaccttctcgcaggccttgatgccggtgatgttggcgggattgtggaggggggccagggggatgcactcttccagagcggccataacctcgtcggtaatgcgcacggaggaggcgaacttctcgccgccgtggaccacgcggtggcccaccgcgtcgatctcagaggcactcttgatcacgccgtgcccggcgtccagcagggcgtccagcacagcctgaatggcctcggagtgggtgggcatggggatctcgaactcatacttggcgtccttggcgggcaccttgtgagtcaggcggccgtcgatgccgatgcgctcgcacagccccttggcgaacacctcacgggtggcggggtccatgagctgatacttgagggaggagctgcctgcgttgatgaccagaactttcatgaaatcttctctccttacgttaaactatggcttgtgagccggatattcccgtagtagaataagagcacatacatattttattttagccccttttttcccaaaggacaacccatattttgcttgaaagagagaaaaattttactcttgcgtttggaggttcagcccatggccacagccggaatcgtcgcagaatacaaccccttccactggggacacgcctggcacatcgcccggacgcggcggaccctgggggcggacacggcggtggtgtgcgtcatgagcggccactgggtccagcggggggagtgcgccctcacggacaaatggagccgggcggccctggccctctccggcggggcggatctggtgctggagctgcccaccccctgggccatggcctcggcggaggctttcgcccggggggcggtgggcctgctggccgccacgggggtggtggacgtgctctccttcggcagtgagacgggagaactggcgcccctgcgggcggcggcggcggctctggatggtccggactacccggagcggctgcgggccgggctggcccgtgggttgtccttcccggcggcccggcaggcggcggtgggggccgactgcctggccagcccaaacgacaacctgggggtggagtatctgcgggccctgccccctggcatggaggccctgaccatcccccggcggggggcggcccacgacggcccggcggccgggggcttcgcctccgcctcggagctgcgggccctcctccgggccggacgggcggcggaggcggccccctatctccccgttccctggagcggggaggcggcgtccatggcgcacatcgaccgggcggtgctggcccgtctgcgcacgatggacgaggcggactgggccgccctccccgacggcggggcggcggagggcctgcccgcccggctggcgcgttccgcccggacggcggacagcctggaggacttttatgcccgggccaagaccaagcgctaccctcacgcccggctgcggcggctggccctggccgccttcctggggctgcgggcggcggagcggcccccggtggcgccctatgtacgggtgctgggcctcagcggccgggggcgggagctgctgcgccgcatgaaagagacctgtgcccttccggtggtggtcaagcccgcccaggccagggctctggatggggacgcccgcgccctctttgaggcggaggcccgccgcacagatctgttcggcctgtgcttccccacagcccggccctgcgggctggagtggactcgcagcccggtggtgaaggagcgtcagggctgacgacggctccggcgctgaagcaggaagatcaagagggccggaagcgccaggagagtcagaggcagaatgagaaggaaaaacgcgaaggtgaactgataggaggtcagcacggcgtgaagccggtcggccagggtgatggagaggcgtggatagagggtgaaggtgagctccccgtcgggcaggctgtcgaagtgggcggtgtagcaccgctcttccgcctcacgaagggggagggaggagcggacgatgtaaggtacaggctccggggtgcgaattgtgatgtccagagagccaaactccgcccagtgcctggcgggggagagcaggtaggtgaattcctgcgtccagtaggtggtgccctcccgaagaccgtagctgctgctgagataggctactgccacctcacgggttccccaggcgggaaactccaccgtataggtcagggcaaagcggtcaacagccgcgtcctctgtctctacttcttggatggtgaaggggagactctggccgtcggcagtgatggaggacacggcactgtccacatccaccagagagtccatatgtccccggtgctcttccaggtaaaagctcatctggacggaaaggggattttctgtgggattctccatctgatagacggcttccacctgggcggtcaggccatttgagtctcccgctccgctgacatcaaaggtgagctgctcggcggtgacagtgacagggcagccctcgtccaccgtcagggcggaaccgcccgtaccgcccagacgggtaggggccgagttggcggaggccggcgtgagcagtaccagcagcagcgccagggtgcaggctatgagccgattcatatgagacctccttttttaataacaaatagtatctattcaatcaattataacagaatatggggtgggaaaccaccgcagcccggttacaaaaacgcggcggacggcctgaaggcccccccccccccccccccccccccccccccccccccccccccccccccccccccccccccccccgctgcttttttattgtatgtgaacgtggttgtggatgtgctccgaacagtagcagtaatagccgttgcacttggagcagtaacgaaattcctcgttggggtagtcggtgtcggtcttgccgcagacggcgcacttgtggatatagcccttctgctgctgggcctgcttggtggccttcttgaagttgacggtctggcgggaggtctggtatttgacccggccgaagagctggaggaaattgtcccagaagaagataaagtagttcagaatggcaaccagggggatgatgacgccggggagggcggccaggccggaggtaaagacgccaaagaggctgctgaggacgctccagccgaacagggcggcgtcgatccacgccagccacttgatcttgatggggatgatgaagaaaagaagcacctgcatgtttggatacagggtggcgaaggcaaagaacagggagaggttcacgtaggtcatgctggcggtggtgagaagcgggagcagatgggagggatagagaggggcggtgaccgcatagagcaggaaaccgaccaccacgttgagcaggatacccaagccatagaacacattgaacttagcggtaccccactcccgctccagcactgagccgatcatatagtaaaagtaaagagagacggccaggaagaagaggttgctgtccagcgggacaaagacaaaggtgatgatgcgccagatctgtccgtgcagaatgtagtacggcgagaaggcgagcagggcggacagggacacgccgtagctgaactgatccatcagccagacaagtacattgccgaccacaatgaccaacatcaggttgggtatgccgaaccgggggtgcttgtagcagaaccggtccagccagcgttgaattgcactcaagtgaagttacctcccgttgggcggaatgcccgccccgttgtgacgtacaaagtagtgtaccagacggccgggaaaaattcccgaataaattgtaaacatttcgccgccgttatttcagcagcttgcggattttttccttcatggccggggtgagcaccttggccgccgcccggtagggcagggaggggagggccagaaagcgcttttccacctcggcgaagggcagggcagcgaaggcggcgaagaaggcggcccggcgggggttggccttcaggggggaggccagccgggggttgcccgccaccgcctcggccagggggcgctccacctggccgaaccggggggagagggcatcgaacacagcctgcccccgggcggagttcaccagcaccatggagacccccttgtcccgctccaccggcagggccagcttctcgtccaggccccagtagtcggccagggtgaagtcggcggggcggctggtggaggtgtaccggcaccgggcgcaggcggggcgcaggaagagctgcatcccgaagccccggccgtagccggtgcggttgaagtcctcggtatagacgctcccgtcggcaaactgagcggtgaaccaggggtgagaccagccgtgggacttgtccttgaagcgcaccgagacaaccttggagccgcgggcggcctccaggccgtccaggtaagcccggaagaccgccggggagggcaccccgtggcacaccagatcacaggtgagcaggttggggtagtccttccccaagtagcgtttgagcccgtccacctggcagggcacgccggagaagagcaccgccgtcccctcctccagcagcgccttgacctgggaaaagctgccgcccagatcgctctggacgtacttggagccccgcatgggggccagctcgtccaccgtgcgggcgcacacgtggcgggcggtcatgtcctcgtccagcgccgcgccgaacaccgcgcccccttgctccagcacatggcgggccagcagggagaagaagccgcccgaggagctggctgtccgctcggcctcgtcgcggttccagaccgcgtgggccgccgccggggcggggccgggcaccggggggtggaggatggggcaggtatgctcgcacctgcggcacaggatgcaccgctccccaatgacgggccgcaggaagccttcatggtcgggctccatggcaatggcgttcaccggacaaaccgacgcgcaggcggtgcagccggtgcagtcctccgccctgcacagcaccggacggggggcggcctggggctccggctcctccgcgggcaggggggcgccctcgatggcggcccccagataggacagggagtcggcccgggcggccgccagcttctcgtacaccgcgccgtagtctatgggggcgtccaccggggcggtggtgtccaggcccaggatgcggtcggcacagcccagccgggagagcaggctgtagatgcgggagaaggtgggctccgcccgctccctgggggacatggaggtgaagaagtccttctgaaactggagggagaaggccgccccgtggaaggagttggtcaccacggcggaggcgtgccggaacaggcccaaaaactcccgggggccggcgtcaaagaccagctcggccgccccgtcgatcttccgccgggcccccgcgagctgcacgatgggccaaccggtgcgcgccgacagggccaaagcgtagggggccgcctcgccggggtcggagacaaagtagcacaggatatagggcccctgccgtttgggggccgcggccagctctccccagtcctcgccggtgaggaggagggtggggtccagcaccacccgggcgtcccgcccggcagcctcccgcagcagaacctgcccccgcttttcccgcacggacagggcggagaagggagtcagaaagcggcgcagctcctcggccttgtcctccggcagctcaggcactcccaggctgggggcgtaggcgatgcggcggccctcccggacgaagcccagcaggaagggggggtcgaactgcttgtcctggaagatataggggttccagatctggtcgctgcccgccacatacacgtcgtaggccggcgggtcggcccggagctgctcaaaggcggtgtaccgccggggggagagggccatctcctcggccacaaaggcctcgaagcgccggaagcggcgctggaacgccccgtagtggagggcggtatgggcgtcggaggccatgccgcgcacgccgccgctctttttgaaaagctggttggtgcgggtggtgtggggcaggcggtagtcgatgatctcgcagtcgtgccccagggactggatggcccgcatggtggcaagtgcctggagctgtgccccgtagtggtgggcgaaatgaaaggtgatgagtccggtgcgcatggcgctcactcctagaaaatctgagatgaaatcagttcagtatatcccggaactgcggggcttgtcaacgccggctgttagacactcttgccattgtgtctgaaattccaacaggaaccgcagttttgtctatggcgttgcggcgatggatgcattatgatacaattataaaaattgtccgtgggaaaggagcgtgcagattcatgagcttgccggccagactcagggccttcggcatctccaaggccctggactacctggagcgggacccggacgccaaccttcccaagctgatggactggttggataaatacacgggggagcggctggcctcaccctaccgggagctgtttcacagggccatgagtgaccccggcaacaactggcaccgcctcatcaagagcatgtataccgatatcgacagccgggtgctgaaaaagatttttgagaactttgtgattcacgccgggctgatggactggcccagccgcaacgcggcgggggaactgggaaacggccgcgccccctgggcggtgatcatcgacccctcctttccctgcgagatgggctgccgcggctgcggcgcgtccatctacggcgtgcggccctatatggagttcgacagcctggacgaggagattgaggcccggaaggggcggggctgtcatctctttatcttcagcggtggcaaccctctggcccgggagcaggagaccattgccctgtgcaacaagcacaccgactgcgtgttcgccgctttcacgccgccccggttcatcaccggcgagctgtgcgcggatctgttgcgggtgcgcaacctgttccccgccattcaggtggacgaggacggcgccgacgccgcacgggccacggccctgctggggcggtacaagctgcccttcggcgtggcctgccgctgcacagcggagaacgcagagcgggtggccaccgaactctattatgaccgggtcattgccaccggagccaaattctgctggttttttacctgcccggcctacggaccggagcagccggccagcctggagcagctggaggccattcaccggcgtgtgcaggagttccgcaggagcaagccccttctgacattggatttctgggacggacccagcccctcggcggccgccccgcaaggaggaacagcatgagtattgtaaaggatcagaacctggccccggccggccgccggaagatcaactgggtgcgggacttcatgcccgccctgggcggcattgaggcccgcttcgagcaggagcagcccttcgccggcctgcgggtggcggtgtccgtccacctggaggccaagaccgccaacctgggctatgtgctcgccaagggcggggcggaggtgcgcctcaccggctccaaccccctgtccacccaggacgacgtggccgccggactggccgacatgggcgtggagaccttcggcattcacggcgccatgggggaggagtatgagaacctcctcatcgagaccctcaagttcaagccccacctgatcgtggacgacggcggcgatttgatccacctgctgggcggcaagtgcgccgacctgggcgagcacctcatcggcggctgcgaggagaccaccaccggcatcctgcgcctcaaggcccgggagcgggagggcatcctgccctgccccatgatggccgtcaacgacgccaaggccaagcactactatgacaataagtacggcaccggccagtctgtttgggacgccatcatgcacaccgccaacctggtggtggcgggcaagaccgtggtggtggccgggtacggctggtgcggcaagggggtggccatgcgggccgccggcatgggggccagcgtcatcgtcaccgaggtggatcccttcaaggccctggacgccaccatgaacggcttccgggtcatgcccatggacgaggccgccaggtacggcgacatcttcgtcaccgtcaccggctgcaaggacgtcatcaccccgaagcacttcgcggtgatgaagcacaacgccatcctcaccaacgccggccacttcgactgcgaggtggacgtggcgggcctggcggccatggcggtcaaacgggagctgcgccgggacaacatcgagggcttcaccctgcccgacggccgggtgctcaacgtcatcggcgaggggcggctggtcaacctggccgccggcaacggccaccccgccgagattatggacatgtccttctccgtccaggccctggccctggagtggctagtcaagcaccgggacggcctggagaagaaggtctaccaggtgcccgccgaaatcgacgacgccatcggccgggtcaagctggccgccatgggcctgtccatcgacgccctcacccccgagcaggaggagtacctcaacggctggaaggcgtgacggcctctccgcgcagggggacagcgtcccctgtgtaaatccggcggcttgcacaacggcgcccccgccggcgctatacaaagcccctgttttgtctattgcatatcgggaaaaaagtcgatagaatagctacagtcaattgaatatgccttatcgagagcggtggagggaacggcccgatgaaacccggcaacctgcaatgcaaggtgccaaatccggcgaggaaatcgaaagatgaggatggatgagcaccacgcgctccgccatccggcggggcgcgtttttcgtgcccgagtgagaaaggaaggaactacattatggcaaagcgtctgtttacctcggagtccgtcaccgagggacaccccgacaaagtctgcgaccagatctctgacgccgtcctggacgacattctggcccacgaccccaccgcccacgtggcctgcgagaccttcaccaccaccggtattgtcaccgtgatgggcgagatcaccaccaagcactacaccgatattccctccatcgtccgccgcacggtggagcgcatcggctacaccgatccggcctacggcttcgactaccgctcctgcgcggtgatgaccgccatcgacgagcagtcccccgacatcgccatgggcgtcaaccagtcctatgagcaccaggagggcggcaccgacgcggccgatctcatcggcgccggcgaccagggcatgatgttcggctacgcctgcgacgagacggatgtgctgatgcccgcccccatcgacctggcccacaagctggcccgccagctcaccgacgtgcgcaagagcgggaagctctcctggctgcgccccgacggcaagagccaggtcaccgtggagtacggcgacgacggcaaggtgctctcctgccccgccatcgtggtgtccacccagcacgaccccgacatcgccctgaaggagctgcgggaggccgtggtggaggagatcatcaagcccattatccccgcccagtacatcaccaaggacaccaagttctacgtcaaccccaccggccgctttgtggtgggcggccccgtgggcgacaccggcctgaccggacgcaagatcatcgtggacacctacggcggctccgcggcccacggcggcggctgcttctccggcaaggatcccaccaaggtggaccgctccgccgcctacatggcccgctacatcgccaagaacctggtggccgccggcctgtgccgcaagtgccagatcgagctggcctacgccatcggcgtggcccaccccgtctccgttctggtggacacctacggcaccggcgtgctggacgaggagaagctctccgccatcgtcaacgagtgcttcgacatgcgcccggccaagatcatcgagcacctgaatctccgccgccccatctacgagcagaccgccgcctatggccacttcggccgcaccgacgtggatctgccctgggagtacaccgacatggtggagaagctcaagagctatctgtaagcgccggccgtccctgtgcatcatctgtacgcccgccgcaggttctgcctgcggcgggcatttttatgcaacagcagggtagcctggcgccgggccgccgcatcttttcatggcgcgccctgcgcgcatgaagttttataccgttgacaaacgggtgggatctgttaaaatgaacggtgttcagaatgggggcgtgtgtgcatgaatactgtggtcacctcccggcaggcgcttctggccgccagccggacggtcgcccggcggcagggcctaggcgggctgagcatccgcgcggtggcggccgaggcccgggtctccgtgggctcggtctacaactatttttccggcaagacggagctgctggccgcaacagtggaggagatctggatgcagattctgtccgcgccggagggggaggcgccccgggacggctttgcggcctacgtccactggctgttccaccgcattcagagcggagccggggaatatccgggctttttccagggacatgcggcgggcttcctgcccgaggggcggagcgcgggccggcgaaccatggcggaggccctcgggcgcgtccgccagacgctgctggaggcgctggaggcggactgtgcagtgcggccgtccgcctttgatgcttccttttccagggagcagcttgccgctttcgtgctggacagcctgctggggcagatgagccggggcgcggacaactgtgaggggctggagcaggtgctccgcaggctgctctaccgctgagacgggcgcgggaacccgcgccctgttttgcacataaaatgaacaatgttcataatgaggaggaacttaccatggtaaaaaaagaaacattgcttttgctggcggggctggtgtggggggcggcaggcttcaacatcctgcgcatcgggctgctggcttaccccggacatgtaaccctgtggaatttggcgctctctgcgctggtcttcgggctgtttcagggcatggtgttcggaaagctggttcagcggcacaccgcgcgcatactggggtacggcacggagcggaagtggttctggcagttttttgatgggaaatcatttttgatcatggtatttatgatagccttcggcatcggccttcgggccagcggactggcgccggagggcttcatcgccgtgttctacaccggcctgggggcctccctgctgacggcggggctccgctttttactggcagtttcccgcgggtaattttgaaaccctgcctttacttttttccctcatactgctataatggcagagaattcaatgcacatgcagttgcggcggtgccgcagaacggggaagccggtggaactccggcgcagtcttacctctactgtaagcgcggacgaaggtgcacaagccattggcccagcggggctgagaaggcgcgccggaggaggaagcgcaagccaggagacccgctgcagagtggcagttgcgtagctctgaggtggagaggtgcggtgtaccctgggattagggccctcctcagccgcgaggagggcctttttgcgtcgaaagggggacacacatggggaaattggagctctatatcccggtggggcgggagcggctgcgctgcggctacaccaccggcacctgcgccgccgccgccgccgccggggccgccgccctgctgctggagggggcggcgctgcccgccgtgcacatcgacaccccggcgggggtgcgggtggaggcggagctgctggagcacgccgccggggaaggctgggccgcctgcgcggtgcgcaaggacggcggcgacgatcccgacgtgaccgacggggcgctcatctgcgcccgggtggagcgcagcaccgggccggggatcgccattgacggcggccagggggtgggccgggtgacccggcccggtctcgaccagccggtgggggaggcggccatcaactccaccccccgccgcatgatccacgagcagctggaggccgccgcggcccgggcgggctacaccggcgggctgcgggcggtgatctccgtccccacgggggaggccctggcggggcgcaccttcaacccccggctgggcatcgaggggggcatctccatcctgggcaccagcggcatcgtccgccccatgagcgaggccgccctgctggactccctctacctggagatggatcagcagagggccgccggggcgcgggacattgtggtcacccccggcaactacggcgaggccttcgcccgggagaagctgggcctcagcctggcccgctggtgcacatgcagcaattatatcggcgcggccatcgaccacgccgccggggcgggcttccgctcggtgctgctggtgggccacctgggcaagctcatcaaggtgtccgccgggtgcatgaacacccactccaaggtggccgacgcccggcgggagaccctggctgcccacgccgccctggcggggggagaccgggcgctggtaaaggccctgttcgacagccccaccaccgacgcgggggtggagctgctgaggggggccggcctgctggagccggtgatggactccatcgccggggagctggacgcccagctcaagcggcgggcggggccggagctggccatcgagggcattttcttctccaaccagtacggaattttaggaaagacacccggcgcggagggcctgctggccctccaccgggcataggaggttaaaaccatggtacattttatcggcgcgggccccggagcggaggatctgatcacggtgcggggggcgaagctgctgggggaggccgacgtgatcatctacgccggctccctggtcaaccccgccctgctgagctacaaaaaggagagctgcgcggtgtacgacagcgcgtccatgaccctggagcaggtcatcgaggtcatgagggacaccgaggcccggggcggcatgaccgtccggctccacaccggcgacccctccctctacggcgccatccgggagcagatggacgagctggacaagctgggcatcggctacgacgtgacccccggcgtgtcctccttctccggcgcggccgccgccctttgcgcagagtatacactccccgaggtatcacagtcggttatcatcacccgcatggcgggccgcacccccgtgcccgagggggaggagctgcgcaagatggcctcccacggctgcaccatggtgctgttcttgtccaccggcctgctggaggatgtggaacaggagctggcggcggggggctatgcccccgacaccccggcggccatcgtctacaaggctacctggccggagcagcgggtgtaccgctgcaccgtctccaccctggccaggaccgcccgggagaaccgggtcaccaagacggcgctgattacaatcggtcatttcctgggggatgattacgagcggtcaaagctctacgaccccacctttacccacgagttccgggaggccagcaagtgaccacggcggtcatcgcctttacccgccggggggcggcgctgggccgcagcctggcggacgccctgggaggtagcctccacgtcccggcccgcttcgcccccgaggtaggggcggaggcctatgcctccctggagggctggacggcctgggcctgggcgcgggcggacgccctggtatttgtgggggcggcggggatcgccgtgcgggccattgccccccatgtgcgggacaagttttccgaccccgccgtggtcagtgtggacgaggcggggcggtttgtggttcccctcctctccggccacgtggggggcgccaacgagctggcccggagggtggccgccctcaccggcgggcaggcggcggtatccaccgccaccgatgtcaacggcctgttcgccgtggacgtgtgggcccgggagcggggcatggccatcacggaccgggttctggccaaggaggtgtccgccgccctgctggagggaaggccggtgggctttgccagcgacttcggccacccctgcccggagggcctcaccgcaggcccggcggagctgggggtgtggatcaccgaccggacgggggaggggcccttcccccgcaccctgcgtctggtgccccggagcctgattctgggcatcggctgccgccgggggacgccggaggcagccattgcggcggcggcggacgccgccctggcgggcctcgcccccgaggcggtggcgggcgtcgccaccatcgatctcaaaaaggacgaggcgggcctgctggccttctgcgcccgacggggcctgcccctgaccacctactccgcggaggcgctggcggcggtggcgggggacttcaccccctccgcctttgtgcgggggatcaccggggtggacaacgtatgcgagcgggcggcggccgccgccggcgggcggattatcgtccccaaacaggcagacaacggcgtcaccgcggcggtggcgagaaaggatacgctatgaaagtaacggtaatcgggcttggccccggcggcggcgcggatctcaccggccgggcccgggcggccctggaggcctgcgatctgatcgtgggctacaccgcctacatcgatctggtgcgggcggatttcccccagaaggagaccctgtccaccggcatgcgccgggaggtggaccgctgccgggcggcggtggaggccgcccgcaccggcagggatgtggcggtggtttgctccggcgactccggcgtgtacggcatggcgggcctcatctacgaggtggcccaggagtatgaccccatcgagatcgaggtggtgcccggcatcaccgccgcctgcggcggcgcggccgtgctgggggcccccctgacccacgacttcgcggtggtgtccctgtccgacctgctcaccccgtgggagaagatcgaaaagcggctgaccgccgcggcccaggcggacttcgtgctctgcctctacaaccccgccagccgcagccggccggactacctccggcgggcctgcgacatcctgctctccgccgggaaggatcccgccaccgtgtgcggcaccgtccgcaacatcggccgggcgggggaggaggcggcgctcctcaccctgggcgagctgcgggacacccaggtggacatgttcaccaccgtgttcgtgggcagcagccagaccaaggtgatcggcggaaagatggtgaccccccggggctatctccagcggggggaatagggaaatacgcccggcgaaggcgggcctgaaaccagcacagggggaggaaggcgcatgaataaggtattgctgttcggcggcaccggtgagggccgggcgctggcggagtggatggcggcccgggggatcccccacaccgtctgcgtggccaccgagtacggcgagaccctcctccccgccggggcggaggcccatgtgggccggatggacagcggggaaatggaggcgctcatgagggccgggggatactccctggcggtggacgccacccacccctacgccgtggaggtgacggagcacatccgggccgcggcggaggcggcgggcctgcccgtcctccggctggtgcggcagtccgacggcggggagctttgccgcagggcaaaggacatggccggggcggcggacatgctggagcagatgcccggccatgtgctgctcaccaccggcagcaaggagctgcaccactttgcccgccccggactggcagagcggtgctacccccgggtgctgcccatggcggactccctggagcggtgcctgaccctgggctttcccccgaaaaacatcatctgcatgcaggggccgttctccagggagctgaacgtggccctgctgcggcagtatcacattcagaccctggtgaccaaggacacaggggggtatggcggcttccgggaaaaggcggaggccgcccgggaggcgggctgcgccctgctggtggtggagcgccccagccgggagaccggcctgaccctggaggaaattcagaagaagcttatggaggaggagaacgcatgaaggtctatctcatcggcgtaggcatgggcaacccggccaccctgaccggccaggccctggaggccatcggggacagcccggtgctggtgggcgccccccgcctgctggagccctggacggaggggcacgactgcgtccccctcatcgccgcggcggacatcgccgcgtatgtggacaaggccccccgggggccggtgggggtgctcctctccggcgacaccggattttacagcggggccaaggggctgtggcccctgctggggaaccacgaggtgatcaccatccccggcatctcctccctgtcctacttctgcgccaggctccagaccacctggcaggacgccaggctggtcagcgcccacggccgcagccacaacgcggtgggggagatccagcgcagcgccaaggtctttgccctcaccggcggggccaccaaggcggaggacatctgccgggccctggccgagcgggggctgggacaggtgcgggtctccgtgggcgagcggctgagctacgccgacgagcgcatcgtcaccggcacggcggcagagctggcgggggagacctttgccgacctctccgtcctgctggcggtcaaccccgatccggtggcgcggccgtggaacggctccggcctgcccgacggggcctttctccggggggacgtgcctatgaccaaggaggaggtgcgcgcgctggccctgtccaagctgcgtctggaggcgcaccatgtggtgtgggacgtgggggcgggcaccggctcggtgtcggtggagtgcgccctctcctgtcccgccggccgggtgtacgccgtggagaagaaggaggaggccctggccctgctggcggagaacagggcccgcttccacgccgccaacctggaggtggtggcgggcaccgcgccggaggcactggaggcgctccccgcccccgaccgggtcttcctggggggcacctcgggcagtctggaggacattttgaacgtgatcttccgcaagaaccccgccgcccgggtggtgtgcaccgccgtcaccctggagacggtgggggaggccgcccggtgctttgccgggctggagggggcggacatggtgcaggtggccgtcacccgcacccggcccgccgggcgctaccacctgatggacgcccagaacccggtttggatcttctccggggagggccgggcatgagcgcgccccgtctgctcctctgcgcccccgccagcgggggcggcaagaccaccgtcacctgcgcccttctccaggccctggtcaaccggggggccgggccggtggccttcaagtgcggcccggactatatcgaccccatgtttcacagcgagatcatcggggccaaaagccgcaacctggatctcttcttcctgggccgggacaccgcccggtacctgctggagaaaaacagccggggcagcggcttggccctcatcgagggggtcatgggctactatgacggcatcggcctgagcgccgacgccagcgcctatgacctggcccgggctaccggcaccccggcggtgctggtgctggacggccgggggcgggctctcaccgccgccgccgcggtgaaggggatgagggatttccggccggacagcggcatccggggcgtgattctcaaccgggtgtcccccatgctctacccccggctcaaggaggccatcgagggggagaccggcgtaaccgtgtacggctatctgcccaatctgcccggctgcgccctggagagccgccacctggggctggtcaccgccgccgaggtggcggggctgcgggagaagctctccgccctggccgcccaggcggagaaaagcgtggacatagacggcctgctggccctggcggcctccgccccggccctggacgccgcggcgcccgccctgccgcccccggtggaggggcggcctcgcatcgccgtggcccgggacaaggcgttctgcttctactacgccgacggcctggagctgctagagacgctgggggccgagctggcggagttctccccactggcggatgagagcctgccggagggcgcctgcggcctctacctggggggcggctatccggagctgttcgccggggccctggcggccaacgcccccatgcgggaggcggtgcgcgccgccgtggcgggggggctgcccaccgtggccgagtgcggcgggttcctctacctcaaccggctgctctccgacggagagggccgggactggcccatggcgggggcgctccccggccgggcggccaacaccggcaagctgggccgcttcggctatgtgaccctcaccgcccaaaaggacggactgctgggccgggcggggacgcgcctgcccgcccacgagttccactactgggacagcgacgcgccggggagcgacttccgggcggacaagccccagagcagccgggggtgggactgcgcgttccacacccccaccctttacgccggctttccccacttccacttctgggccgcgccgtcggcggcccgcaattttgtggcggcggcccgccgctatgcacaggaggcatcgctatgacactggatcaggtgattgcaggaattacccccgccgataaggcggccatggagcgggcgaaggcccggtgggactccatcgccaagcccctgggcagcctgggggcgctggaggaagcggtcatccgcatcgccggcatgacgggcagcgccgaggtggacatttccaaacgggcggtggtggtcatgtgtgccgacaacggcgtggtggcccagggggtcacccagaccggccaggaggtcaccgccatcgtggcggagaacatgtccaccggcgacaccagcgtgtgcgccatggcccgctccgccggggcggaggtggtgcccgtggacatcggcacggccgtccccctcaccggggcgcgcatcgtgcagcggtgcgtccgccggggcaccgccgacatgacccagggccccgccatgagccggggagaggccgtgcaggccgtcctgaccggggtggagaccgcccgggagctgtgcgccgggggcgtgcgcctgctggccaccggggagatgggcatcggcaacaccaccacctcctccgccgtggccgccgtgctgctgggccaggagccggtggtgatgaccggccggggggccggcctgtccgacgcgggcctgcagaagaagatccacgccatcgagaccgccgtggcggtgaaccggcccgacccctccgacgtgctggacgtgctccacaaggtgggcggcctggacatcgccgggctggccggggtgttcctggggggcgccctgtgccatacgccggtgctggtggacgggttcatcgcctccgtggccgccctggtggccgcccggttgtgcccggcctgtaaggactacatgctgggctcccacgcgtcggaggagccggccagccggctggtgctctctgaattgggcctgcgccccttcctctacgccgggatgcgcctgggcgagggcaccggggccgtggccgtcatgcccctgctggatatggggctggcggtctaccgggagatggccacctttgaggacaccaacatcgaggcctaccagcccttaggctaggggggattgcaccccctagatacggcggcttcacacagatttttatttgaatttgccgcaagtgggcgaaactctgcgaggcggtagggcgggggcttgcccccgccgaaggaggtgcatccatgctgatactggtctccggcggctcggccagcgggaagtcggaatttgccgaggggctggtcgccgcctccggcctggagacgcgggcctacctggccaccatgcaggtgtgggacgccgagagcgagcgccgggtggagcgccaccgccggatgcgggcgggcaaggggtttgccaccgtggagtgtccggtgaacctggccggggccgtcctgccggccggatgcgccgccctgctggaggatctctccaacctgaccgccaacgagtttttcggcccccaggggcgggagggggccttcggccgggtgctctccggcgtggagcgggcggcggagcaggccgccctgctggtggtggtcaccaacgagctgttctccgacggaatggactacgaccccgagaccctggcctacctggacgtgctggcccggctgaaccgggcggtggcccggcgggccgactgggtgtacgaggtggtctgcggcatccccatcgcctggaaaggagcaaacccgtgaaatccctcatcattgcctttgccatgtactccaagttccccatgccccgggtggactgggagaaaaaggccctctcctgggccctgtgctggttcccactggtggggctggccgtcggggcggtgctgtggctgtggctggccttggccggctggctggggttcggcgtggtctttaccgcggccctggctttgctgctccccatcgccctcagcggcggcatccatctggacggcttctgcgacacctgcgacgccctgtcctcccaccagagccgggagcggaagctggagattctgaaggactcccacaccggggccttcgccatcatctgctgcgggctgtacctgctggtgttcttcgccgcctggtgcgaggcggcgcccgcggggggggccgccctggcgctggccctggggccggccttctcccgcagcctgtccggcctcttcgccgtcaccctccccaacgcccggggcaccggcctgctggccaccttcactggccccatggacgcggccaaggcccggggggtgctggcggcgtgggccgtcctcaccggaggggccatggtggccgcggatgtgcggacgggtctggccgccctggtgggagcgggtctggcgtgcgtctactatgcggtgaccacccggcggcagttcggcggcgtcaccggcgatctggcggggttcttcctccagctgtgcgagctggggatggtgctctgcgccgcggtggggcagaggctggaggtgctgttatgattttgattatcggaggcgcgggccagggcaagctggactacgtgctgcaaaagaccgggtacggccccgcccaggtggcccgcaccccggaggaggcccggacacggcccgtctttgccgggctggaggactggccggagctggacgaggcggcgctgctggaggccaacccggacgtgattttgatctgcgacgaggtgggctgcggcgtggtgccggtggagccggcccagcgggcccgccgggaggcggtgggacggctttgctgccgcctggcggagcgggcagagcgggtggagcgcatcctctgcggcctgcccatggtattgaaaggagaaggcccatggaactgattctgatgcgccacggtaccacccagggcaacctggaacggcgctttatcggcacgctggacgtgccgctgctcccccagggggaggagctggcccggcgggtgggcgccaccctgccggcggtggagcacatctaccgcagccccctccagcgctgccgccgcaccgccgagctgctgtggcccggcgtggagatgacggtggtggacgagctgcgggagagcgatttcggcccctttgagggcaagaaccacgaggagctgaaggacgaccccctctatcaggcgtggctgggcatgggggacaggcctaactttgccgccatgccggtgggggagagcgcccagcaggtcaccgaccgggtgtccatcggcctggaaaagacggcggccgacgccgcccgccggggctttggccgggtgggagtggtgtcccacggcggggccctcatggccctgctggccaagtacggccggccggagcgggactactacggctggatgtgtcctaactgcggcggcttccgggcggagctgaatccggacaccctggagctgaccattctggaggagtacaggggggagaaggggctatgagctggggggtatcccacctgctggccctgctgaccggcttctgcctggatctcctgctgggggatccccactgggcgccccacccggtgcgggccgtcggtgtgctgatcgccgccctggagaagcttctgcggcggctctttcccaagtcccccggcggcgagctggccggcggcgcggtattggtggcgctcaccatcgccatccccaccggcctcaccgccctgctgctgtgggggtgcggcctgctcagcccctggctggcctttgcggcggaggcgctgctgtgctatcagctgctggccgccaagtccctgcgggacgagagcggcaaggtgtaccaggccctcaaggcgggagacctgtccggcgcgcggcgcgccgtgtccatgattgtggggcgggacaccgagcggctggacgaggccggcgtggccaaggcggcggtggagaccgtggcggagaacgcctccgacggggtgatcgcccccctcatcttcctggccctgggcggcgcgcccctgggtatgctctacaaggcagtcaacaccatggattccatggtgggttacaagaacgaccgctatctctacttcggccgggcggcggcacggctggacgacgcgctcaactttctccccgcccgcatcgccggggtgctcatgtgcctgggcggcgcggcggcgggctacgacgggaagaacgcctggcggatcttccggcgggaccggaaaaagcacaagtcccccaactccgcccacaccgaggcggcctgcgccggggcgctccagctccagctggcggggcccaactactacttcggccaactggtggacaaacccaccatcggcgacgatcagcggccggtggaggccctggacatcctgcgggcgggccggattctctacgccaccgccttttttgccctgctgctcttctgcggcgtgcccctgctgattctgctgttcccgtaacaccggccctgcggcggtttgtgtctcccgtagggcccgccgccccacccgtccaccatcctgaccagagagaagggaatcaccatgaccccatatacccacggcggcgacgtgctcacggcgcgggcccgcttcggcggcgacgtgctggactgctcggccaacctgaaccccctggggatgcccccggcggtgcaggcggccgcgggggccgcgggcgccgcagactcggcccgctaccccgaccccctgtgccgcgccctccgggcggccatcgccgcccacgacggggtggcgccggagcaggtgctctgcggcggcggggcggcggagctgatcttccggctggcctacgccctgcggcctcggcgggcgctggtcaccgccccggccttctccgagtacgaggaggcgctgacggcggcggggtgcgccgtgacacgccaccccctgcgccgggagaaccgctttgacgtggacggcgggctcctggacgccatcgcgccgggggtggagctggtcttcctctgcacccccaacaaccccaccgggcggctggtggacggggcgctgctgcgggcggcggcggagcaatgccgggccgttggggcggtgctggcggtggacgagtgctttttgccccactccgtcggggcgggggcggggctggccccctgtctggcggagtaccccaacctgctgctcctgcgggcctttaccaagagctacgccatggcgggcctgcggctgggctacgccctctccgccaacggcggacttctggagcggatggccgccgccggcccgccctggagcgtctccacccccgcccaggcggcggggctggccgccctggagcagtgctccgactggccggagaaggcccgggccctgctggcgtcggagcgccccacactgtcggacggcctggccgccctggggctggaggtggtgcccggacaggccaactacctgctgttccgggcggcgggcgcggccgatttgaacgaccggatactcacgcggggcgtgctcatccgctcctgcgccaactaccacggcctggggaacgactggtaccgggtgtgcgtgggacaggcggaacaaaaccggcggctgctggccgctttaaaggaagtgctgtgatggccaacgcgattatgatccagggaaccgcctccaacgcgggcaagtccctgctggcggcggggctgtgccgcatctttgcccaggacggctataaggttgcccccttcaaatcccagaacatggccctcaactccgccatcacccccgacggctttgagatgggccgggcccaggtggtgcaggccgaggcggcgggggtggcccccgacgtgcggatgaaccccatcctgctcaagcccaccagccacgtgggctcccaggtgattgtcaacggcgtgccccggggcaccatgccggcgggggagtacttccgctaccgcaagagcctcatccccgaggtgatggcggcctacgagtccctggcggcggagtacgacatcatcgtcatcgagggggcgggcagcccggcggagatcaacctgcggcaggacgacattgtgaacatgggcatggcccgccgggctaacgccccggtgctcctgtgcggcgacatcgaccgggggggcgtgttcgcctccctctacggcacggtgaagctgctggagccggacgagcaggcgaggatcaagggcctgattatcaacaaattccggggggatgtggatatcctccgccccggcctgggggagctggagcggctttccggcaagccggtgctgggagttgtccccatgctggacgtggatgtggacgacgaggactccctctcccaccgcctgagcggagggggaagggtgggcctggtggacattgcggtggtgcgcctgccccgcctgtcaaacttcaccgacttcaaccccctggagcggatggaggaggtcaccctccgctacgtccgcaatccccgggagctggggcaccccgatctggtgctcctccccggcaccaagaacaccatggacgatctgcgctggctgcgggagagcggcatggaggccgccgtgctcaagcatgcctcggccggcggagcggtgatcggcatctgcggcggctatcagatgctggggaataccgtctccgaccccgacggggtggaggggggcggctccctccggggcctgggcctgctccccgccgacacggtgttccagggggagaagacccgcacccgggtgacgggggcctttcgcgccccggaggggctcttccgctccctggccggcgtggccttcgagggctacgagatccacatgggccgcaccgagagcggggcggcccccctggcggagttcaccacccagaccggggagcggcgctccgacggcctcagcgcgggcaacgtgtggggctgctacgtccacggcatcttcgacaaggcggaggcggccgccgccctggtgaacgccctgctggaggccaaggggctggagccgggcgcggccagcgtggactggcaggcgtacgcccagcagcagtacgacaagctggcggccggcctgcgggccagcctggacatgaaacgcatttaccggattctcaacggggaggaatagagccatgaaacacattgaattgcagcgggtggcccccgcggacattgaggcccggagcatggagctcatcggccgggagctgggggagcgggtgttcccggcggagcagctgcccgtggtcaagcgggtgatccacaccaccgcggactttgagtacgccgacagcctgctcttttccgccggggcggtggaggcgggcgtcgcggccatacggcagggctgcaccatcgtcactgacacccagatggccttctccggggtgaacaagcgggtgctggagaaattcggcggccgggcggtgtgcttcatgtccgacccggacgtggccgcggaggccaaggcgcggggggagacccgggccaccgtgtccatggagcgggccgcccggctggaggggccgctggtgctggccatcggcaacgcccccaccgccctggtgcgggcctgcgagctgatcgacgcgggggagctgaagcccgccctggtcatcggcgtgccggtgggctttgtcaacgtggtggagagcaaggagctgctgctcaccctggacgtgccccacatcgtggcccgggggcggaagggcggcagcaacgtggccgccgccatctgcaacgccatgctctatcaggccagcaacaacgcgcgggaataacgggagggacgcacaatgacagagagagcggttctggcggtgtccttcggcaccagccaccgggacaccctggagaaaaacatcgcggccattgaggccgagctggccgcggccttcccggagcggacggtgcgccgggcctttaccagcggcatgatcctccgcaagctggcgggggagggcacccacatcgacaacgtgccccaggcgctggagcgcctgctggccgagggctgtaccgacgtggtggtgcagcccacccacgtgatgaacggggaggagtaccacaagctgctggcccaggcggagccgtaccgcgcccgctttgcccgcatggccttcggccgccccctgctgacggcggcggaggactacgcggccctgggccgcgccctgatggaggcgctgccggcccagcgggcggacaccgccgtgctctacatgggccacggctcggagcaccaggccaattcggcctatgccctgatggagtacaccttccacgatctgggccggaaggacgtggtgattggcacggtggagggctaccccggctttggggaggccctgcgccggctgaaggagcggccccaggtgcggagggtggagctgcgtcccctgatgaccgtggcgggggatcacgccaagaacgatctggcgggggacgaggaggactcctggcggcggcgtctggaggccgagggctacgagacggtctgcgtgctcaccggcctgggggagcacccggcggtgcgggcgctgtttgtggagcacgcccggcaggcggagcagctccaggcggaagcctgttgatatagatccgggggccggaaacgggaagacgggtgcaaatcccgcgcagtcccgctgccgtaagagaacagccggtgcgcacgggccactggggcgacccgggaaggcgcgcagcggcggagacgctcaagccggaaaaccgtaccggctccgaattcacagccacctacgagcgataggaaaggatgaaacacatgatgaatcaacgaaacacacggcttctgcgcacggcagcggtgctcgtcggcctgctgggcgtgctcaccatgagcgcctcggccatgcacattgccgagggctacctgccggtgggctgggccgccggctggggcgtggtatgcgtcccctttgtggtggcgggcttcctctccatccagaagaaggtcgcccaggcccccaaggccaaaatcctgctggccatgtgcggagcgttcgccttcgtgctctccgcgctgaaaatcccctcctttgaaggttcctgctcccaccccaccggcgtggggctgggcgccatcctgttcgggcccatgaccatggcggtgctgggactgatcgtcctgctgttccaggccctgctgctggcccacggcggcctgaccaccctgggggccaacaccttttccatggccatcgccggccccatcgtgtcctgggcggtctacaagctgctgcgcaaggcaaacgccccggcggcggtggcggtcttcgccgcggccgcgctgggcgacctgttcacctatgtggtgacctcggtgcagttgggcgtggttcacggcggcattgggaaattcctgatgatcttcgccgtcacgcagatccccctggccatcgccgagggcctgctgaccgtggtggtgttcaacgtgctggagaagtacagccgggaagagctccacgccctgtgcgtgctgtaaggagggaaccggaatgaaggtatggcagaaaaacctgatcctgatcgtgctggtggtgctgctggcggcgctgccgctgtggctgctgcccgacgccgagttcggcggcgcggacggccaggcggaggaagcgatcctggagcttcagcccgactatgagccctggtttgagccgattctggagccggccagcggcgaggtggagtccctcctcttcgccctccaggccgccatcggcgcgggcgtggtgggcttcgtcctgggccgcatcaccaaaaagccggagaagagggagcagggctgatgggaaccgaccgctacgcctatcaatcgcggctgcggcggatctcccccatgccgaagctgcttctgaccggctcggcgctggtgctctgcctgctctgcgacagcgtaacggtcggcctggtcaccctgctggggatgtgggggctggttaccgccctgggcggactcagcccccgcgtcttcctgcgctttctgtgcgtcccgatggccttcctggccatcggatgcgtgacgatcctgatcaacagctacccccagggcgcgccggtgctgcttgccgtgccggtgggggagcggctgtggggctttgacggggcggcgctgctccgggccgggcggctgttctgcaaggcgctgggggcggtgggggccatgtacttcctggcactgaataccccggtgaccgatgtgaccatggcgctggagcggatgcacgtgccccacctgctggtggagctgatggagctgatctaccgctttatctttgtcctgaccgagaccgcctcccgcatccgcctggctcaggagtcccggctgggctatcagggggtgcgccgctccctgtcctccctgggcaccctggcctccatggtgtttctccgggcgtggcggaaggcggaccgggtgtataccgccctggagtcccgcggctacagcggaagcctggtcaccctgtccggcggctatgcgcggggggcgtggctctacccgctgacggcggcggtggcggcggttcagctggcggcatggtatctcgagaggagcgtgatgggatgatggaggccgcgattgaggccagagagttgcgctatacctatgaggacggcacggcggcgctgaagggcatcaacctccgggccgaacggggaaagatcacgggcatcctgggggccaacggggcgggcaagtccaccctgtttctgaacctcaacggcgtgctccagccgtccgccggggagatcctgctggacggcgcgccggtgaagcgggaccggaagggcctgaccgagctgcgccgccgggtaggcatcgtgttccaggatccggacgaccagctcttctccgccgacgtgtaccgggacatctccttcggcgcggtcaacctgggcctgcccgaggcggaggtgcgccgccgggtggaggcggccatggagcgcaccggagtgtcccacctgcgggacaagcccacccacgccctctccttcgggcagaagaagcgggcggccatcgccggcgtgctggtcatggagccggaggtgctgattctggacgagcccaccgccgggctggacccccagggggtgagcgctctgctggagctgctggccagcctgcgggacggcctgggcatgaccattctcatggccacccacgacatggacgtggtgcccctgtgctgcgactacgcctatctgctgggcgggggaagcgtgctggcccaggggacgccggaggagctgtttgcccaggcggagctgctgcgggccaaccacctgcgcctgccccgcatcgcccacctgatggcgattctccgcgaccgggacggcctggacgtggccccggtgggcaccattggggcggcccggcgggagctgctgcgattgttgaaacaggaggagttattgtgaaacgaggcattctgtacggcgtcggagtgggccccggcgatccggaactgatcacccgcaaggcccagcggatcatcgcccaggcggcggtgctggcggtgcccgacaagggcagcggggagaagaccgcgctgaccatcgccggcgagctggccgaggggaaggagattctcctctgcgacgcccccatggtgcgggacgacgccgccctggacgcggcctatgaggccaacgccgaccgggtgtgcgccctgttggacggggggaaggacgtggccttcctcaccctgggcgatcccaccgtctactccacctacctctacctccaccgcaaggtgacggcccgggggtatgaggcggagatcatccccggcgtaccctccttctgcgcggtggcggcccggctgggcagcgccctgtgcgagaaatcggagcggctgctcattgtccccgcctcccacaaggacgtggacgactgcctggacgtggacgccaacctggtgttcatgaaggcgggccgggagatcggcgcgctgaaggagaagctggcggagaagggcctgctggagcgggcgtccatggtggccaactgcggcatggagggggaggcggtctacccccgcttcgccgagctgaccgatggcagcggctacttctccgtggtgctggtgaagaagggggaagaggcttgaacatccgtatgaccggcctggactggcggaaggcccccatcggtctgcgggaagccctctccttcacccggagccgggtggtggagctggaccggctgctccgggcggcggagggggtggagggctgcgtgctcctgtccacctgcaaccgcacggagctctacctctcctgcgcctccggggcggagccggagccgggggcgctgctgtgcgcggcggcggggctgccctacgcccccttcgccggggccttcgtcacccgcacgggggaggaggccgcccggcacctgatggaggtggccggcggcctgcgctcccagatctggggggaggatcagatcctcacccaggtgaagggggcggcggccgccgcccgggaggccggcacggcagacggggtgctggagatcctgttccgcaacgccgccgccgcgggcaaggagatcaagaccaaggtgcccctcaccggagtgccccgctccgcggctcagagcgcggtggagcggctggcgcgggacgcagggggcctggagggcaagcgggccctggtcatcggcaacggggagatgggccgcctgtccgccgctctgctccaccggctggggtgcgccgtcaccgtcaccctgcgtacctaccgccacggggagaccgtggtgcccgccgggtgcgccgtggccccctatgaggagcgctacgccgccatgaagggggtggacctgctcctctccgccaccaccagcccccactacactatctctgcccgggagctggcggcggtggaggaccacccccgcctgctggccgacctggccatcccacgggacatcgagcccgccgtgggggagctgcccggcgtgaccctctacaacgtggactccctaggggtggacacacggcgggaggtgcccgccgccgccgcggagatcgtggagcggcacctggagcagatggcccagtgggagaactaccgctcctgcctgcccggcctggagcgggtgaagcaggcggtggccgcccgggtactgtccaccgatctggacggcccggaggccaggggcctggtggagctggccgtggggcgggcggtggacctcctctccggcgcgctcaaggagaacctgacgccggaggagctggagcgctgcgcccgcaagatcgaggtacataccgccgccaaacccaggtggcccctgcccgagcagcggcccctccgcttcccgctgttcgtcaatctggcgggggagaaggcggtggtcgtgggcggcggggccgtcgcctgccgccgggcggaggtgctctcccgcttcggcgcggaggtgacggtgatcgccccccgctgtaagaccccgccccagggcatacagtgggaggggcggccctatgcccccggcgatctggccggggcggccctggcagtggccgccaccgacgaccgcgccgtcaaccgggcggtgggggaggaggcccgcgcgctggggattccggtcagcgtggccgactgcccggaggagtgcaccttctttttccccgccgtctgtaccggcgagaatctggtggccggggtcatcggccggggcgacgaccacgcccgcaccgcccgggcggcccgggccatccgcagcgcattggagggattggaatgaagaccatacgtgtcggcagccgggagagccggctggcggtggtgcagtctgagctggtgatggacgccatccgcgccgcccacccggaggtggggctggagctggtgaccatgaagaccaccggcgacaagatactggaccgcaccctggacaaggtgggaggcaagggcctctttgtcaaggagctggacgccgccctgctggacggccgggtggatctgaccgtccatagctgcaaggatctccccatggaggaggatccacgcatccccctggcgggcttctcccgccgggaggacccccgggacgtgctggtgctgccccagggggcggaggagctggacccctccaggcccatcggctgcgcctccgcccggcgggcggtgcagctgcgggcgctgtttcccggcgtggcggtggccccggtgcggggcaacgtgctcacccgcctgcgcaagctggacgaggggcagttctccgccttggtgctggccgccgccggcctcaagcggctggggctggaggcgcgcatcacccggtacttcacggtggaggagctgctccccgcggcgggtcagggcattttggccctccagacccgggcgggggaggagctgtcctgcctggacggcgtactggacgccgacggaaccgactgcgcccgggccgagcgtgcctttgtccgcgccctggacgggggctgctccgcccccattgcggcccacgcccggctggagggcgataccgtgaccatagacggactgtatgtaaccgacgcgggcgaagtgcggcgggggcggctcagcggcccccgcgcccagggggaggccctgggtgaggcgctggcccgcaggctgaaggagggcggaacatgcctggaaaagtgacactggtgggcgccggccccggcgaccccggcctgctgacccgcaaggggctggaggccctggagaaggccgatgtggtggtgtacgaccgcctggtcagccccgccatcctggccctcatgcccgagggggcggtgaagatcaacgtgggcaaagaggcgtcccgccaccccgtgccccaggagcagatcaaccggattctgctggagcaggcccagcagggccacaacgtggtgcgcctcaaggggggcgaccccttcctgttcggtcggggaggggaggagctggagctgctggcggagcaccgcatccccttcgaggaggtacccggcatcacctccgccatcgcggccccggcctacggcggcatcccggtgacccaccgggactgctgctcctccctgcacatcgtcaccggacaccagcgggcggggaaggagctggccatcgacttcgaggccctggtgcgcaccgggggcaccctggtcttcctcatgggcgtgtccgccctgcccaccatctgcgccgggctgctggacgcgggcatggctccggacacccccgccgccgtggtggagcggggcaccacccctgcccagcggcgggtgagcgccaccctggcggagctgccccgggcggcggaagcggccgctgtccagagccccgccgtcattgtggtgggggacgtgtgcgccctggccgaccagttcgactggttcgaccacctccccctcaagggaaagcgcgtggtggtcacccggccccgggagcgggccggcaccctgtcggcccgcctgcgggcgctgggggccgacgtgtgggagtacccctgcatcgccaccgtgcccatcaccccctgccccgccgtagacggggcgctggagcggctgtccggctatgagtggctggccctcaccagccccgccggagtggacgcggtgtgggcctgcctggacgggaagggcctggacgcccgcgccctgggcggcctgaagctggccgccatcggccccggcaccgccaaggcgctgtccgcccacggcctgcgggccgactatgtgcccgaggtctacgacgcggcccacctgggggccggcctgcccgcccggggccgggtgctcattctccgggcggaggagggctcccctgccttgacagaggccctgaaggggcgtaacattgggtatgacgacgtggcctgctaccgcaccgtgtacgagaacccccgctccgacgagctgcgggcggcggtggagtccggcgcggcggggatcgtcaccttcaccagcgcctccacggtcaaggggtttgtcgcctccgtgggggaggacgcggacttctcccgcatggtgggggcctgtatcggggcgcagaccgctgccgaggcccggaagcacggcatccccgcggcggtggcccgggaggccaccatggacgccctggtggaattgattacagccctgcgggattgagaaaggaagcacatatatggaactcattcaacgcccccgccgcctgcggggaagcgacgcggtgcgccgcctgtgccgggagacccgcctgtcccccgacagcctgatctaccccatcttcgtggacgagaccctccgcggcaagcggcccatcgaggccctgcccggccagttccactacggcctggacgcggtgtgcgaggcggtgtccgactgcctggccgccggggtgacccactgcatcctcttcggcctgccccgtgagaaggacgccgtgggctcctccgcctgggcaaagcacggcgtggtgcaggaggccatccgggccatcaaggccaaatacccggatttctatgtgatcaccgacgtgtgcatgtgcgagtataccgaccacggccactgcggcatcctctgcggccagagcgtggacaacgacaagaccctggaggtgctggccaagaccgccctgtcccatgtggaggcgggggcggacatggtggccccctccgacatgatggacggccgggtggccgccatccgggccgtcctggacgagcacggctatgagaccacccccatcatggcctactccgccaagtacgcctccgcgttctacggccccttccgggcggcggccggctccgccccctccttcggcgaccggaaggggtaccagatggacccccacaaccgcaaggaggccctcaaggagtgcgccctggacgaggcggaaggggcggatatcctcatggtcaagcccgccctgagctatctggacgtgatccgcgagtgctccgacgcctttgatctgcccatgtgcgcctactccgtctccggcgagtacgccatgatcaaggcagccggggcggcagggctggtggacgagtaccgcatcatgtgcgagagcgccctgtccgtgttccgggccggggccaatatgctcatcacctactacgccaaggagctggcccaggccatacagaagggggacatcggctgatggatatctcggaacagctctttgagcgggccaagcgggtgctccccggcggggtcaactccccagtgcgggcctaccgggccgtgggcatggccccccgcttcatcacgcgggccgacggggcctatatctacgacgaggacgggaagcggtacatcgactacgtctgctcctggggccccatgatcctgggccacaaccacccggtgatccgggaggcggtggagcgggcggtaaaggacggcctctccttcggcgcccccacccgccgggaggtggagattgccgagttgatgatcggcatggtgcccaacattgagatggtgcgcatggtgaattccggcacagaggcggtcatgtccgccctccggctggcccggggggccaccggccgggacaagctcatcaagttcgagggctgctaccacggccactccgactgtatgctggtcaacgccggctcctccgctctggcggggggccaccccagcagcgccggcgtgccggtgggggcggccagggacaccctcaccgcccagttcaacgatctggccagcgtggaggccctgctggagcagaaccccggccaggtggcggcggtgatcgtggagccggtggccgccaacatgggcgtggtgggccccgcccccggcttcctggagggcctgcgggccctgtgcgacaagcacggcgccctgctgatcttcgacgaggtgatcaccggcttccgcctggcccccggcggcgcccaggcgtacttcggcgtgcgggccgatctggtcaccttcggcaagatcatcggcggcggaatgccggtgggcgcctactgtggcagccgggcgctgctggagcaggtggccccctgcggcccggtgtaccaggcgggcaccctcagcggcaacccggtggccatggctgccggcctggcccagctcacctatctccgggagcatcccgaggtgtacgagcacatcaacgccaggggcgcggctctggcggagggcctgcggggactggtgaagcgcaccggcgcgccggtggtcgtcaaccagctcggttccctgctggcccccttcttcacccccacggcggtgaccaccttcaccgacgccaagggcagcgacgtggccaagtacgcccgttacttccaggggatgctggagcggggcgtggccctggcccccgcccagttcgaggccatgttcgtctccgaggcccacacccaggcggagctggacgccaccctggccgcggcggaggccgtgttccaggcgctctgaggtaaaagcaaagcggcccccggaacctgaatggttccgggggccgctctgcgttcagccttcgattttgtccacccgccgctggtggcggccgccctcaaacggggtgttgaggaaggcgtccacgatgcggtcggccatattgttcccgatcagtccgccgcccatggccagcatgttggcgtcgttgtgccgccgggtcatctcggcggagagaggctcgctgcacagggcacagcggatgcccttcaccttgttggcggcgatggagatgccgatgcccgtggtgcagataacgataccccggtcgcacgcgccggaggccaccgcctccgcagccgcccggccgaagtcggggtagtcgcagctctctgcggtgtagcagccgaagtcctgatactccaggccgcgggcgtccaggtactccatgacgtggcgcttgagggcgagccctccgtggtcggaacccaatgcgatcatatatatttcctccttatccgagtgtgtgaaatacgggctggtgcttttcataggtgcagacgcggcggaagccgcactcccgcagcagcgcgcaggccgcccggactcccttgcccacgtccgccggggtgtgggcgtcggagccaacggtgacgagctcgccgccgcagtcccggtagagggccaggatgggccgccactcctccagggtgcgcccccggcaggtgttgacctccatgcccctgcccttctccacagccgtgcgcaggatggcccggatggcgtcctggtagcggttcagggtgacgggggcctgcatatagcgcagggggtagatgaggtgggccagcacgtcgtaaaaatctgtggcggccagcagagccagggaggcaaagtagtcgtccagggcatcatagcaggcctggacggtggagaaatccaggaagaacaggtcggtgccgcccctttccggcgagaggttgtggaccgagcccaggatgaagtcggcctccgggcgggcacagatggccgcagcggcggccggattcagatggggcatgcccagctccaggcccagcttgagggtgagacgctccccggcggcggggagggcctgctgatgctgggccacggcgggggcccagtcgtagccctccgccggaaccccattttcgtcgaggaagtcgaagtggtcggtgacgcacagttcatccaggcccgcgtctgccgccgcctctgccagctcggacaggggggcgtgggcatcaaaggagagccggctgtgggtgtgatagtcggacagatacatacaaattacctcacaagtgccgctgggcgggggattagaagggccaggaggggagccaccgcagcaggcaggtcccataccaggaggggatctggatgcccaccagcacgggatagaacagggcgtagagggccgcggcccccgccgtgacggcgtacatggcgggcttccaggcgatgagctcctcctgctcggacaggctgtaaaacacatagcacagggccagaatgagaaacagcaccgaggggaagtagtgataggcgaaggtgatgcggccgatgaagaaccagggcaccagctgggccaggtagccgatgacgatgaacagggccctggcgcaccgccgccgcaccgcctgcgcggcgcaggcgaggacggccagcaggccgccccaacacaccaccgggttgacaaaggcggcgaagcgggtggtgtatcccggcactgagttgtccatatagtagaggatgggccggatgtcaaagagccactgataccagcgggaggagtaggggtgggtgtcggtgacgccgctgtggtaggagagcatatacttctggttttcccacatggcgccgacgaggccggtgaggctgctgtctccctccgcccaggcgtaggggagataggacagggtatagatggccgccgggatcagggcgaacaccagcaccgagaaggcgagaatctggaaggcccacttcagccgcccgggctgccgcgcccccgtctccccgtccgccggccagtcccgcagcttttggtacaggccgatgaagtagagtaccaccagcccggtgcagccgtagatcaccgtccatttggaggccgcgccgatgccccagaacagccccgacaggaacaggggcagggcgcatttgcggaagggggcgcccgccgggagggtgaggtagcggtacatgaaataatacatcagaaggatgaagaagaaggcgtaggtgtcgatggtggctagccgggtctgggtcaggtgcataaagtcggcggccagcagcacggtgccgcaggtggcgatggaggtgcggccgaacaggttcttgaggaacacatacagcagggggagcatccccacgccgaacagggtgcccatgaaccgccagccgaagggggtcatgccgaacaggcggatgccgacgcccatgatcagcttgcccagaggcgggtgggagatctcatagggcgcgacgccccggatgtgctcccaggcggtgcgggggtggtagatctcgtcaaagtaggccgagtcgtaataggtggtcttttcgggtaccgtctcctgctcgtcgaagagggggctggccgaggcggacaggtcgatccgtttcccatccaggccgaacagagccacctcgcccagctccagcaggcccttattggcctggccggtgatgcgcaggtatcggatatactgggggttttcgaaggtgagttcattccacttgaagagctgattgtagttctgggtcatggcgtagctctcgccgtagccctccgggtcggcccagtagtaaacggtctcctcactgcccgtttcatcggtctccgtccggctccagagggtgagccactgggtgccgtcggcggagatctccacctggtatttgccggtgcccaggttggggtagtaccacagcctggacacctggacgctctccggcagggagaaggtggccgattccccgtccccgaagtcccaggcgctctggggtgcctggagggagcccaagtgggcgaaggcggtgacggcgtaaatacaggtgatgagcaggatgggaacggtatcccggcgcgccaggggatggcaccgctcggcaaaggtgaagcggcgcttcggctgcggcgcgggggcgagctgctgggccagaggagagcgctgggtgcgccagtaccagcagaagaagcccagcagcgccagcagggtgaggacgggaaagagtatgacaatataacgaatggggcccacgggggcggtcacctccaacggcagaaatagactagaggacgggcagttgcccgtcctctagtttatttctttttcttctttttgtcaaagaaagattttacgccctccatgggaccgggtgaaagctcgcccatggcttcgccataggcacgcagcgcctccttctgttcgtgggtcaggccggtgggcacctgtacgttcacggtgacgtactggtcgccccggccccggccgttgacgctggggatgcccttaccccgcaggcggaaggtggtgccgggctgggtgcccgccggcaggctccacttcaccttgccgtcgatggtaggaatctccagctccgcgcccagtgtggcctggaggaaggtgacggggtgctccagatagaccgacgtgccgtcccgcttgaagaattcgtgggggcggacggtgacgctgatgagcagatcgcccgccgggccgccgtttttgcccgcgccgccctgcccccggagggagaccgcctggccgttgtcgatgccggcggggatggagacggtgagcttgcgctgacggcggacgctgcccgcgccgccgcagctcttgcagggctgatggatgatcttgcccttgccgccgcacttggggcaggtggtggtggtggcgaaggtaaaggccccgccgccccgctggatacggatctggccgctgccgtggcagtcggggcagacctccgctgtggtgcccggcgcgcagccggtaccgtggcagtcgtcgcagggttcggttcggttgagggtgatctccttctcacagccgaaggccgcctcctcaaagctgatggtaaccgacgcccgcagggtgtcacccttcatggggccgctgcgcgcacggctggagccgccgccgaagccgcccccgaagaaggagccgaagatatcgcccaggtcgatgtcgcccatgtcaaacccgccgaagccgccaaagccgcccccgggtccgcccgcgccgaaattgggatccacacccgcatggccgaactggtcgtagcgggcgcgcttatccttgtcggacaatacctcgtaggcctcattggcctccttgaatttagcctcggcggtcttgtcgccggggttcagatccgggtggtactgcttggcctttttccggtaggccttcttgatctcctcgtccgtggcgcccttggacacgccgaggacttcataataatctcgtttctgttctggcatagggttctatcacctcttaacgggagaaacgggcgggtctgggggccgccccctactgcgtaggagccaactccagaccggcccgtgctcaccggacgaatttacttctggttgtcgtcgtctaccacttcataatcggcgtccaccacgttgggatcggagctggcggaaccggcctgggcgccgcccatgtcggggccaggctgctgaccaccctggggattggcctgctgatacatcttctccgcgatgggatagaaggccttgctggcctcctcggtggcggccttgatggcggccacgtcggtgcccttcagcgcgtccttcagcttgttcagcgcggcctccaccgtggccttgtcgtcggcgctgatcttgtccttggcgtcctccagggccttctcggtctggtagaccacctggtcggcctggttgcggacgtcgatctcctccttcttcttggcgtcctcggcggcaaactgctcggcctccttgacggccttgtcaatgtcctccttggacatgttggtggaggaggtgatggtgatgtgctgctccttgccggtgcccagatccttggcggacacgttcacgatgccgttggcgtcgatatcgaaggtgacctcgatctgcggcacgccgcggcgggcgggggcgatgccgtccaggttgaagcggcccagggtcttgttgtactgggccatctcgcgctcgccctggagcacgtggacctccacgctggtctggttgtcggccgcggtggtgaacacctggctcttcttggcggggatggtggtgttgcgctcgatgagcttggtcatcacgccgcccatggtctcgatgcccagggacaggggggtgacatccagcagcagcaggcccttcacgtcgccggtgaacacgccgccctggagcgccgcgcccatggccacgcactcgtcaggattgatgcccttgaagccctccttgccggtgagcttcttgaccatctcctgcacggcggggatacggctggagccgcccaccatcagcaccttggagatgtcgctggaggacaggccggcgtcactcatggcctgcttcacggggccgctggtggcctccaccaggttggcggtgagctggtcgaacttggcccgggtgagggtcagatccaggtgcttggggccggtggcatcggcggtgatatagggcaggttgatgttggtggaggtgacgccggacagctcgatcttggccttctcggcggcctccttcaggcgctgcatggccaccttgtcgccggtcaggtcaatgccggtgtccttcttgaactcggcggccatccagtccatgacgcacttgtcgaagtcgtcgccgcccaggcggttgttgccggcggtggccagcacctcgatgacgccgtcgtcaatgtccaggatggacacgtcgaaggtgccgccgcccaggtcgtacaccatgaccttctgggcctgctccttgtccacgccgtaggccacggcagcggcggtgggctcgttgatgatgcgcttgacgtccaggcccgcgatgcggccggcgtccttggtggcctggcgctgggcgtcggtgaagtaggcggggacggtgatgaccgcctcggtgacggtctggcccagataggcctcggcgtccgccttcagcttctgcaggatcatggcggagatctcctggggggtgtaggccttgccgtcgatgttcaccttgtagttggtgcccatctcgcgcttgatggacatgatggtgcggtcggggttggtgatggcctggcgcttggccacctggcccaccatgcgctcgccgtccttggagaaggccacgacggagggggtggtgcggttgccctcggcgttggggatgacgacggactcgccgccctccatgacggccacgcaggagttggttgtaccaaggtcgataccaataatcttagacataaagcagttcctccaataataaagaaattggttttttacaaggttgagtggtgggcgcaccatgtgcgccatgatgtcacgctatgggttgggcacatggccgggccgctaagtccagactgcgcgaaaaatgccgcttcgggctgcgcccgtcgcctgttttttcgtctccgtcccgccttagcgcccctatgtgcctaccctccgcgcttcttagttggcgacctttaccatggcgaaacggaccaccttgtcgcccgacttgaagccggtctggaacacatccacaatggtgttctcgccagcgccctcgtcctccacgtgcatcacggcgttgtggaggttgggatcgaagggctcgcccagggcagggatctcctcgatgcccagcttggtgagaacctccttgagctgggtcatggtcatctccacgcccttcttgtaggcctcgtcggcggtctcctgcttgagggcccgctccaggttgtcgtacaccggcaggaaggccgcagcggtgtccgccttggcgtccgaccaggcggattccttctccttctggctgcggcggcggtagttgtcgtattcagcggccaggcggagaaatttgtcctcctggtcggagaggctcttcttgagggcctccagctcctccagcagggggttgggagcctcggcctccgtctcctcggtggggacggcctgctcggtctgctcttccggggtcacgtcctccggctttttttccttcttgctcatgggatgcattcatctcctatttctcgtcgtccctgccctggggcagttcaccctgtccaaacagccgggagaggccctcggccagataggacaggcgggcggttatcttggcgtaatccatccgggtgggcccaaccacgccgatgacaccccgcatgccgtcgccgatgtcgtagctggcgaccaccacgctggtgtccttcagcgcgtcggccacgttttccgggccgatgaggatcttcatgggatcgtccttgggaacggggaagcgggcagggtcggcgtcctcggagaggtagctcatcagcggctgcgcccgctccaggctgcggtactcgggcagctccagcagatgggccagacccgaggtgtggacggtgcgctgctccaggctctccagcacctccatagcgaaagacaccaccagggagataagcccataggcctccccggccgcatgctgggccacccgcatcagctccggggtgatttcctccagcgtcaggccggtaaaggtggtgttcagcagggtgttgagcatctgaagctgggcttccgtcaggtcggagggcaggcggatgagccggttacgcacgatgtccgtgtcggtcatcaccacgatgatgaaagcgttgcgctccaccatcagcagatcgaaccgccggatggtcatgcggctcagaccggaggagagggcgaaggaggggtaattggtgagctgggacaccacccggcccgcctggtccagcacccggtccagctcccgcatccgcatggccagggcctggttgatgcgctgggtctcctggagggagagcttgtgctcctccatcagctcgttgacatagagccggtagcccttgggcgaagggatgcgcccggcggaggtgtggggcttttccaacaggcccatcgcctccagatccgccatttcgttgcggatggtggcggaggatacctccatatcgatggaggcggcgatggccttggaacccaccggctccgccgactggatgtagctctcgatgatggcgcggagaatccgttttttgcgctctgttaaatccattccggccaccctttcacaatgttagcactcaaactctctgagtgctaaagataatgtagcaccgtcccccgaaaaagtcaagtgttctggatgtaaattaaatgtgaacgtagaaaattcagcaggcaaaggggtggactgcaagtttcgggcgttgacggggcggcggaacaatggtattctatgtaaaaaggaggggggaatccgtggacgagggccgaggcttcacgattatcgactatgaggaccgctacaagcaggcgctggaggacatctccctgccctggctgctggaatacgacctgctggagccggtggatctggagatgctggcggagccccaccgcttcctgtccggcggtggccgggtgctgctggcccgctggggggaggagattgtgggcatggtcatgctggagcttcaggggaagggccagtgcgagctgctcaagttcggtgtgaaggaggcataccggggccggggcattggtacggccttgatggaggcggcgctccaggccgcccgggatgcagggcagaagaaagcggtcctcacctccaaccatcagctcagggaggccctgcggctgtatgagcggtttgggttcaaatacgtcacctattctgataaatggttccagctctccgacatccgcatggagcgggagctgtgagccggcttacagagaaaaataccccggctccgcgcccacaggcggagccggggtattttttacaacgcggtcactccgtacgggagaactgggtgacgtcgttgatccactcccgggagcggaggcggtacaggccaatgccgaacttgacgaattgctcggccatgatgcccacatagacccagaagatgccccactggaacaccaggccgaacagggcggccagggggagggagacgaaccacaggggggtggtgtcgatgatggtggcggcccgcacgtcgccgccgccccgcaggacgcccacggtgttgacggagtcgaaggcccgcagggccagaaagacgccgatgaaggtcagcatcatggtggtgatagagccggcggtctccgacaggtggaagaaggggtagaccagccaggggaagacgaaccaggcccccaggatcaggggaatgccgatgatcaggccgcagaggaaggccagggtgtccagggtagcccccacctcatagacatgctcccgccggcctgcgccgatctcccggcccacgatgatggcggtggtgttgccgatggcgaagatggccacggtacagagatcctcaatgttgcccgccagggcgcgggcggccaggatctcggtggacccctccatgtggcccatgatgaccttgtagagggaggtgcccaggccccagagggtctcgttgagcaccaccggcccggagtagtggagaaatttggccagcagggtgcggcccggccggaagagcacggcgggcttgagccggaagcgccggttggtcaaggcgtaggagagcatgatgacgaactccaacacgcgggcggacagggtagccaccgccgcgcccaccacgcccagggcgggagcgcccaggttgccgaagatgaacacccagttaaggaaggcgttggtcagcatggacacgccgaagatgatcatgcccagcttggggttctccatggagcggtgggcgcccacgtacacaccggtgaggctgttgaaaatataggagaagcccacgatgcgggcgtactgagccgccaggggtaccagctcctggttgtcggtgagaaggcccatcagctgctccggcaggaagaacatgacggaggcaaaggccagggagatggcccccgccacatagcagcccaggccgatgacccggttgatggactcggtgtcccccttgccccagaactggctgatgaggacggaggagccgctctggagtccgaaaatgaccaactggatgacgaagacggggatgttggccaccagcacggcggccaggggggcttcccccagggcacccaccatgaaggtgtcgatcagccccagcagggtggtgcacagattctggagcaggatgggcagggccagccgcgccacgttgcggtagaaggccgccccccggttcatatagtggaacaaacgctcacctcgctgcaattctggtcttggtgatttcggtcagtcccccggccagggcgtccacgtcggcgcgggtgctctccggggagaaggagacgcggagcacccccatcagggtgcgcttgggcaggcccagggccgcgaacacgtggctgggcttcccgcggtggcaggccgagccggaggagacgtacaccccccggtcggacagctcccgcaccagcatttcgctggggtagccgggcagggagacggcgcagatgtggggggcgtccccccggctgatgatctccagcccggggacggcggagagtgattccagcgcgtattctttgatttcttgaatacgagcgggatagtcctcctgccacgccgcgcaggcggccgccagggccgcggcctgggcggtgggctcggtgccgggccgcagcccgccctcctgcccgccgcccgtcagcaggggcttgaggttcagcccccggcggatgtactgcacgccgatgcccttgggggcgcggattttatggccgctgagggtgagcagatccacccccagctccgccggggtgaagggtaccttcagaaaggcctgcaccgcgtcgcagtggagcagggcgggggagccggcgtcccggatggcctgggcggcctccgccacggggagaagggtgcccagctcgttgttcaccagcatcatggacaccagcaccgtgtcgggccgcagggcggcccggagggcgtcggcggacacgtggccgctccgatcgggcttgaggtaggtcacctcgtacccctgggcggccagggccttcaccggctccagcacggcggcgtgctcgatggcggtggtgatgatgtgccgtcccttccgccgtccgtactccgcggcggcccggacggcccagttgtccccctcggtgccgcaggaggtgaagaccagctcctccggcgcgcagcccaggcggccggccacggcggcgcggtgctccttcagcgcggcggcggcggcctgccccagggcatacccggaggaggggttgccgtacccctcagtcatggcctccagggcggcccgggcggcctccggacacacccgggtggtggcggcattatctaaatatatgggcatggtgcggtcacctcatccatagatggaataaagacaatattaagtattttatgctctgcccggttgaaagtcaaggcccgcccgggttttgggcaggccttgtcaaaaatgctgcttgcggtggctattcggcagaaagcgccgccacagtccagtgtggaagaagagaagacccagcggggtagagaggaaaatgattgcacgaaaggcaaaaaaagcgggcggccccacgggccgcccgccgctgcgggagagagcttacttgagggtgcgcaccggcacgttccagatgtcccgggcatagtcccggatggagcggtcggcggcgaagatgccggatcgggcgatgttcatgagggccatctggttccaccgcttggggtcctgataggccaggccggcccgctggtgggcgtcccggtagctctcgaagtcggccagcagcaggtactcgtccgccgggccgccgtcgccgaacaggaggcggcgggcgatgtcgtcataggccacgccgtcgccgaagcccacgttgagctggtcgatgaccgcgcgcagctccggattgtggacatagtactcataggacttgtagcccttctgcttcatctcggccacctcgtgggccttgaggccgaagaggaagatgttctcgtcccccagcacctggtgcatctccacgttggcgccgtccagggtgccgattgtcaccgcgccgttcatcatgaacttcatattgccggtgccgctggcctccttgccggcggtggagatctgctcggagagctcgctggcgggcatcagcttctccgccaggctcacccggtagttctccaggaagaccacctggagccggtctttgcaggcggggtccctggcgatcatgtcggccacggagttgatgaggcggatgatccgcttggccaccgcgtagccgggggccgccttggcgccgaacaggtaggtgcggggggtgaagtcgaagtgggggtcggccttcatgcgctggtagaggtagatgatgtgcagtacgttgagcagctgccgcttgtactcatgcagccgcttcacctgcacgtcaaagagggcgtcggtgttgaggatgacgccgctctcccgggccacccaggcggcgaaggccttcttattgtccgccttgatctgccccaggcgggagagcacgcccgcgtcgtcccggtactgctccagctccttgagggcgtcgggctggagcaggtatttgtccttgccgcagcagtcgcggatcagggcgtccagctccgggttgcactcgctgagccagcggcggtggtcaatgccgttggtgacgttggtaaacttgtcgggggtgcgggcataggcgtcgtggaagacgtcccgcttcagaatgtcggagtggagggcggacacgccgttgatcttgaagcaggcgcacacgcacaggttggccatgcgcacctcgccgccccagatgatagccatgggggccaccttggacagatcgccgtggaagtagtcggtcagcgcccgctggtagcggttggagatctcgatgaggatctgccagatgcggggcagccacttctcaatgagctgctggggccagcgctccagcgcctccgccaggacggtgtggttggtgtaggcgatggtgtgggtgacgatgtaccacgcctcgtcccagccgtacccctcctcgtccagcaggatgcgcatcagctccgggatggccagggtggggtgggtgtcgttgatctggatgacatgcttgaggtggaagttgcgcagggtgccgtactcggcccggtgcttgcgcacgatggactggatggtggcggagacgaagaaatactgctgcttgaggcgcagggacttgccctcgtagtggttgtcctcggggtagagcaccttggagatggactcggccatggcccgctgctccacggctttcagatactggccggaggagaacaggttcatgtccaccggcgtggggctgttggcgtcccacaggcggagcaggttgccgtgctcggtgccgtagccggcgatctccatgtccttgggcacggccagcaccacatcatacccggtgtgctttacccggtggcggcccagcgcgtcccactcgtcctccaccttgccgccgaagcggacctcctcggtctcgtccatcttggggatgagccaggcgtcgcccagccccagccagttgtcgggtagctccacctgctggccgtccacgatcttctgcttgaagatgcccagctcgtagcagatggagtagcctgtggcggggatctccagggtggtcatggagtccaggtagcaggcggccaggcggcccaggccgccgttgcccaggccggcgtcgggctcggcctcaaacaggtcgggcgcggaaaacccaaggccctcgatggcctgcttcagcggctccgccacgcccaggttgtaggcgttcttcatcagggaccggcccatcagaaactccagggacaggtagtgaacctggcgcaggtgctccacggccacccggtcggcggtcttcatttgccgctcggacatgatgtcccgcagcaccagggcgcaggccttgaacatgtgcaggctggtggcctcctccacgtcacggccgaagttgcggcgcagtttgcccgtgatgagggtcatcagctcttttttggtatatttgtgcaatgcagacatctcctgtttctgttgagatcaacataggaacgctccgcggaaggacacacccgccacggagcgctcattctatcatgggaatatggtactgtcaagcgtaaaaagcggccctatttcccggtcacccagccgtaaatctcctcataggctttggccgacttttcccaggagaagtcggcggtcatggcgttcttctggagggccttccacgccttgggctcgctgtggtagaggttcaccgcctcgctcagtacgccggtcatctcctgcacattgatgttggcaaaggagaagccggtgccctcgccggtgaacttgttgtagggcaccacggagtcccgcaggccgccggtttcccgcaccacggggatggtgccgtagcgcatggcgatcatctggctcaggccgcagggctcggagatggagggcatgaggaacaggtcggcgccgccatagatggcggtggacaggttgggggagtacatcatgtgggcggcgaagcggccggggtactggttctgagcttggcggaaggcctcctcatagttccagtcgccggtgcccaggacgatcatctgtacgtccatacccataatctcgtggatggcggcggtgaccagatcgaagcccttgtgccgcaccaagcgggacacgcaggcgatgatgggggcgtccgggttctcccgcaggccggacatctgctgcagggcggctttgcagttcttcttgcccgccatctgccgcgccgagaagaacttggtcaggcccttgtcccgccaggggtcatacacctcggtgtcgatgccgttgaggatgccgcgcagcttgtggcggttgtcggcgataaccccctccaggccgtgggcatagaaggagtactggagctcgtcggcgtaggtgggggagacggtggtcacgtagtcggcggcatagatagcccctttcatcagattcacgtctccgtggtaggccagcatgtgctcgttgaagtacccgtcgttgagcccgaacacatccttcaaagtctggctgccgtatcggccctggtactcgatgttgtggatggtgaacacgctcttggtgtcgcagagctgggggatgcggtggcgctcctccagcagatagatgggcaccagggcggtctgccagtcgttgcagtggagcacgtctggatgccagttcagccagcccatgctctccaccacagcccgggagaagtaggcgaagcgctcgccatcgtcgtagtggccgtaaatgttggaacgcttgaagtagtattcgttgtccacaaaccagtaggtgacgccgtcccgcttcagctcaaagatgccgcagtaggggctgcgccaggccagggtgatgtggaagcactggaggtaggtcatctgactgcgccattcctcgccgatgccttcgtagagggggaggatcacccgcacgtcatggccgtttccggccagcgccttgggcagagcgccggccacgtcggccagtccgccggtcttgatgaagggcgcacactcagaggtggcaaataagatgttcataggctctccttatgtcgaaattgagcggcaggggcaaccacccgcgcgagcgcgggtgaggggtatcgcggccattgtgccgcccagagggcggcacggtgaccgcgtatctagggggggacagcgtcccccctggagtcgtcatacaatttcgttcttcgcaatggacagcggataggtgttatggcccatcagcatccggccggggttgacccgcacgttcttgtcggtgatggcgtacttgagcaccgcgccggcctgaaccgcggtgccctgcatcagcacgcatcccgagaccttggcccccttctccacacggacgccgcggaagaggatggagttctctacctcgccctcaatgatgcagccgtcagccaccagggagttgaccgccctggagcctgggccgtagtaggtggacgggtcggagcggtccttggtgcggacagggcggccgggggcaaagaggtcggttcgcacctcggggttaagcagctccatgctgcgggcgaagtaaccagccacggactggaggcgggcggcatagccgtcaaagacgtatgggcaaatcttgagctggccggccatggcctggagcacgccggtgctgaaggagggaatattgtgggccgcacagtggtccaccagggagagcaggagctgcttggagagaatgtagacctccagggattcgcagccctgggcaatgggggggtgcaccagtacgtcggtgatccgccctccggcgccgatggtgaagtagtcgcagtccttgggcgagcccatagggcggctggtgcacacggcggtaatgtccgcgtcattgcggatatgggcctcaaagatgtcattgaggggcaggtttaccgccaggtcacccccggccagcaccacgtagtcctgccggatgtactgcaaataggagcgcacgcccgccagggcgtccatgcggccccggtagacgccctcccgccggcccgagtagccgaagggggggaggatgcgcaggccgccgtgcttgcggctgaggtcccagtccttgccggagccgacgtgatccagcagggactggtagttggcgtggacgatcaggcccacatcggagacaccggcgttgaccatgttggagagcatgaagtcaatcacccggtaccggccgccataggggatggagcaggtgttgcggtgctgggtcagctcccgcagatccgggttggaaaggtaggcgaagatgatgccgtgcagcttgttcatcatttcaccccacctcctttcacgttacgggtaatcatggccttaggggaaaccacggcgctggggccgatgttcaggtgctgggcaatgacagcaaccccccagtcctcactgccgtcgggagaggcgcccacccgggcgttttcaccgatgactgattcctcggccacgatggcgtactccaccaccgcgcccttctttaccaccgtgccgggcatgaggatggagtagcgcaccaccgcgccctcctctacggtgacggagtggaagagcacagagttctccactgtgccgtacacctcacagccgctggtgaccatggagtggtccaccttggcatccattcccatgaaatggggggggcggatgggggtgcgggcgtagatgggccattcagtgtcgtaggggtcgatgccgttgtcgggggaaagcatatccatattggcgtcccacagggagtcgatggtgcccacgtccttccagtagccctggaaacggtaagcggtcatcttttcgccggcgtccagcatggcggggatgatgttcttgccgaagtcgttggagctcttctcatcggcctcgtcagcgatgaggtactcccgcagcttggaccaggtgaagatgtagatccccatggaggccaggttgctcttggggtgcttgggcttctcctcgaactcatagatgtcgtcgttctcgtccacattcataattccgaagcgggaagcctcctccatggggacctccagcaccgcgatggtgcaggcggcgtcggcctccttgtggcggcggagcagttgggtgtagtccatcttgtagacgtggtcgccggacaggatgagtacatattccgggtcataggtctccaggaagttgatgttctggtagatggcgttggccgtgcctttgtaccaggtgcccttttctccctcccgcatgtaggggggcaggatgtggacgccgccgtaggaccggtccaggtcccagggctcgccgttgccgatgtaggcattcagctccagcggccggtactgggtgagcaccccaaccgtgtcgataccggagttgatgcagttggacaggggaaagtcgatgatgcgatactttcctccaaaggggaccgcgggttttgccacgtggctggtgagggcgtggagacggctgccctgtccgcccgccagcagcatggcgacacattcctttttcacttcttatcacctcagcgtttaactggaaaaagcgtcaggattccttggacttgcgggtggtctttttgggggccgccttggctgccttgtcggactttgcagccttgggcgcggcttcggcggtttttttccggcgggacgggaacttgcgggtgcacttgtagatggcggcgctcatggggggcagggacagagtgatggcctgctcccggccgtggcactcgatatactggctcttgaccggcccggcatcgccccggcccagtccgccgaaggcggggtcgtcggtgctgaacaggcaggtataggtacccgccgtgggcacgccgatggtatagccggtacggtccacaggagagaagttgcacactgtcaccagggtgctgcccttcttgtccttgcggaggaacgcaatggtattggcctggttgtcgtcggcctcgatccactcaaagccctcccaggagaagtccagctcccacagctccgggtgggccaggtagaaggcgttgaccgcctggaagaacgccttaagggcccggtggcggtctccgtcctccccctccagctccagcaggtgccagtccagagagtgctcatagtgccactcgttccactggccgaactcgctgcccatcatcagcagcttcttgcccgggtgggtgagcatataggtatagaaagcccgcacgccggcaaatttctcctcgtccgttccgggcatcttgttgatgagggagcccttcatgtgcactacctcatcgtgggacagggggagcacaaaattctcagagaaggcatacatcagcgagaaggtaatatcgtggtggttgaactggcggaagtaggggtccattttaatgtagtggagaatgtcgttcatccaccccatgttccacttcaggttaaagcccaggccgccctccagtccccccttgtccaccggatgggaaacccggggccaggcggtggactcctcggcgatcatcatcacgtcgctgtgggcgctgaaaatgtgggtattgagctgctggaggaattcaacggcctccagattctcgtgcccgccgaatacgttgggcacccactggccgtcctgccggccgtagtccaggtagagcatggaggccaccgcatccacccgaaggccgtcgatgtggtactgctccagccagaacagggcggaggagtagaggaaggaccgcacctcgcttcgcccgtagtcaaacacccgggtgccccagtcggcgtgctcccccttccgggggtcggcatactcgtagcagggctccccgtcaaactcgtacaggccgaaggcgtccttggggaagtgggcgggcacccagtccaggatgacgccgatgccggcctggtggagctgatccaccagccacatgaagtcgtgtggggtgccgaagcggctggtggccgcgaagtagccggtgcactgatagccccaggaggcgtccaggggatgctccgtgacggggagcagctccacatgggtgaagcccatctccttcacgtagggcaccagatatctgccgatgtcccggtaggagagcatttggtcgtcgccggtgcgccgccaagagcccagatgtacctcatagatgttcatgggcttctggtagaccgggttgttcttccggtaatccagccagctcccgtcgccccactggtaaccggacagatcgtacagcttggaggcggtgccggggcgggtctcggcatggaaggcataggggtcggccttggccaggaccttgcccgagcgggtgtgcacggcgtatttatagttgtcatactgctgcaggccggggaggaagagctcccacacgccgccctccagggcggccatggggttggccccatcatcccagccgttgaagtcgcccattacggcgacggcctgagcatgaggagcccagacgcggaacagccagccggactgtccgccgcgtacagtggggtgggagcccaggaattcctgcgcccggaccgcctgtcccgcaaggaactgcgccagaggcgcggtgtcattggatatcggcataggtgtcactccttattggcaaaaatccccaaaaagagggctgggagccaggagatccttgtcattggtgataaaataactccagaataggtggaaattatttgtataaattatacaacgtgatggagacatagtcaagacatgtatggaaaagcaagtgtaaaatttcccatattgggcggacgggcgttttggagagattgcgcagaggggggagcggcaatgccgctcccccctgctcaatcggattattccgccataaacagtgttttgaggaaccgggagaaaataccgggaagggtcagccgtgccacggcccggtcggccacgatggggatggtctgctgctcctgcccgcccacggagatcaccatctcgcccagcttttgcccctgctccaccggggcctccacattctcgcacaggcgcagttcgctcgtcacgtcgttgagctgggccttgtccaccagaatccggctggactgggcgaggacgggctgtaccgtgtcctgctcgcccagcagcacgtcgacaggagggagggcctgtccggggtagacgtctgtgagggtataattggcaaagccgaagttcagcaggctcttggccgactcaaagcgctgctcggaggtcttggccttgagcacaacggcgatgagctccataccgtcccgctcggccgtggcggacaggcagtagcctgccgcgtcggtggagccggtcttgaggccggtggccccttcatagaaacgcaccagcttgttggtattggccagttggaactgaccgccccggatggagtccatccagatggtggtgtagtcccggattttggggtgctggatcagggcgcggctcatgaccgcgatatcatgggcgctggtcaggtggcccgccgcgggcaggccggtgcagttgacaaaacaggtgtcggccatgccaagctcggcggcccgctggttcatctgctccacaaagccctcctcgctgcctgccaggtgctcggccagggccacggcggcgtcattgcccgacaccaccgccacggccttgagcatgtcgtccacgctcatctgctccccctcttttaaatagacctgggagccgcccatggaggcggcgtgggcggagacggtaaccatatcgtccagagccagacggccgtcgtcaatggcctccagcaccagcagcagcgtcatgactttggtgacgctggcgggctccagcttgtcgtgggcgttctgttcatagaggatggcgccggtttccttctccatcagcaccgcagcggcggcgtccaccgtgggcgcgccgctgacggcctgggcggggaggaccagaagcgcggcggccagcagggccgcagccagttttttcataacgtgtgatgcctccgtttttgagattctctgtctcagaggatatggaatcggcgggaattctatacggaagcggggcttttttggggcggggaaaaatttttccgtttttctctttacaatatcgctttagtgtggtaatatacgaaagcgaagaggaaaacgacccaactgaggaggaactgctatgaaacgaaattggacggctctggcccttgctctgggccttaccctgaccctcaccgcctgcggcggaaatcccggtgcggccgagacgcccggcagcgcggcgccgaccggctctcagacgcctgcggcagagagcgacctggattatgtcaagggcaacggagtgctaaagatcggctataccctgttcgagcccatgaactacctgggggaggacggcgagctgaccggctttgagaccgagtttgccactgccgtgtgcgccaagctgggggtggagcccaagtttgtggagatcaactgggatgccaagctgctggagctggagagcaagaacatcgactgcatctggaacggtatgaccatcacaccggagctccaggaggccatctcgatctccgccccctacatcaagaactatcaggtggtggttatccgcgccgccgacgcggacaaatacacctccaccgagtccctggccggcgccaatctagacgcggaggccggctccgccggtgaggcggcggttgcggccgacgagttcctcagccaggccagctatacctctgtggtgaagcagaccgacgccctgctggaggtcaagagcggagcggcggacgcggcggttatggacttcgtgctggccaacacgctggccggcaccggcgactactccgacctgatggtcattcccgatctggagctgtccgtggaggagtacggcatcggcttccgccagggctccgacctcaccgcggcggtaaaccaggccatgcaggagctcattgacgacggcaccctcaacgagctggccgtcaagtacgagctggccgacctgctgctggccaaccagtaaaacgttccgacacaagaggcagggggtatatgccccctgccccttgtccgcgttggacagaggagagagaacatgtcattccaaacggtaaccatgaccctgctggacggttttctgctcaatattgagctctttgccgtcacgctggtgttgtccctgcccctgggactggtggtgtccttcggcaccatgagccgcttcaagcccctgagccttctggtgcgcctgtatgtttacatcatgcgctccaccccactgatgctccaactggcggtggtgttctatctgcccggcatcgtctttgggcctggacactccctggggcggatgggggcggccgtcctggcctttgtgctcaactacgcggcctacttctccgagatcttccgcggcggcatccagggtgtccccgccggccagcgggaggccgggcaggtgctgggcatgacccgcagccagatcttcttccaggtcaccctgctccaggtggtcaagcgcatcgtgcctcccatgggcaacgaaatcatcaccctggtgaaggacacctctttgtccaacttcatcatggtgggggagatcatcaagctggccaaggacttcggcaacaagggcatgatctggcccctgttctacgccggcgctttcttcctggtgttcaacggcattgtggccctggccctgagccgcaccgagaagaagctggactatttccgggtttgagaggagcgcacagcatggcgattttacaggtagaggatatccagaagcgattcggcaggacgcgggttctggaggatatcagcttttccctggagcaggggcaggccatggccatcatcggctcctccggctccggcaagaccaccctcctgcgctgcctcaacttcctggagcagcccgatcggggccgtattacggtggggggagaggtgctctttgacgcggacgaccccgccacccagcgggagagcgaggtgcgcaagaagcgcctccactttgggctggtgttccagtcgttcaacctctttccccagtacaccgcgctggaaaacgtgaccctggccggccagctcctggcccgggagcggcccgactttaagggggagaagaagcgcatcttcgctgagatcgaggagaagggacggacgctgctggcccagatgggtctggccgaccgggcggggcattacccccaccagctctccggcggccagcagcagcgggtggccatcgcccgggccctggccctcagccccgatatcctctgctttgacgagcccacctccgccctggacccggagctcaccggcgaggtgctgcgggtgatccgcgccctggccgaacagaagaccaccatgatcatcgtcacccatgagatggctttcgcccgggacgtggccgaccaggtggtattcatggacggaggcgtgattgtggaacagggcgacgcccggcaggtcatcgagcacccccgggaggagcgcacccgccagttcctggcccgctacagcgagaattgaagaattgaaaatcggacaaaagcgtggtatcatttgagataccacgctttcacatggataaggagctgaacacatggacgaggaactgttcctgccggtgctgtcccactttgaaaacggcaacttctggacagccagcggcggggccctgcgctacaaggtggtgcccgatacaggggagagtcccaggctcaccgccgaggtgtgggagggcccctggcgctatcaggacagcacagtggaggagacaaaggaatttcccctcagtgaggaggggctggaggagctgcggggctggctggcccggtggaggacggagatgaacgcgcgcccgaaaaagaccctggaggagactttggccgctcgggctgcacgccgggcggagctggaggccgcagcggtcgggaaacaggaaggaggaacagcatgacctggggaacctattactttttctatgagtgccctcagtgcggcaagaaataccgctatgagctggagggaagcgccgacgaggagtttggcttctgcccggagtgccacgtgatgggcaccttcgtgggggaaaccaaggataaccagcagggcgaggacaagttcgccgactacgagtttgtataaacagggggctccccggcaacgccggggagccccctgtttcaacctccgccccgtccagaatgatccgtaggggcggggcttgtccccgcccgcaggcggccataaaggccgcccctacatttccggggttctgtttccgatggggtgtcttgtggcgcttatctgtaggggcggggcttgtccccgcccgcgggcggccataaaggccgcccctacattttcggggttccgtttctggtggggtgtctcgtggcgcttgtatgtaggggcgggtgcccacacccgcccgcaggccatccggcaggacagagccctcgcgttcggctgtgtgccggacgcaggggatttgcctgtgccgggaggagatgggacgaatatggcaaattatacggaatattaccacctgcaccagtgggagccggaggatagcttcctgcggacggattttaatgaggacttccgaaggattgcggccgcactccaggaaaagctgggacaggccgaccgggcggagttggccgccgcagcggcggaaaaggcaaagctttattgcggcgcgttcctgggaaatgggacgagtcagagcatcccgctggggttccggccctcggctgtgctgcttccgggccgctccgggctgctgctggcaagccggcagacggcggcaggtgcgattgagattatccagcaggggtttcgggtagtccatgaagatggggcgatcgaccggatcaacgagtcgggaaagacctatccatatctggcgtttctggagggccagataccataaaaagttccccgggccgttggcccggggaactttttaaaatatggggagattactgaacctgatcaaaagtaataaccagcttcaggctgccatcagagacagtggccgacgtggccttgccattagtaacagtcaggctgctataatcgccggactcgccaaaagcaaatccatccttagcagtaagcgtgacggtggcacgatagaacttctgctcaaagtttccggttgcactggcccagccggaacttccgtcatcactcttttcccaaataagagtaccaatctcgaccttgctgctagaagcgctgtccgtcagagcagcatcggcaatggtggcaccgttcgtcggagcggtaatggaaaggttcatatcagccgcgctaatcttgacgctcacagtgcactcggtgctcttcgtctgggcagtcttgtcgccattcacatcgtccttggtgttggtggcgataacatagtacttcccagcctcagtgggggtgtaggactcgccagtctcaccggagaggggcatgccgtccttataccactggtaggacacagtgcccttgtcggtcacgctggccttgactgtcagcttgtcaccgacatagccgctggacttcagatcagtgtcaaacgtgggcttcgcggcatccaccttggtgccaacgttgcaggtggcgctcttggtggtagcggtcaggctgttgcgggtattggtgacgaccacgtagtactcaccggcgtcgctggccgtataggtggcgctgttggagccaaccacggaatcgttgttgccggacaccttgtgccactcgtaggacagggcgcccttgtcgggggcgttagccacgaccttcagctcagtgccggtgacggcagtggtggtcaggtcggtggtgatcacaggggccttggggttggcaaaggcgatcttgtagtagaccatgcccttgttggtgtcgacgccgacatacatggcgctggtcacaatgggataggggttagtggcaaccagcttgtaggtgccgaacacctcttcgtagacgcccttcacattgccctgcagggcgttgaccagaacgtcggcggtcagtttgctctgggcggtggtgacactgccggaggtgctggcagccatgtcgttggtcagggtgatggtctggttgctgatgtcgctgatcatggtctcgttgctggtggagatcacaccgtcggacagggagccggtaccgtgatccggcacctcagtgccgtccaggacgctcttgatgtacgcggcgcggaccgtgttctcgtcggcatccagaaccaggacagtctccttcgcaacgccggtggagaaagcgccggcgggagcgttggtaccagcggacacgtcctccacgttccagatattcttgtcgtaggagtagctgtcaaccagcttggtgagcttcttgtcgctgtagacagccacggtgccgtcgttgagcttcacggcatagccggtcagaacgtgggtgccgctgctgccgggggcagttagatccgccacgccctcgccgttcacggtgtaggcataggcagtctcaaagtcgctgttgcccttgaacagggagtcgtagtcggagcgggtgagcttcagggtggaggcggtgccgtccatcagaagcacgttcagggtcacatagccggaggagctgctggtgcggcccaggacataggcgtagtccttctcggcggccacgccctcagcgtcgaacagaaccacgtcggtcagattggccttggtggtctgggccacaaaagcggtgttcttgtctacgttagacatcttgtcgtagccgatggctacgccgtacttgtcctcgccgttcacggtcgtgaagtagaaggccacggtgttcttgtccacggccacctgactgctggtgccgtacttgatgcgggcagcgccggtatcatagtcggcggcaagggtgctcttcacgttggcggggctgtagtggtcatccgcgttggcatggttgtcgcccacgatggacttgatggtcagaacgtccttgtcgttgaggctgtactcaatgacatagccggcagcgaaaccggactggtgctgcttgctggagtagtgaaccttaccgccggagggcagcgcaccatcgggcttggtggtggtgttgtcctgaacggaggagcccaggaagcccttcagctcctcaatgccgttgtccttctgctgagaggaggtcagcttggggaagagctgctcgcccacgttctgcgcggaggcatcgaagttcagggtgtaaagcttttcggtgccatcggccagcagaaccttcacttcgccggtggggttggagttggtgcggcccggatcgtagccggaatccaggatcagggcatagtcgcccacgcccttggaggagggacggtaagcgatcacgttgtcattggagtcgaggatgaagtcgtagtcgatgtcaaagtccacgccgtccttggtgccgcagtccagcacgttgaactcgtaggtgttgtcggccgcatccgccgcaaacaggatgtaagaggggtggtactcggtgccgcccacggtgatggtctgctccttggtcttgctggaggagtaggactccatctggccggtcacaacgttgggggtggagacatggtacttgccgccgtaagaggcaaccagaaccagatcgccctcagacaggttggcgtcggtcacgatgttctcgttgtcgatggccttgttcttgttgaaggcgttcagagtggtggtctccttggagtcgctcttggcgatgacctgggtcagagtctcctgcaggtacaggacgtactcaacaataccgtcgccgtcgttgtcgatggcggtcatctccacgccataggcattggtcttgccgttgacgttggtgaagcggccggtcttggcgtcaaagcccagcgccttagtggcgtcggcctcgctgtccatcacaccgtagttgacatagtaggcggtgtccttgtcggtggacaggccggtgcccttcaggaagtccttcatggtgtcctgcgtgtcagcggtggtcttgaccacgttgctggcatcatcgaggtacacgcccagcacggtggagttggagagaacggtggtcttcttggcgtacatggtcacggtcttgcccagcatgtcggcagtggtggacacgttgaacacgacctggcccttcacctcttcgtactcgccggtggtggtgttggaggtagtggaggcgtagaccttcacgttctccatggtggtcttgcccttggcggaggcaaagtcgctgtcggtgttgttcagcgcggcctcctcgttggagacaaccacgccctcaatcttgtaaacaccgtacttggcgctcagcagggtgcggtggtcggtgaaggcgatggcatagccgttctcgtacttctgaatcatctcgatgtccagagcgttgtagatcagcagcgccgcgttgtcgcgggtcagaggatcagaggtagctacactcaggttgtcaaagatgcccagggtagaggccagagaggcggtcttgatggcccagtcggcaccggtcaggccctcgagctgcgcgtcgtagccggcggccaccagcagcatcttggcggcctcgttgccggtaacggtagcggcggggtcaaacttgccgttgccgcggccggcgatgatgcccaggctgtagcagtagttgatgtagctctcagcccagtggcccttcacgtcggtcaggccggtgttcatcccgacatacaggccgtccacatcggcgccctgattcaggacggtggcgatcatcttcgccatctcggcacgggtcacgttgccggtggggtcaaagtaagacccgtcttccttgccgttgatcacgcccagagtagtgagcatggaaacggcatccttgttgacgactttgtccttgtcggaaaagtcgtcgaggcccgtagcgctggcggagacaaccatcatgccgatgagcatgatcgccgccagagccaggctgagagcccgcttgaggtttctcatttggatttcctccttctgaattttgagccagaggggcgtatgacgcccctttcaggggaggaaacaatgcacatttcgggggatagagatataaaaggcggggaaacagaatcaaaaggttgctatggtagacgttcggtagacaatacgggagcgggaaaagtgaaaacgccttggaacccaaaggattccaaggcatttctggtagacttttggtagaacggtttttaaaacacggctgagatattgtcaatcgtcttgatctgcaaaaaatggtacggtttacttgtgatatatatttgaatgcgatatactttagaaaagtagtaaaaaaaggaggtatcactatgcccaaaaccccgtgggccgaccgctatcgggcagctcccaccaataagagcaacgttatgcggacgatcattctggagggccccatcagccgtgctgcgcttgcaaaacgggttgggctgagccttccctccgtcatgaccatcacggaaaatctgattaaccgcggtctggtgagagctgtgggaaagggaaagagcagcggcggaaaaccgccggaattgttaagcgtggtgcccgaaagcgaatattatatgggggtggatattggccgtgggaccatacgactggtgctgatgaatttggcgcagaaggtagtatacggaaccatggtggaaacgggggaggtccagcctgttgaagcatttgtggaccggttgtgcgagcggattcagagcagtctgctggaatccggagttgcactggatcggttggccggagtgggggtggcgatgcccggcctcatcgagcgggataccgggcatattctcttctccccggactttggctggagcgatattccgcttcagagctggcttcagagccggctgtcctaccccgtgttggtcgaaaacgccaatcgggcactggcactggcggagagtggctggcgcggggatggcggagagagcggcacccataccgttttatgtgtcaacattggacacggtatcggtgcagctctgatgcagaacaatcagctctactacggcagcagcggcaccagcggtgagctgggacacatcaccgtctgcaaagacggtccgctctgcgcctgtggaaactccggctgcctggaggcggtagcttccggtgaggccattgccctgcaggccagagacgccgtttgcagtggtctccctaccagcctgcgggagcggtgtggcggcgtatcggagcggattgacgccaagctggtctttgaggtggcggccaagggagacgcggtagccctctcgattgtggacaaggctactgactatatcggaatcggactggccatggcgatcaatatcctggatccggactgtatcgttttgtgcggaggcctgacaaaaaacggtccgctgtttttcgaccgggtagcccatagtatgcaaatgcggcagatgcggcaggcgggacgccatgtgacgctccgtttgggaacccgcggcgactatggaacggccattggggcggcccatattatctcttacaacggctggcgggtgccaagacttgagcattactattgattccggcggatcagaccaggggcggcatttttgctaaaatgccgcccctgattttatgctatattcaaaaacctttcggtataatatacaaaaggttttcagatgcatcattcgaaacgccaaaaatagaaaagagggattgacatttcttatgcatagcgctacaattgctttattaagttagttaacttaacttagtataaaaaaataagagcatttgggtattttaaaggggaatgggcagaggaaaaggagttttcacgtgcgtgttgataaattcactttagctttgatgaaccggaggctggtgctgaaaacaatctgggagagaggcgctatcaacaaggctgagatcgcacgccggacggggctgagcctgccgaccgcaatcaagatcacagatgagttgttggacaaccgtattgtacgctcctgtgggaggcaggagggcgcgtccggaaagcgccccgaaatgtatgagtttgctggggactgctattacagcgtcgggatcgactttgctccaaccgtgctgagggcgcttgtgatggatctcaatggaatgcctgttgcaaaggcaaagcgtcccattccggtaccggaagatgccgacgcggtcattcagaccgccgcagagctgattgatcagctattgcgcgagagcggtatcccgctccaccgggtcctgggcgttggggtgggtgtgccggggattctggacctggaccagggaagggtactcttttcccccaattttcattgggaggatgtagcgcttttggagccgctggggcggctgcttttacaacggaccagtatccgctggcctatgcggctggagaactccaaccgggctatggcgctgggggagcaattctttgggtcaggtgtggggtatcactattttatctgcatcaaccttggctatggcatcggcgcagcggccgttgaaaacggagagctgtgcgtcggtgtctctgggacatcaggggagctgggccacatcacggtggagaaggatgggccgctgtgtacctgcggcaacaacggctgcctggaggcggtagcctccgggcgagcgatcgcccagcaggcccgtaacctgatttccagcggagtcaaaacccgtattctggagttggcaggcggcaatattgagcgggtggaggccaagactgtgttcgctgccgcccgggagcaggatgtggccgcactggacttggttcggagggcaggagaatacatcggcatcggcattgccagctacataaatctgctggatcccgagaagatcgtactggccggcggaatgtcaaatgagtcgcttttaatcgaacagatccaaaaagtggtcaagatccgccggatgcgctttgccgggcgcagggtcaagctgcgggtgtccaatctgggtgagtatgggacggcaatcggcgcggcggccattcagttgaagaccctgctgaggcaggggggcttatcgctgacaaaagaacaggaggaggctgtatgagcgagtatcggttggaggtacggggtgtgacaaaggtctttcccggaacccgggcgctggatcaggtacagctccaggtgcggcctggcgaggttcacgcgctgtgcggcgagaatggtgctgggaaatctaccctcatgaacatcatcggcggcgtgtttccgcccacggagggcgagatcttgtttgaaggcgcgcctattgcccccaggagtcccaaagaagcccaggatatcggcataggctttgttcatcaggaattgagcctgtgcccccacctgacggcggcggagaatatcttcatcgggcgtctgccccacaaggggggaatgattgatttcaaacgcctctgggcggatgctgacatggttctgaagcagttcaacgccaattttcccagcagcgcgctggtcagtgagctgactgtctctgaacaacagatcattgagattgcgaagtcggtttcactcaactgcaagctgctgattctggatgagccaacctcctccctcacggaaaaggagactgcccggctctttgatttggtaaaggaattgagcggtaggggaatcagcattctctacatctcccaccgcatggcggaaatctttgaaatctgcgaccgggtcactgtgttcaaggatggtacctatgtcactaccatggacaccggagatatctgtgcagacgatatcatccgcgctatggtgggccgtgagctgggaaatctctacccaaccaagagcagctgtatcgcagcggacgatccggttctggaggtcaacggcctcaccggcagtatcttccgcgaagtcagttttgccctgcggcggggggagatcctgggttttgccgggctggtgggcgcgggacggagcgaggttatgcgcggtctgtgcgccattgatcccatccgttccggccaggtagtgctcaacggcaggccctgtgccttccacacctaccgtgacgctgtggatgcaggcatctgttacttgaccgaggaccgcaaaacccagggcctgtttctggagatgagtatcaaaaacaatatgtccagcgccaacatgaagggagtctcccatggcatttggctggacgacaagctggagcgaagcctggccaaccgatttgtagagcaactggccatcaaaattccgggcattgaataccccatcagcagcctgtccggcggcaatcagcagaagtgcctgatcgggaagtggctttctctggccccaaaggtcatcatcatggatgagcccacccgcggcattgacgtgggtgcaaagcgggagatccacgcgcttctgcgtcaactggcagagagcggcgtcggtgtgattgtggtatccagtgagctgcctgaggtcatcggcgtgtccgaccgggtggcagtcatgcacgaagggtgcttggcgggcttcctcgaaggcgaagaggtgacggaagagaatatcatgaagcttgcctccggcgagcagcttgcggaaaaggagttgcggcaatgaaacagaagagcgagataaagcggacgggaccggagcttttgaagcggttgctccggcagcgcgagatgagcgtatttctcattattttgcttgtggtggccatcgtggccatcgtcaatccaaagttcatccagccctccaacatgaagagcatcgccctgagtgtggccaccgacggcctgctctccatcggactgaccctggctctgattctgggaggcattgaactgagcgtgggcggcgtggccgccatgacgtgcgtcattgccggccagatggctttgatgggggtcaacatctgggtggcctgcctggctgctctggctgcgggagccgtatgcggactgttcaacggctttatggtcagcaaggtgggactgccgcctttcatcgtcaccctgtccatgatgaacctctcccgcggtgtggcctacattatcaccacaggctcccccctgtcggtgtccggctatctgccggacagcttccgctttctggccaccggcgatgtattcggcatccccgtgctgttcctgatcttcctgctggtcaccgtggtggcccttatctttaccaagaagtccaatgcctgccgtaacatctactatgtgggcagcaatgaaaatgccgccaagctctccggtatcaatgtagaccgggtcaagatcttcgtctatgtggtcatcgccttgctctcagcactggccggtatcctttctctcgcacgcttcaatgttgccacccctgagctgtccaagggcgcggaaaccaccgctatctctgccgcggtcatcggcggcacctccatgaccggcggcctgggcggtatcctgggcacatttctcggcattttcctgctgaagattgtggactctgccctggttatgatgaatgtgtccgtctactggcaggatttcgtccagggcgctatcctggtcatcgccgttaccatcgactatatgagccaccgaaaaagcggcaacagcttcctccagcgcatgctgggcctggggcgcaggaaacctgccctgcggccgtaatccgtgatccggcgcccggcgcgggcgcaggcaataccgccaagaaaaataaaaggaggaacccacaatgaaaaaggcactggcacttattcttgcactggcgctctccctgtccctgttcggctgctccccggccgaagcacccgaagactcccccaacgctggaggggacggcacgcaggctgcggccggagcgttcgtcggcaacgaaagcgacgagtactacatggtcagtttcctgtccggcatcgattactggaagcactgctttgagggcatggaggatgctggaaacgccttgggtgttactaccaagtataccggccaaaccgactctgatgtggccggtcaggtggctgttctggagcaggtcattgcccagagtcccaagggcatcgcagtcacctgcgtgaactccaccgccctggcggataccatcaactctgccaaggagcaggggatctctgtggtgtgctttgactccgactctcccacctccgaccgctcctcctacctgtccaccggcaattccgaagccggccgcattgccgctgagtacctggtacccctgtgcggaggggagggtaagattgccgtcctctataccgtgggcgccgagaacagcgaaagccgtgttcagggctttgaggcctggtgcgccgaaaacgcccctggcatcgagatcgtgaaggttaacgacgccggagacaccaccgctgccaccgacaacatgtcggcggccctgcaggccaacgatgacctggtaggcctgttctgcgtggacggtatcgccggtaccgctggccctaccgccgtggctgagtccggcaaagatctgcgtgtgctggctttcgacgtggacaccaccgtgctggacaaagtgaaaaacggtgagattgacgccactgttgcccaggggatgtataacatgggcttctggagcatgatgttcctctataccgaggccaacggcctgtccgccaaggcgctgccccagaacgtggacaccggcgttaccatcgtgaccaaggagaacgtggacgagtactaccccaaataaaagggcagccctctgataccatgcccgcaggacagagccacacgccctgctcctgcgggccctttttgcggaaacgaagtgtaccccctccggcgtttactgcccagcacccagcctgcttgtgccggagcccaattctctggaaacaaaatcaaaaggagtgaatgaaatgaagcactttgattattttgcccccaccgagatcattttcggcgccggccgcgtcaccgaggcgggggcccttgctgcccgctatgggaaaaaggccatgctggtgaccgtccccgagttccctgcggtggcagaactgtacgccaaggtcaaaaaaagcctggctgacgcaggtgtggcctgtgtgcactatgacggcgtgatcccaaacccaaccactgaactggtcaccagaggagcggagctggcaaaggccgagggggtggatgtggtgatcggtttgggcggcggctcctccatggataccgccaaggccatcgctgtggaggccacccatcccggtaccgcctgggattacaactgccacaccgcaggcccaacggagcagacgctgcccattctggccatcagcacgaccgccggcaccggcagccagaccaccccatgtgccgtcattaccaagaccagtgccaaggacaaaagcgctatctggaacaagaatattttcccccgcgcagccattgtagatcccgaggttaccctttccctgcccgccagcgtaactgcgcagactggttttgatgccttctgccataattttgaggcatatctctccgtcaacactaacccgctggtggagtgcatggccctggatgccatccgtattatcgccgcatacctccccagggcgctggccgacggctccgacctggaggcccgcagccagatggcctgggccgacaccttgggcggtctcaccaacgcatccgccggtgtcactttgccccacggcctgggcatgcagatcggcggccactgtccccatgtcacccacggccagtctctggcagtcttctatcccgcttttacccggtatacctatcccgccgctgagcacaagttcgccacggtaggccggatctttgagccctccctggagcgggagagcgatgctgtggccgcggagagaagctgcgatgccattgactgcttccttaagaggatcggcctttggatcaacttccgggagctgaacgtgaccaaagaggatatccgggagattgcagactgcggccaggtactgggcgactatgccaacaatccccgtgtcgccaccattccagagatgtatgagctgctcatgagctgctacgaccgcaaatagggggagggtggtattatgacggagactggcatcctgaaccgggatattgcggccgaactggcccggatgggacacaccgaccggctgctgatcgctgacgccggtctggctatcccggacagcaccagggtaatcgacctctcactggcggaaaacgtccccacagcggtagatgtgctcaaggagctgctcaagcacttcagtgtggagggtatcattctgagccaggccaccctggatgtgagtcccagccgcgagcgggagttcaaggcatgttttccacctgagctgccctgccaggtggtcggccatccctactttcgggacgaactgacacgccaagtaaaatttgccatccgcaccggggactttaccgccaacagcaacatcatactcatcagtgctggcggcccccggtggtactgtgaaaagagttgaggaggaaaaggcatgctgcagcagcttatgacagccccgggggtcattgaattccgggaggttccaatccctgagccaaaggccggtgaggtactggtcaaaatcatgcgcatcggcgtgtgcggctcggatatccatgtctatcacggtgaacacccgtttacgaaatatcccgtcacccaaggccacgaggtgtcgggggagattgccgcgcttggaaagggagtcaccagcctccgggtgggacagcgtgtcaccatcgagccacaggtggtatgcggcaggtgctacccctgccgccatggcaaatacaatctctgcgaggaactcaaggtgatggggttccagaccactggtaccgccagcgaattttttgcggtggatgcggctaagattactccgcttcccgacacaatgagttttaatgaaggggctatgatcgagccgctggctgtggccgttcatgcagctaaacgctttccggagctggcgggcgccaaagtggccattttgggttccggccccatcggtattctgctggcccagagctgcaaggctctgggggcggcccaggtgctcattaccgatatctccgacgcccggctggagctggcccggagctgtggggcggacttcgcagtgaacactcggacacgtaattttggtgaagtcatggcagagtgcttcggcccggacaaggcggatgttatttacgactgcgcaggcaacgataccaccatgggacaggctatccagtatgcccgcaagggcagcaagctggttctggtcgcagtatacgcaggaatggcccatgtggatctggccctgcttaatgaccacgagctggatctggacagcaccatgatgtaccggcatgaggactatgtggacgccatccgtctggtcagtgaggggaaaatccagctcaagcccctgatgagccggcactttgccttcggggactatcagaaagcctatgaatacatcgatgccaaccgggaagccaccatgaagatcctgatcgatgtagctccttgtgaagaatgaccaaggggcagggcgggcggcaggagccgcccgccgcgctgatatgaggtgaatacatgtatgacatagtagcactgggcgagagtttgatcgactttacgcccgccggcatcaatgagatgggaatgcctctgttcagccagaacccaggcggtgcgccggccaacgtactggctatggcatccaagctgggcagaagcaccgcctttgtgggcaaggtgggctgggatgcctttggccgctttcttcaggagcacatggagaaagccggtattgactgctccgccctgcgccgggatgaccgggtgcccacgaccctggcctttgttcaattggatgagtacggcgaccgctccttctccttctatcgagatccaggggcggatgtgatgctccggccggaggaggtggatgacaccctgttggaggggtgccggatattccactttggctccgtctccctcaccaaggagccttgccgcggaaccaccctgtgggccgcacggagggccagggaggcgggggctcttatcagctatgatcccaactaccgtcctttcctttggcctagtgtggaagctgcgcgccgcgcgctctgtgccgccctggagctaacggatatactgaaggtgagcgaagaggagatgtgtctgcttaccggagagagcaccctgcctggtggggccgaaaagcttcaggctatgggaccgtctgcggtctttattacccggggcaaggagggggcgtatttccgcacaccgtcaggggagggggctctgcccgcctttcccgtaaacgccgtggataccacaggggcaggagacgccttttggggcgccctgcttgcgcagatcccaggccggggccggaccgcactggaggcgctcaccctggaggagtgggtatccgccacccgtgtcgccaatgctgcgggcggcctgacaacaaccgccaagggcgccattcctgccatgccggattcagccgccatccaggcctgtgtgcaggccatgggccgctgtgcttttgacgcctgatactttcagaattctgtttttgcctgttgagtacctatgtccgggcgcggtgccgctgcatatgctgatatgggcgagtgcccaactatgctataaaggggtcgtgccagttgttatgaatgtttatcggccgaacggccattttgatgagcaggtgcaaagagcggtgtgttgtccggtctgctgccctgtaccagggccggtagggccgcaaggcccgacgggcccgcaaggcattccgggtagtccgggccctactggtgctgtgggaccgacggggccgcagggcagagacggagcgccaggaagtacggggcctgttggagcaaccgggccggctggtcctaccggccccactggtccaactgccgctgcggtgggctgcgcctgtgttcaacagatgcggaatgtgctccagcagctcatccagctctatccgaatgataatgcggtagtcgctatggatagcggaaataacagcagtggtcgcctcggttcgctgctccctgccgggccgaatgccggactgctccagctagtcaacagccagggggtgcctcaggaggctgtctccatctgtcgtattgcctcggtgcgcattaccagtgcctcctataacaatgccatcacctatctgcccgtaccggttccacctcccacgggatgcaatgccgactgtgaggctgccatccggtcctatttgccggtaggcacaaccggcgtcgccatcaatgccggagggcaaaccgtggccaatggaagtattatacgcaatgaatttgggatggtggttgtggtagggcccaacagcagcgaccctgcttttgtctccacctgcaaagcggaaatcatcaatcagtagagcgcggctctgtgcagcgctctgatttcgggcggcggcttgtaaaaaacaggccgccgtccgtctgcttctattgtatacatgtttctgagcctgtggatacacgcatcagcttgttctctaaatcaggtatgaaaaaaccaaggctgcaaaacactatccccaagacatgaattggggaggaaagcatatgaaatcagtgtgggaacagaccggagagcacagggattttgcccccttaaagggggatatttccaccgatgtcctcattatcgggggcggtatggcgggcatcctgtgcgcctatctgctgcacggcgccggagtaccctatgttctgacggaagcggaaacggtgtgcggcggtatcacaaagaataccaccgccaaaattaccattcagcatggccttatctatgacaagctgctgcgcagattcggcatcgaccgggcgagacagtacctctgcgcccagaaggcggctctgcaaaaataccgggagctgtgttctggtatggactgtgattttgaggaaaaagatgcctatgtctatgcgttggaagagcaaagaaagctggaacaggagctgtcggccatggaaaggctgggcttccacggggactttgtggagcatcttccacttccctttcctgtggctggcgctgtcagggtgcacaaccaggcccagtttcatcccctgaagttcgtctgctgccttgcaaagggcctgcacatctatgagcacacgccggtgcgggagctgattggcacgacagccgtgacggacagcggtaaagtggcggcaaaggcggtgatcgtggccacacacttcccgttcctcaacaaacacggcagctattttctaaagctgtatcagcaccgctcctacgtcattgccctggaaaacgccccggatgtggacggtatgtatgtggatgaggcgcaggaggggatgtcattccgaaacgcacgggatttgctgctggtgggcggcggcgggcatcgcacgggaaagcggggcggagcatggagggagctgagggagtttacccggcggtattatccgggtgctacagagaagtaccagtgggctactcaggactgcatgagtttggacggcgtcccctatatcggcccttattcctcctccacatcaaacttatatgtagctaccgggtttaacaaatggggaatgacatcttctatggtatccgccatgctattgagtgaccttgtgcaggggaagaccaaccctttcgcagaggtgttttcgccttcccgcacagtcctccgccctcaactggtcgtcaatggatttgaggcggccgtcggcttgctggcccccacaaccaagcgatgtccccatatgggctgcgcgctgaaatggaattctcaggagcacacctgggactgcccatgccatggctcccgctttacgaagaagggaaaatgcatcgataatccggccacaggcgatctgacatcatgctagagcaaaaaattgcccggtattgcaaagaatattgtccgagtgcggtagcaatggacggctgggtgccatcccattcccgcaggcagaggggataccaataaaaactgcggacgaaaatgctccggttcttcagagcgagtaggagcattcaagtgggtacgcccgaagtccgagtaaggagtcccttccctagagggcgagcactcgcacgaagcccgattggccgtatgcggcacccagtctatacaaaaagctacagcatttcgctgaagcggccttctggccggcggcgcttttgcgccgtgcaagtgttttggccgaaggccaaaaccttggtgcaggcggaattcacttccgccgggcatgtgaagtcctcacggtatccataaaaataaccacacctttcggtgtggttatttttatggcaaggggtgacaatccaaatcctctcaggtcgtttgcaatttttcttgagaagcatccaaacggccttctggccggcggcgcctttgcgccgtacaagcgttttgccacaggcaaaaccttggcgcagggcgaattcacttcgcccgagtatttcaatcaccgaagggtggagcgaccaacgggagcgaaacccaaaagaaaatgcgacttgtcgaaacaagtcgcattttcttttggtacgcccgaagggactcgaacccccagccttcagaaccggaatctgacgctctatccaattgcgctacgggcgcgtctgacacgtgatcatcaacgtgccagattattatagcaatctttgcgccgtttgtaaagagaaatttttacttttcttcgtcagcggtcaggctcagcacgaaccgggtgccgggagtgccggaaaagaccacccagccgccctccggcaggacggcggaggtgtcgccccaggcccaggaagcggccacgggcaggccggcagcgttatagacggcgaagccgccgtgctccggcacctggacggtcatggtcttgcccgccgcagaacccacccgataccagcgggcatagccgtcggcctgaatggtggaccaagaggaggcgccgctgaagaggggctcggctgcggcggagtccatatagagccctccgcaggtagagaggtactccacaccgtttcgctccgtcatggtgatattctgccagtcccggccgtaaagcccagggatctgggccacgccctcggcgcggtcggcgtccaggatgcggtcaaaggccatatagccgggcatgttcaccgggtcggtagccacggcggcgaccggcagggctagggggtactggatgttggtatacttcatgttcagggccaggtagagcttgccgctgcgggcgtcccaggcggactgagcctccggggacaccgggttgtcggggagcttcatgtagatgtaagacgagctgggctgctcccccaggccggggatggaggaataggccttctgccagaggtaggtttggccgttgtcctcctccacgaatttgagcatcaccatctggttctcgtcccggaaggagccgtcgctgtagtagtacaggggcgcgttgccggtggagaggacgccgtcggcggtcacggtgagcataaccgccgaggtggagtcgccgtacagcccggcgtagtccatcagcccggcgggcatctccgcccgctcggcggcgggaagggtgtggggcgtctgatccaccgcaaccccctgctcggccagggcggcaatgagcatctggctggccgccatctcgttgtaggtgctgacgccgccggaggagagcaccgccgcggccatatcatactcggggatgaccaccagcccggcgtggtagaggatggtgtcgccccccttggtcacggcctgaatgccgctgtaggcaaaggggtaccagtggacgctgtcccagcccaggccgtaggagaccacatcctcggtgtcctccggccaaatgccccgggcgtactcgtcggccatggaggcggcaatggcgtccgcgctgagaatcccgtcctcacagaacaccgcgccgccgaaggcggccagatcggaggcggtggcgtagatgccgccggtgccgtggacgcccacggtctcggcggggagggcgcgggtctcgtccgccccgtagtaggttttggccagcaggctctggtcaaagtcctcgccggggaaccaggtgtcctccagcccggcgggctccagaatggcctggcgcacatagtcgtcaaagtccatgccgctgaccgcctccgccaccagctcggccagggtgaagccgtcgttgcagtagacgctgaacgcgccgggatcggccttgagggtctggctggacagctcctccagcagggtgtcggccgccagggtgtccgggtcgttgagcaggaagccgttggcgatggtggagccgggcaggcccgacgagtggttgaggagcatgcgcacggtgatatccgtatagcgcccgtcggccatggtgaagtccggcaggtaggcggtcaccggggcgtccagctccaccttcccctcgtctaccagcttgaggacggcggcggcggtgtaggtcttgctcaccgagccaacgccgtacagaatgtcatcggtgagggcgcggttctccgtgcgggaataatttcccgcgtggccggtgaggatgatctccccattttgccacagggcgtactggatgctctgggccccgccggtcgtcagggcggcctgggcggcggcctgggcggtctcctccagcgccggtgcggcctccgccgcgccggcgggcagaacggccagggagagggccagggccccggcggtgagcagggaaccgattcgtttcatgtccaattcctcctttttgcttggttccaagagaaccatacaccttccacgaagtggaaggtcaagcatcttttttagaatagcatccttttccaccggtgtacagttaaaatttccttaaccctcatgccaggcccagcaggcgggcggcggaggctaccaggaagcagaccgccatgccgatgccggtggggatggcgatggagagcagggtccacttggcgcttttcgtctccttgccgatggtcaggcaggtggtggagcagggccagtgcatcagggaaaagagcatggtgcacaccgccgtcagccaggtccagccatggtccaccaggagctgccgcagggcgtccaggctgtcgaactccagcaggctcccggtggagaggtaggccatgatgatgatgggaatcacgatctcgttggccgggaagcccagcaggaaggccatgaggatcaccccgtccaggcccagcaggcgggcgaaggggtcgaggaagccggtgcaccagttgaggatgctgtcgccccccacctgcacgttggcgcacagccagatcagcaggcctgccggggcggccaccgccgccgcccggcccaggacaaagagggtgcggtccagtaccgagcgcaccaccacctgcccgatacggggccgccggtaggggggcagctccagggtgaaggaggagggcacaccgcggagaagggtgcccgacaggaggcgggataccccgaaggtgaggaacacccccagcaggatcaccccggtgaggagcagggcggccagcagtccgcggccggggccgccggatgtgcctacaaagaacatggtgatgattgcaatgagggtcgggaatgggccaccgggggaagggcaaacactcagagacggcagagggtgaaggccagggccgccccgtcccagtcggcccgctggaggaggatgcggcacgcggcgcgctgttcctcccgggccagctcctccagccggggggccaggcggggaaactgggcggagagggcgtccagcgccgcctgatcggccgccgcgccggacaggttggggcaggaacaggccgccgctccccggcgcagcttggcccggcagatgtagtcgtaagaaccgcccttccgggccttgggaagcagcttctccccgcaccgggcgcagaacagcaggccggacagcagggcccgccggttgtgcaccgccggggcccggtccggggtgagcagctcctgaacggccctccacgtcgcgccggacaccagggcggggtgccgccccagggcgatgatccagcggtccaccgggttacggggggcgcggccgccggagtagtcccgcttctggtaggccagcaggccccggcggccgtcgcagtccgcccggggaaagcagaggtcggcccccagggcggcaaaatagtcccaggcgtcgccgtcggcggcgcagtacaccggattttgcagcaactcccgcaggccgggcagggagaagggccgcccggtgcgggcggtgatgccctcctccgccaaggcgcgggacaggccgctgaggctctgccgggccagaaacagccggaagatggccgcggcgcggccccactccgcggggtcggggaccagccggcaggcggtgcgggcgcggccgtccacgatcacctccgccgtccgctccgcccggaagccggtgggggtggtgccccccagccaccgccccgtccgggccagcaggcacatgttgtcccggacccgctgggcgatggtctcccgctccagttgggcgaagacgctggcaatgtacatcatggccttgcccatgggggtggaggtgtcgaacctctcccggatgcagaggaaggccaccccccacccctccagacgccggatgaggtcggcaaagtcgcccacgctgcggctcacccggtccagccggtagcacaccagggcctccggccgcgcccggcggatgtcctccagcatccggcggaactgggggcgctggaaatcctttcctgagaaaccctcgtcctcgtagaccgccacctcctccggccttacgccgggatagtgggccgccagatagctccggcacagctccacctggttttcgatggactccccccggccggtgagcaccgacttgcggctgtagatggcaaagcgcatccgccccgccccctttcgccctatgtgtacgcggcgggagtggaaatatcccccttgacaaaggaggtttgttcggataaactagtctggagaaaaaggtttctcttgacaaaccaaccgtaaggaggtgcatgcaatggaggagtataagctgttcgacgcggagtaccggctgatggagctggtgtggaacctagagccggtgaactccaccgccctggcccgccggtgcgaggcggagctggggtggaaaaagtccaccgtctttaatctgattcgcaagctggccgggcgggggttcctgaaaaacgagcacgccaccgtcaccgcgctggtgaagcgggagcaggtgcgccagtacgagagcgcggcggtggtggagcggggcttcggcggctccctgcccgccttcgtggccgcctttctgcgggagaagaaactctctccacaggaggccgacgagctgcggcggatgctcgacgaaagcgaggggggccatgactgagctgtttctgacggtgcttcagatgagcctgatggccgccggggtggtgctcatcgccctgcccctgcggtggctgttccggcggctccgcctgcccgccctggcctgcgagctcctgtggctggtggtggccgtccgcatgctcctccccgtgggactggtcaccggccccttttccgtgctgggctggctcaccccggcggtacaggagcagacggaggccctggcccggacggaggagatcgtactcctgcctgcggcgcccgaccccgcgcccccggcggagcccgctcccagcttcgccctcccggaggcggttcccgccccggaggaggcggccccggccgcggaggggctctcggtgctggacgtgctggcgtggctctggctggccggggtgctggcggtgtggggatacatggccctcgcctggctgcggctgcggcggcgcttggccaccgccgtttggcggggctctgcgcagatgggctggtggtgggagagcgaccgcatccccaccgccttcgtgttcgggttctttaccccccgtgtgtacgttcccgccggggtggagggggaaaccctgcggtgggtactgctccacgagcgggcccacatcaagctggggcaccaccggtataaggccgtgtactttctcctggcagggctgcactggttcaatcccatgctgtggctgtcccgggtattgctgggccgggatctggaggtggcgtgcgatgagaaggtgctcggcagcgcctgcggcagcccgcgggagtactccgccgccctgctggccctggcctcgcccaaccgggggcccctgctgccccccggcttcggggagacgggggtgaaagaccgtatacggcgggccctgaagtggaagcccgccgccccctggatggcggcggtgctgtttgtgctggcggtcgcgctggggctgctgctgctcaatgacccactcttccccgatcccattgtgaacggccagtatcccaccctgcggatacagatggagcaggatggccccggcggcgcagggggtgagacggtggtcaacatgggcgtgccggaggcggcaacctggccggaggagctgccggaggcagagcgcaccgcctccacgcccagaccgtgggtgagcctctatctggacaatggggcatttcccagccggtggacgatgacggaatacctggtggagaacggacaggctgtccgggcccgggaggtaggactttccccctatggggcgggcaatggctggctgctccggctggagagccgggaggatgcctccggcgcgggcatggagacccggctgtacgtcctctcctgcacctggcaggagggaatccgcacccacgagctggagtacgcattccgcctcaatctgccttcggtgccccctggccccctcaccgagccggtggtggtggcgggggatacccgtgtcgacctagacggggacgcctccgccacggcggctatgggctcttttctgcatatcaccatcccggacaacgtggtctcctatgccctggcgggacagggagcggacggcggctccacgggtcaggggggcgagagcctgtccagcggcgggggcggctccatcggtgtccgcctggaatatttgggcggtcgcgccccgggcgcttcctccgaccagacccagcattataccctgacctacacctgggccgacggcacaaccgagagccgcgctttcacgctctacgcctataccccacggccggagtgggatgacgagggcctgtgcatccgctaccccggcgatacggagtggacggagctggacaccttgatccccgtgcccgccgagtgggccggacaggacttggcgggccgggacgaggcggagagcctggagggtcttctgagcggcaccggcggcatgagcgacggcctcaacggctggttcgtgttcgccatcggccacggcgtggggggcgcggatacctacgtctaccgcacccgcgacggggggcgcacctggcaggagactgggcggcccgacccggcccggatgatgtggtatccctcctacacctatttcatcgacagctacactggcttcctgggtcagagctatttcaacgacgcgcccatcttccgcaccactgacggcggcctcacctgggaggagatcaccctccccctggcgggagagtgggagctgtcctccatgtgcgccagcggctcggatgtcctgatgctgctcaccggctgcggctccaacagcctctccaatgcggtgctatacagcggggaccggggggagacctgggagcgattggctctgccagcggacgccagcggctggcaggccgacgccgtccgcctgcttggggagctgccggaaaacgggatcgccctctatggcctcaacccgaaggccaccggcctggacggtctgctggtggcgtgggacggcgtgctggcctgtttccccagcctgagctatgacaccgggccccaggccgtacccgcccagcttgccctgggggactacgacggggacggggccgatgagctggcggcgatgctctgtacgggcactggcaccggggtgaatgtctggtctctgtacgtttttgaacaggacggccgggcccttactctgggcgggatgctggatgccgacgatgtggccgcggcggagctgggcctgcctgctggccggtatgtgggcagtcaggtatatttcggaacagagggagacgggctccggatcttcctgggcgtgaccgatgacaggggcctcaacgatatcggagagctcacaggggcggtacgctacgatggccagacgctctccctgaacccggcagagctgacgtaccaggagattgcctagcttcaccggctcccccagacgcagagacaccgggacgccatgcgtcccggtgtctcttactcccccttgtactgcttcagcgcctgggccaactgatccgggcaggaagtgggcttcccgccgcagcgaatgccgtccaggcggcggatggcctcggacacctccatcccttccactaggcgggagatgccctgaagattaccgtcgcacccgccctggatgcggatggagcggatcacgccctcctccacctccagcgtcatacggcgggaacagacgccccggggctgataatcaatgatcataacggtctctcctttttgttgctcggcccatcatagcatactttggataggattgcaattcccatcctccctgtgctataatgtgacctagtaggcttctatggaatcccggtgggaggtgaggcgattggccccgagcaccaagctggccttggcgaacgcattgaagaagctgctgcaaaagaaatttttggatgatatcaccgtcaaagagctggtagaggagtgcgaggtcaaccgccagaccttctactaccactttcaggacatctacgacctgctgcgctggtttctggagcatgagacttcagaggcgctgcggggggcggattgctggcaggacgccctgcgggccgccttccgctatgtgcaggacaaccatctggccatctatcacgtataccgctccagcggacgggaccacctggactgccactttttcagcctggcccgtgccatcaccgcctccactttggcggagagtgcacgggacctgcccctgccggagcgggagctggatttcctcgctgatttctacatgtacgccattgccggcatgatgatgggctggctctccgacgatatgagggaggagccggaggagatcgtgggccggcttgaccgcctgctggagggcgaattccgccgggcggcggagaagttttcggccggggagccggtgtcttgagtcttgagagcgcgacgggggaccgcacgggcggtctccctttttcgcgccccggtgattccacatccagggaggggtaatgttcatggattatcattttctctttgaaatcgcggtcattctcttgagcaccaaggtgctgggcatcctcaccaagcggtttgccctgcctcaggtagtgggtgcgctgctggcgggcctgctgttggggccggccatgctgggagtgctgcaagagacaaccctgatggaccaactggccgagctgggcgtcatcgtactcatgttcaacgccggactggagaccgatctgggtgagctcaagcggtcgggaaaggcggcctttgtcatcgccctcatcggcgtgctggtccctctggcgggaggctttgccctggctgccgcctttaaccggggaccggatgcctttctccagaatgtgtttatcggtgtggtgctcaccgccacctcggtgagtatcacggtggaaaccctgaaggagatcggacggctctccacccgctcgggcagtgccattctgggcgcggccatcatcgacgatgtgttgggcatcatcggcctgaccgtcatcaccagcctgggcggtggtggcgccaacgtgtgggtggtgctggggaagatcgccgccttcttcgccgtcagcgtggtggtatggatggtcatgcaccggttcgtggactggtggttccgccggtacagccgggacaagcgccgctttgtggtactctccttcgccttctgcctgctctactccttctttgccgaggcggtcttcggcgtggctgatatcaccggcgcctacatcgcgggcctgatcttcgccaacacctgccgggtggcctacctccaggaccgcttcgataccctgtcctacgccctgctgtcccccatcttcttcgccagcatcggcctgaaggtggtcctgcctgagatgagcaccaccatcctgcttttcgccgtgctgctggtgctctgggccgtggtgtccaaggtggtggggtgcggactgggcgccaagctgtgccgctactccaaccaggacgccctgcgcatcggcgtgggcatgatctcccgcggcgaggtggccctgatcgtggccaacaacggcattgccgccggactgatgaaggaggagttcttcggcccggtggtgctgatggtcatcgccaccaccatcctcaccccagtcctgctcaagctggtctaccgcggcaaggagcacgactacagcgatctgcaggagagcgagctggtcaacgcctacgaggacgccgccgccttcgacctggcctcccaggctctgctggaggatcacgagaacctgaagcaatccgccaggaaaaaataaccgtttaacggcgcgggcgctgcccgcgccgctctttttttccacccaggagcatagccttgtggaacaggaggcgaggcatatgcgcagcaatcacccgagacacgttgaaatccgcctggccgtcccggccgacgccgccgcccggcgggaggccctggaggccctgctggccgggcggggcgatttgccctttctccggtggcgggaatcgcccgttgcagggcacgaagttgttggtcagaatggcgatgagccgctcccggggggagtcgatgatccggcagcccaccaccccggcggcattgcagccaaagcccatgcacatggtcagggcctgcttgccgcaggccttggcccgctgaaaggcgtgatccaggacgaaggccacccgggggaggtagccgaagtcctccagcagggtaaacaggggaaagaagatggccatggggggcagcatgacgctcaccacccaggccagcacccggtagacacccagaaccagggcgccgtggagccacgccggggcgtttaagtaggcaaacaggtcgctcagccggtcctgcacccagaacaggccgtcggacaggagctgggaggggtagttggccccggtgatggtgagccacagcaccccggccagaaggagcagcatcagggggatgccggtggcgcgggaggtaagcagccggtccagccgctgctcccgccgcccggcggcggatcggagctgggtgacggaggccgcgccgatggcctcggcggtctccaccagagcggacaccacccgctcgcaccaagcgccgccacccaggccctgccgctccagatcggcgcgggcctcctcgaccgccccccacagggcggcgtccgcccgggggtcccactccagagcggcggaaagccggtccagaaaggccccgtccccctccagcaggcgcagggccgtccagcgggcggggaggcggcccctcaggcggggctccagcaggggccgaagggaggccacggcaaactccaccgggggcgggtagcgcaccggaacaggggtaggcggctccggggcggagatcaccccctctaccgccgccatcagcgcctccagcccttccccccggccggcggcggcgcccaccacgggcacccccagacggcgggacagcccctccagctccacccggacacccttgcgctccgcctcgtccaggaggttgacgcacaccacggtgcggggctggagctccagggtctggagtaccagattcaggttgcgctccaggcaggtggcgtcgcacaccaccaccgccccgtccgcgccgccgaagcaaaggaagtccctggccacctcctcctcggcggagtgggccatgagggagtaggtgccggggaggtccaccagcacatagccccggccgccccgctcacagcggccctgggcgctggtcactgtcttgcccggccagttgccggtgtgctggcgcaggccggtaagggcgttgaacacggtggacttgcccacgttgggattgcccgccagggccacgatgcggtcatcgggccgctcacgccggagcaccagggcggtgtccgccgccccggcgccggtggaggtgctggtcagtcccatagggcgtcccccaggtacacgcccccggcgtcacggccccgcagggcgatgacggcgccgcggatcaggtaggccgccggatcgccggcgggactcaccgccgtacaggtcacccgggtgccggggatcaggccgatgtccagcaggcggcggcgcatggcgggctcggcctcaatatggctgacgcgggcgctctggcccacgcggaggctgttcaaagaagatggattcatatcgccggtctccttacatacattagcttgaggaaactttgtttccgtgctctatcctattgccgcggccccgaaagggtgccggaggacgggaggcgtgtgtgcatgtcccaggagggaaaaccggatttttacacccagaagggctatcagatgcgcagtcaacacgcccttacgggggcgatggaggattatttggagatgatctgccgccaggcggaggcggacggctgtgcgcgcatcggcctgctggcggaggggctcaacgtgcgtccttcttcggcctccaagatggtgtatcagctccgcgcgctggggctggtggcctttgaaaagtacggcctgatccagcccacggagaaggggtggtcggtggggcgctggctgctccaccggcacgaggtgctccaccgctttttctgtatgctcaacggctccacggacgagctggagctggtggagcaggtggagcactatttaaacgaggacaccgtgcgcaatctggaggccctgctggagcggctggagcatggggaggggtagcggctccatccggccccacctggccgtccttctgctgttgaccggggtgctggcggggctgctcctccgtactccggtcccatccgtccccacgccgctgccccagggcgaggtgggggagcgcatcgccgccgcccttccggcggagctgtcccccctgcgccgggcctttgtggagagcggggccgccctggtggggcgggtgggctacttctggggcggcaagtcggacgcggtggggtgggatgcgcgctggggcgtcccggcggtggtcaccgccccgggcagcagcaccagcggggagagcctgcctttcgggctggactgctccggcttcgtatcctggtgcgccgtcaacgccgccggagaccccgccgcctttgccgccgtgggcaacggcgtgcgggcccagcgggccctgtgcgccccggtggactgggccgacgccctccccggcgatctggccttctatcccgacctgtcccatgtggggatcgtggccggccggggagaggacggagggcttctggtgctccactgctcctactccctggggggcgtggtgtgctcctccgacgccaaggccgcgggctttaccgacctgggccgcccctccttgtttgaaaaaacgccctgattccacaaaaggattgacgaaccgccgcaattccagtaaaataaaaccaatcacttttatttggccgcagcagtttgctgcggccctgttttggtgtttggaggtcggttatgtcagaagaactgcgggaaaacaaaatgggcaccatgccggtccggcggctggtgctctccatgtctctgcctatgatgatcgccatgctggtgcaggcgctctacaacgtggtggacagctatttcgtggccaagctcagcgagaacgccctgacggcagtgggcatggtgttcccttttcagaatttgatgatcgccgtgggcgtgggcaccggcgtaggtgtgaacgccttcctctcccgcagcctgggggagaagaactatgatgccgccaaccgcgcggcggaaaacggcgtgtttttggcggtgctctccacgctggtctttacggtggccgggctcaccctggcccaccccttcatcgccgtacagaccgatatccccgatatcgtctcctccggcaccgcctatatgcgcatctgcggcggcctgtccttcgggctgttcctggaaatcatgttcgaacggctgctccaggccaccgggcgcaccttctacaccatgctcacccagggcaccggggccatcatcaacatcatcatggacccggtgctcatcttcggcctgggccccttcccccgcatggaggtggcgggggctgccgcagccaccgtcctgggccagatcgtggcggccgtcctggcggtgctgttcaacctcacctgcaaccacgatatccacccaaccctccggggcttccgccccaacggcccggtgatccgaaacatctactccgtgggcgcgccgtccatcattctcaactccatcggctcggtgatgaccttcggtatgaaccagatcctgttcgccttctcgtccaccgccgtggccgtgttcaatgtgtatttcaagctccagagcttcgtgttcatgccggtgttcggcctcaacaacggcatggtgcccatcgtctcctacaactacggcgcccgtaagcgtaaacgcctagtggatacggtgaaattcagcgccctcctggccgtggccatcatgctggtgggcctggtggtcattcagctcttcccggcgaatatcctcggcctgtttgaagcgtcccccgacatgctggccatcggtgtgcccgccctgcgcatcatcagcctgtgttttgtctttgcgggcttcagcatcatctgctcctccaccttccaggccctgggcaatggcctgctgagcatgatgatctctattgtccgtcagctcctgatcctcctgcccgcggcgttcttcctgtccctcagcggcagcgtcaccgccgtctggtgggcctttcctatcgcggagctggcctctctggccctctgtgtgatcttcctgcggcgtatctaccgcagggtgatcctccctctggagtaagcgccccgccgtctcctgcatacaggggccgcccctacctttccggagttccgtttccagcaggctattctgcggcgcttggacgtagggtcgggtgcccacacccgcccggagctggccggtggcccggaggtgcgggccgacgtgggcgtcggcccctacagaggtctgctgcggcaggcactgcccggccaaaatgctccgtaggggcggggcttgtccccgcttgcgggcggccataaaggccgcccctacttccggggctcgtctccggcgggctgttttgcggcgcttggacgtaggggcgggtgcccacacccgcccggagctggccggtggcccggaggtgcgggccgatgtgggcatcggcccctacagaggtctgctgcggcaggcaccgcccggccaaaatgctccgtaggggcggggcttgtccccgcccgcgggcggccatgaaggccgcccctacttccggggctcgtctccggcgggctatcttgcggcgcttggacgtaggggcgggccgatgtgggcatcggcccctacagaggtctgctgcggcaggcatcgcccggccaaaatactccgtaggggcggggcttgtccccgcccgcgggcggccatgaaggccgcccctacttccggggctcgtctccggcgggctgttttgcggcgcttggacgtaggggcgggccgatgtgggcatcggcccctacagaggtctgctgcggcaggcaccgcccggccaaaatgctccgtaggggaggggcttgtccccgcccgcgggcggccataaaggccgcccctacatttccggggttccgtctctggcgggctatcttgcggtgctcgaagcatgtaggggcgggggcccacacccgcccgcaggccgttcggcaggacaaggcccccgcgtccggcggtacgccgtgcgcgggggtgcttttatctccagaggaggtaatcagaatggcaaattatacacagcactatcacctgcaccagtgggagccggaggacagcttcctccgcaccgacttcaacggaaatatctttcggccattgacgccgcgctgctggggcttgagcgggacaaatgccgcgcagccatcgggcggtacacaggggatggggagctgagctacacggtatcgctgggcgcaagacccaagctggctgtggtggacaacacttcatccttttcctccggctatgagctggggctggatggaatgaatgagcggagcgtgattattacggaagatgggttccgggtgaacggttctccccacggcctgaaccaggaggggacgctgtaccgctattatgcgttcctgtagacaaagaaaacccccgggcccaaaggcccgggggttttgcgtatccttactggaaggtcacgccggtggtatcaatggtaacggtgtagctgggagtagcaacactgccgccgctttccttgaccgtgtagtggtcagcatcaacggtgaacgcgccagtggagctctcaaacacctcaagggtgatgggctcgccgtcgtcgcagaccagcagggtatactcgatggcagtaccggccggagtgacgttggcggcaccggctttcacaaagctgtcgccatgcttccaggcagtggggacatcctcaccgccctcggtggcgcaggtgatcagggcattgttggtctgacggaccgcacgataggtagtgctcggatccacaggcagggtgatggtgagggtggtgagcttcataccattctggggcgtgattccgttgaacaggccaccgcccagggaaccgttggccagaccggtgctggtatccttcacatcctcagccacggggccgaccgtggtgtcgcccacggtgtcaaccacaacgtcctgcacctcgtcggtgacagtgtagtcgaggaccttgaaggtgctttcgctgctgccgcgcttcacgtcgaccgcgctgatatcgccattggtgtaatggatcttgacgacctcatagcccagcttctcgaaggagctgatcagcaggtcctccatatccatgagggtggcatcctcggcgttcaggaagtagaaggtgcctctgttggggccgctggtgatgatcttgagggccagatcatcgttggagggcttgccgggcttgttgttgccggtggggtcctcagtcaggtagctcttcacgatgaaggcggccttcacgacgttgtcctcgtcgtacaccacatagccatactggccgtcctggaaggtggtgccggtcgcggtctcgtcgtccacgtcggtgttgtcgatgtcgtagatcagctcgtcattcttgttggccagacggacagggctctgcagcttggtcatgtcgagccactcgttatccttgccgggattctggatggcgttgttggtggtagcgtcggtatagacgttgacatagcggctgctggtgaccttcacgaagccctcagccacgcggctgggagtggtgttgaaggaagccaggttcttggagtccatatcaatggtgcagacgatgccgtcagtgcccttcaggtcgttgcgcaggttctcctcggacttgacctcttccatggtgccgtcctcatggatgacggtgtaatagaagtagtcgttgtaaacgtcgaactcgggcatcacgaagacatagtcctcgttgccgaacttggcctgagaggtgtagaggacaaccacattggccacgtcgctcttatacaggtccacaacgctgaccttgacctcgccgttggcggtgccgttagtgttcgtgccagcgtcgatgatcttcttgccagtctcggccagaacgccgttcttgtcgatcagcttggccatgttgtcatagcccacagccacggagccgtccttgccgttgtagtagtacacgatggtgtcggcgtcaatgccataggtgccgacgggatcgccgcccttgctggcgctggtgtcgatttcaacatcgcccttggagacattggcatccagggtctcgtggtcggcctggaagaactttccgtcgctgtagtcgctgccggcgtgagagccgtcaaccaccttgccgacatccagagcgggcaggtcaatggtcatcttgtcgtcatcgttgatgctgtaggcaatcaggttgccggcggcggcaccagcggcggggtacacaccagcgctgccagcacggccatcatcggtgcccaggaaggtcttgagctgctcggtggcctgctcggtcgtctcattggcgtccttccagttcttcacggaggcgctccagttcaactggtaggtcttctcagtgccgtcgggcaacagaaccttgacctgagcgtcggtgttcagcatgttggtggagaatgcggagtccagaaccagagcgtagttcttggcggccgcctcaacctcctcgaaggcgatcacgttgccgtagtcgtccaggtagaagttgtaggaggtctcaaactgcacgccattggccttgtcacattcggtcacgtcgaacttgaccacctcggtgcgggcgttggtctccagctcatcggccttgtacttctcgccgccgacggtcatgtacttctcggtgcccttcacgttgaagtgctccatctcgccagtgacaacctcgggcttctccaggtaggtgcggccgccgtactggacgtacaggaccacgtcctccttggccatgtcctcgtagcccacgacatccttattgtccagggtgcccagggtgcggacggtcacggtctccttcttggagttgacggaggtgatgtcggccagagccttctccacggacaggacgtaatcaacctcaccgtcgccgttgttgtcgatgatggtcagggtagcgcccttcacgttggcggtcttgtcgccatacttctcggtggtgttggggatgtacttgccggagttgtagttccagaaatacttggcgtccttgtcggtcaggccgttctcgcccagcagcttgtcatagtccacctgggggtccttcgcgccgctgtagagcacggtctcgccggtggtgacgacagtgttcacgtcggagaccacggggtcgccgtacacggtggagtcagccaggatagtggtcttcttgatatacaggttgacggtcttgcccagcatgtcaacgggagtgctgacattgaaggtctgggtcttgagggaggcgtcctccttgctcacggtggtgttgccggtggtggagaagatgccctcgccgttgtagatggtggtcttgccctccttcagggcggcgtcgccgtcatcggaagccagggaagcccactcgttggccacaacaacgccctgcaccttgatcacgccgtacttgtcggccaggatggtgcggtggtcgctgtaagcgatggggtagttgttggtggtgtagctctggatcatctccacgtccagggcgttgtagatcagcagggccgcgtcatcccggttcaggggagcggacagatccttggtgaagccctcgaagatgccctgctcgtcggcgcggacggacacgttgatggcccagtcggcaccctcaaagccctcgatagcggggtcgtagcccacggccaccagcagcatcttggccgcctccagggcggtcacggtggcggaggggtcaaacttgccgttgccgcggccggcgatgatgccggtggtgtagcagtagttgatgtgacccttggcccagttggtgttcacgtccaccaggccggagttgacgctctggtacagagcgctgttgtccacgcccttgttcatgatgacggagagcatcttcgccatctgagcgcggtcaacattttcggtaggactataggagccgtcgggcttgccctcgatgatgccgagggaaaccagcatggaaacggcatccttgtttacaatctcgtccttatcggtgagattgttgtagctcgcagcggaggcggagacaaccatcatgccaaccagcatgatcgccgccagagccaggctgagagcccgcttgaggtttctcatttggatttcctccttctgaattttgagccagaggggcgtatgacgccccttacaggggaggaaacaatgcagttttcgggggatagggatataaaaggcggggaaacagaatcaaaaggttactatggtagacgtctggtagacaatgcgggagcgggaaaagtgaaaacgccttggaacccaaagggttccaaggcgtttctggtagacttttggtagaacaaaactcattccacaacgacgatgcggaccttgccgccctcctcgggagagcggtcatagtagacggtgatatcgtcggagaaggccagcgccagattcagcgcagccttgtggtcgccatcctcgccgggcttaaaccaatctccagtagtcttattgtagcactcaaccttgtcggaaatggggatcaccatggagttggtggtcaagagcatggcatcggtatcgaattgggcgcggcggatgcccttggcctcgttcagcggcataaacgcggccatgcgattctggccgtccaactggtccagagagccggcgacgccgcccatgcggttggtcttggcgccgtccacagagccgaccacatacggtggcatcccttttggaaagctgccgttggtaacactaatctcaccgttcttatactcaccgttaccatcaggattaccagaggtttcttgatagccggcaggctggtagcgaattataccgtagtcatagcggtcgccggtaacatcgttaagcaccagcctatccacccggccggcccagtcatagcccacataggtgatcttgttggccgggatgctggtgatggtaatgtcgctgcggtcaatctccaccagcctgccgttgcctacctgctcaaagaagcgggcgccggcggagagctccttagtgcccatgcggttggtagtcaggttcagcgcggtggaggcgccctttccgtttaccttgctcagggtcagatagtcacgcttataggaggataccgtcaccaggcagccgttgagcttggcggcggcggctccgctgtaagtggtctggccctccagagtgaggatgccgtccagcagctcgatggtagccttggtgccatcaactgtggccacgccgacggcgttggacttggccacattgggagagacagcccccgccacctggccggtggtggtgagcagcagggtaaccttgtcgcccaccttgaatgcagcaagatccgcctgtgcgctgggcagtacggtgagcttagcgcccattacggtgacggtggagggagcggcggcgttggggtaagcgttctcatacaggccgctgagcttcagatcggagacaaacagggtatcggaggacttgtcgtaggtccccacgtcatactggcgcaggtcgctgagctcggcggggatgccgttcttgtagatctgggccggggtcttgccgccggacagggaggcgaaggggttgttggagccggtgggtttgttcttggccaccagcacgttgtcgtcgctgacgctggcggtcttggagggcatatagatgtattccagcttaccggagctgttgaagcacagacgcaggctggcgccggagcgcaggctggtccagatcttctcgtaggtgctggcagcctgctcatcgctggtatagaccggggtctccagcgtgacggagatggtttcgtcgcccaacacaggaatggcgttggcctccgggctgcccatgacggtgacggagcggaaggtgctgccctcctcggggaggacggccagcagtttcttgttcttatccagaacgagctggccgcgggtaccgttgagctcgccggggaaggagacgcggtcggtcttataggtgccggaggtggtgagcaccgagccggtggtgccgtcgtcggcagtggcgtcggtggagagaaccaccacgttgtcctccagggaaccgcccagggtggtcaggtacacctggtcgctgtccttaggctcagtaaagagcaggttatagaacagaatcgccgcctgcccgcgggtgagggtggccgcgccgcccaggctcaggccgtcggccagccccgaggactgggccacggccacatagccgtcataccagttggagccggtggccacatcggcgctgccatagcccagcacccgcatgaggatggtgacggcctcgccgtaggtgatggcctggttggggcggaaggtaccgtcgcccacgcccataatcaggcgtgtaccgccagtggtgccgccattctcaccagcagtgccgccgatggtgatggaggaggccaggttcacgtagcccctggcccagtaggtggggcccacatcggtgaagatggtgcggttgcgctgggcgggctcctcagcgccgcggcccatgatctccacggtcattttgcagaactcggcccggctcagggtgccgccggggttgaaggcgccgccgccggtgccgtccaccacgcccagcaggcggagcatctccgcggcgtcggcgacagtggaatcgctgatgtcggagaagccgcccgagccggacgccgaagcgggaggaaataccagcagcccggccagcagcgcggcggacagaaggcaggaaatcagtcgttttaatctcatattctctctcctttaatcggcccgcagggcatccaccggctggaggccggaggccttgatggcagggtacaggccgaagatgacgcccagggccacggaaatgaagaaggagccgacggcaacgctcgggctgggccatagaatcattttaaaggacaatttgcccacgatcaaggtgccgatgtagcccgcggcgataccgaacaggccgccgatgccgcagatcatgcaggcttcgatcaggaactgggcgatgatgctcttgcgctcggcaccgatggccttgcggataccgatctcccgggtgcgctcggtgacggtgaccagcatgatgttcataatgccgatgccgccgacggccagggagatggcggcaatgccgcccaggaagcgctgctgcatcttgtcctgctcctcgccctgctcctgccaggtattgggggtggagacattgccctcattcgggcccagcaggctgtccaggtagccctggagcagggagacggccttggtggtcgtggcggagtccttggcctttgccacaaagctattgattttggtattgccgctgatgatgcggttcacggtatagggaatgagcacatagcggtccataccggacatgttgttggggtccttctcctcaaagacgccgacgacggtgaaggggatgccgttgatggtgatctccttacccacggggtcaatgtagttgaagagggtgtcggcgattttggagccgaggacacagacctggctgtagttttccacgtccaggaaggagatgtcccggccccgggcgatggtgaagttgttgcagagggagtagtcctggttgcccatgacgagctggggggattcgtcccagttgctgttgtggctgtccatggacttggcgccgtacttcagaatggtctggtcgtagtagtccacggtgggggtgaggcccagaatgtagtcgtccagatcctccatgcagtagtcccggatggtcttggtcagatcccgcccggaggggctgtaggcattgatgttgaccacgttgttgcccaggctctcgtagtactcccgcatctggcggttctggccctcggcgtaggaaaccaggatgatgacggcggccaggccgatgatgacgcccagcatggtgagggcggagcgggcctttttcgcggcgatggatttgaccgcgatcttgaaggcttgggtcaggttcacagaaaggccccctctctgtcgccgtcgtagatgatatgcccgtcggagatgcgcacgacgcgctcggcggtggcggcgatgccgttgtcgtgggtgatgaggatgatggtggagccgtcgtcgtgcaggccgtggaggatctccagcacgtgcttgccggtgcgggagtccagggcgccggtgggctcgtcggccatgatgatggggggctgggtggcgatggcgcgggcgatggccacgcgctgctgctggccgccggacatctcggtgggcttgtgcccggcgcgctcggccaaacccacccgctccagggcggcctccacccggtcggcccgcttggaggcgggcacgccctggtagatgaggggcagctccacattctcccaggcattgagggcggggatgaggttgaagccctggaagatgaagccgatctgcttgttgcggatgtgggcgagctgccggtcggacagctcggtgacgtccacgccgtccaggtggtagtccccgtaggtggggatgtccaggcagcccaggatattcatgagggtggacttgccggagccggactggccgatgatggccaggaattctccccggtccacggagagggagacgccgtccagtgcgcggacctcgctctcctccccctcgtggtagattttaaagaggttttttacatcaatgagcataccggggccctctttaatagtacatttcgtcggggttctggtagccgataaagacctcctggccttccgccaggccgcgggtgatttccaccttggaattatcggacaggccgacctcgacgggcacggcccagaagccctcggggcagtcccaggtggggtcgggctccagaatggcgttggcgggggcctccttggacttgacccacacgatgacgccggtgctgtcgtcgctggcgccgccggaggagccgcccatggagccgccgtccacgatgacgccgccgccgggcatcggcaccgcgaccatacccaagggatcagcaaaagcgccgccggagtaggactggggcagagcttccacgccgccgtccaccatgccgtcgtccatcatgccgccgtccaccatgccgtcgtccatcatgccgtcatccatcataccgtcgtccatcataccgtcatccattccggcggagggatcggcatccagggtttcggggagctggacgttggcgaagctgacatacttgacggcctggacggggacggtgaggcagtcctccgactcgctggccacgaaggagtattcggcgtaagtaccggggatcatgctgccgtcgtagttgtccacggtgacgacggcgggaatggaggccacgccgttctcgccggaggcggtcatggatacgctctccacgatgcccacgtagggcgtgccgtactggttgatgtccaccatcataccggccttgatgtagcgggcgttgcgctcgtccacctggatttcgatgatcatctgggaggtgtcggcgatggtgatgccctggccgctggacacctcctggccctcggtcaggctgcactggagaaccgtgccgtcaatgggggcgacggcgttgtacttctccagctccttggtggcctcctccagcttctcctgggcggccttgagggcgttctccttggaggcgatctcctcgtcggtgttcttggcgcccagctgcaccaggagctgcccggccttcacgtcgccgtagttcagcaggctgacgcgctccaccgggccggtggccttggcggtgatcttggtggactcgtagtactccagctttccgttctggtaggggtagatgggggtgccgtcggcggcggtgaggccggcagaggcatccatcccctcggcgagggtgccggggttgtccagcaccagcaccacctcgaagtgggtggcgccctcgggggagacaaagcgcaccttgttgatctgctccaccttgccggtgacgggcgccatgatggcggggatggagatctgcgcggtctgccccaccttgatgtcaccctcataggcgtagctgtagtacagggagaggcgcagcttggtgtcgttgaccagggtggcgatggtgtcgccctcgttgacggtgtcgcccaccttgagatcggccacctcccgcaggttgcccgcgtggggggcggtaatgctcagctccgcgatcttgtcatagacagcctggagctccttgttgcagttgtccaccgacttctgggcctcggtcaccgcgtcgcgggcggtggtgtcgtccatacggtagagctgctggcccgcggtcacctggtcgccctcctggacgaagagctccagaatggtgcccgagccgggcgtgacggtggcggagtccttggctttggtggtgccgctgccctccaccatggactggatggagccccgggtgacgaagtcggtcatgacctcgcccttggagccgtcctcccggaatacaaagtaccacaccagcacaacgagcgcgatggcgatggcggcgacaatgagaattcccgcgatcgtcttgccccggcccttgcgtttcttcttcggcccagtgggggcggccgggggcgcggccggcggggtcatcactggggtctgctgttcggtcatgtctgttcctccctaaagattggcgattggattgcatttaccattgtaccacaagccgcggggcttggcattacaaagcagtgacaagttcttaaggaaaccttaaatttgccgcggctatctattagacgaaaaaaacgcccaaaagtttccgcagtttccaaaactgtttttgccgcccctacatccgtgatttcgtttccggcgggctgtcttgcggcgcttggacgtaggggcggggcttgtccccgcccgctctctgcacccggccggagcggcgggccgatgtgggcatcggcccctacgggaaaacaaggtgcgggacaccagcacacagcgaatggccccggcctgtaggggcgggtgcccacacccgcccggtggcccctgcaaagaaaggcgcatcacgtaggggcggggcttgtccccgcccgcgggcggccataaaggccgcccctacggatgccgggtgttgtgggcgggcgagccggggcaaaaacagcccccggggggacgcggatgtcctcccgggggctgcgataccttataatataaagagggaaacggccggttctggtcggtttggcagggaacgggcgttgttttacagctttgttacaaatgcgccggaggtgttgaccttttgcgaaagatgctttatcatgcgtacagaggcaaggggagtcatacgcccctaggcttcaaaattcagaaggaggaaatccaaatgagaaacctcaagcggactctcagcctggtaatggccatggccctgattgtgggcatgatggtcgtctccgccagcgctgtgagcagtgatttcaacgactctgctgaaatcaccaacactgaggcggttgatgtgatgaccgccatcggtgtattcgagggcaccgacaagggcgccttcaaccccaccggcatcctgacccgtgagcaggccgccaagatcgtggctgtcatgctgttgggcgaggaggacgccaataagctgagcaccaactccaccaccttcaaggacgtggcggccaaccgctggtctgcgggctacatcggctactgcgtacagcagggcatcctggcagggaccggcaacggcaacttcgaccccgagggcgagctgaccggcctggcctttgcgaagatgatgctggtggccctgggctatgacgcgaaggttgccaactatgtgggcaacgactgggccatcaacgtggccgccgacgcggtgaacgcgggcatcgcccccaagggcatcgtgctggccgacgccatgacccgtgagcaggccgcccagatggcgttccagaccctgaccgccgacatggtgtactacaccaacaagggcaccactgtcaacactcccgacggcactcaggttgttgtgggcgcctccgcccctgtgaaggtcgccaacagcaagaccgacgactaccgcaccgtttccgccgaccgtgacgaggtgcagcagttctgcgagaagtatttctccgatctgtctgtgaacaataatggcagcgatgacttcggccgtccctccgagcagtggaagaacggctccaaggagatcggcacctatgcttccaccgccgatgcctcctacaccgaggaagtcaagtccaagaccatctactccgacctgggcctgggcgagaccaccaaggccgacgtgattgtggacggtaagaccgcctccgacttcaccgtgaagaagggcgacgacaccaagctggaggccagcggcaacggcgttctggtcgaggcttttgtggacagcgatgacaacgtgaccctcgtggttatcaacacctatgtgggtgaggtttccaaggtggtcgacgctgacagcgtgaaaaaggacgaggagccctacatcgagatcgccggcctgaccggcaacggtggtaagtttgagaccaacgcctcctttgatgaggatgatgtggtgctctacaccgtggccgacggcgacatccagaccgtgaccatggcgaagaagatcgaggatcaggaagtcacctccaaaaccggagacaccaagtttgtggccgacggtgaaacctacaagtataacaagaatcaccgcacctacgatatcacgctgaagagcagcgtcgatatttataccgataactacggctacgtggtgtatgtggaggagtatgaggctggctccgccagcgtcgctttcgtgctgaatttcaagacaaataatgaaggttgggacggcgacaccgacaagacctataccgccaagctgctcctgactgatggcactgtcatcgaggctgatacagacgacaagaacccttctgcttttaagaacaaatttgtctcctacaccgtggatgacgatggcatctacactctgaaagcgaaggatgtgacctccgatgcgggtgactccatctacctgaccaagggcacctccaagtttgacatcaacggtaccaacaataagggtggcgagcgctacgccaacagcagcaccatcttcctggtctatgacgaggaagagaaggagtacagcgtctacaccggcattgccaatgtgcccagcatggacggcaaggccaccgtatatgtgaactccaaggacggcaagcccggcagcgtggccaagtatgtctttatctccgccgcctccgatgtggtgtccgactccaacaaggctcagatctatatcctggccggcagccagtccaagctgatcagcgacagcgagaagggcgactactacacctacgacgctgtgatcgacggcaagatcaccacggtcgacgtcgagaaggattatgctgagaagaatatcaagaacgatatcgtggccagcagactgaccatcaacagcaaggacgtggtcaccaagatcaccgaatacgagaatgacaccaagaaggacgactactacatctccggcgtgggcaccaagaagaccaccgatggtaccgtgggcctgacccagaatggctccaccacctactacacctatgcgaaggatgttgttgtcttccgcatcgaggacgatgagttcaatacctccagcatcaactccgtccgcgacagcgatgacgcctttaaggccattgtaaaggacggcgaggttgtggccctgttcatcaccgagaatggtaaggacggcggcaagcctgacatcaagtccgacttcaagtttgattctatctccgcaagccgcgaggagaatggaaccgtaaaggtgactgcctcctgtgcagacattgatgattggaatctgaaggatgccgtgatcgagttcactgtatccaagaacaacggggatgagcagaccttcaccaagaatctttctggagtgaagtcctatgctgatgtgatgaacgcgttgaccgtacctggtctcaccatcagtgcaaacagtaccggcacctatgatgtcagtgtgctgatcaccttcaagggtgataacgctgacaccaacacttacaccgtatctggcagttgctccttcaccatcgcctgaccgcagttgtgaaagcataacgaacccccttccggatttccggaagggggttctcttttaacccaatactaagtaggtatagtgcgcccccttttcgttgagctggccctccgcgctggtgccgccggaagtagagcctccactggcccagccggtcacataccaggacaggctgtcctctccccaggccagggacagcacgctgcccataccggcggtatcattggccgcaccctttgtccccggccgcaggaagagcgaggtcgcctggtaactcccgcccaccaccatgaccgccagcggccggaaggggaagtgcagaaccgtcgccttccctttcccgtaattgccgtctcctgtgtaagttccgaccacctggaggcagtttccccgcgctgcgatcgccgaatcaatttttgcaaaatcctcattaaagtccatgcggaggaagctgtcctccggctcccattggtgcaggcgatagtgttccgtatactttgccatgcatattaccccctttgcagggaaaacaaaccccgcacccggcgtactcccggacgcgggggttttattctgctgaacagcctgtaggggcggcctttatggccgcccgcgggcggggtcaagccccgcccctacagggtagagacgtaccgggcaggcggggagcggcgtcccctttgcggggcgaagggtctgcgcgtacggacgtgtgcgttccgtctttttctgtgaaaaaatccctctggccctacaaggacatactcacggccgaaatggctcatactcaacagggaagcgaataaaaggcgggcagggagagatcccggaacagcaggccatccggcgggcaccaggtaaatacaaaggtggcggcgcccagcgccagcaccagcaccacccagagcaggcgtgtgcggctccagacgggagtgcggaggaaacagggcagcaggaaaaaggcggccatcaccagcacatagagggccacgtcaaaaaagagggaatcaccctccagcaccacatgatagaggtaacccacgcccagcatgaccgcagccgagaggagcagggagaaggcgcgggcgcccaggctctccggctccctgcgcaccagcagaacaccggagagcaggcagggccagtagaggattttcacatgctcccagaggctttcgttgaccggggccagcagggcggtcaggccattgggccagagagcgtagaggaagtgcaggcaggagcccgccagcgtggccaccacaaaggtgatcagcgccgccttggacaaacgggacatagcgataccccctgttttgtgatagtggagtatatgcgcagagcggggcggacataccccgcaggggcagggaatgtctgcacggcacagggtccgggtcctgtgcggctttgtattccgaggccagcagcccggcggcacaggcagcggcgacgggggggcccgcttccatggcgcgggcggccaacaggctcccggaataaagagcttgattcggcttgaaccgctcgccaatttttggttaccttgcactttaccagaatcttcttataaccgaaacaggaaattgccgggacaaaggggaaatctggcggaataaaaggaggaaggccgacggggccggcgctggaaggaaacgacaagccaaaggagcgtttcattgccagaggcggcggcgcgcgttccggccatattaaaaacggcgcgcagcgtgcgccgtttttcacgtttcaattcaaaaaaggggtggtcaaatgaaggaggaatccaaaacgaggccatgggcggccctggcggtggcggtgatgttcgtgctggcgtcattggtatcggcggccccggcccgggccgcggaggagcggacggtgatccccatgggccgcgcggtgggcatcaaactcttttccgacggcgtaatggtggtgggcttttccgaggtggccggcgcggagggcagcagcgccccggcccgggactgtggactgcgggagggcgacatcatcacgcacatcaaccgggaggaggtggacagcatcgaggaggtgcagagtgtcctccaggaggtgggcggaaaacccatgagcatccgggcggtgcgggacgacaagaccgtacagctcaccgctcaggcggtccagtgcggcagcgacggccagtacaagctgggggcgtggatccgcgactccatggcggggatcggcaccctcaccttctgcgagcccgctaccgggcggttcggcgctttgggccacggcatcaacgacgtggacaccgcccagctcatgcccctccagtccggctccatcatgtattcggaggtcaccgatgtgaagaagggggaaaagggagcccccggcgagctccacggcgcgtttcaggtgaaccgggatttgggcgagctgtacgccaatactgccagcggcgtgtttggccgcctggaggacggtacgctgaccgacggcctggagccggtgcccgtagcggagcgcaaggaggtcaagaccggggcggccacgattctctccaacatcgccggcgaccaggtcgaggagtatcaggtggagattatccgggtgtatcccgccaacggcgcggatacccggaacctgatgctcaaggtgaccgacccccgcctgctggaaaccaccggcgggattgtccagggcatgagcggcagccccattctgcaaaacggcaagctggtgggcgcagtgacccatgttctggtaaatgatcccacccagggctacggcattttggcggagaatatgctcctggaggcggaaaatggggagaaccagtcgtaacggtcgtaaaaaggtcgaatgaagtcgaggagaaatacccataaattaccagaaaaacccttgcgtttgctgtctgattatggtaaattataggcaaccggtaaacagccttggccaggcagcaaacatagggcagggaaacctgctggaaagggtgtcaatattggaaaccagaaagaggatcttggtggccgatgccagtgaggagttccgccgtgtctttacgggtgcgctggaggaggaatccggcctggagctggccgcagagacgggggacgggcaggagacagtccgcctggcaaaggagctctccccggacatcgtggtgatggatttcgtgcttgcccgtatggatggactggaggtgctgtccgagctggcggcgctgcccggccggccccgggtgctggtgctctccagctttgcgcggggcaatatggcggagctggccgcggcccatggcgcggactactatatgatgaagccgtgtaaactctccgccgtgatggagcgcatccgccaactggcgggacagccccagagcggcggggaggagcccgggcgcctctctggtgagagccagaacctggagagcaccgtcacctccattatccatgagatcggtgtgcccgcccacatcaagggctaccagtatctgcgggaggccatcatcatcgccgtgggcgacatggatgtgatcaacgcggtgaccaagatcctctacccggaggtggccaagcgtttcggcacaacggcctcccgcgtggagcgcgccatccgccacgccattgaggtggcatgggaccggggtgatctggagaccctgcaaaagtatttcggctatacggtgagcaacgccaagggcaagcccaccaactcggagttcatcgccatgatcgccgacaagctccagttggagcgcaaacagaagtaaaggaaatgatcaaaacaggcgggggattttcccccgcctgttcagcctgtcgaaaaagtattttcgacaggccgagggacttttcgaaccttcaaaaaagttcaaaaagccggtggatcaaacgcgaaagaaacccctgacggttttctttcacacgatcgttccctccgaaatctctgcctgaagggtttatcgacagcctcaacaggcggaggaagctggttgacagggagagagatcggggctacaatcgtctttatgtgtaaaacaggaggcgtattcccgtgaaaatcatctgtcaaatcggcgtcatctttgccgtgtgctggttcagccagctcattgaggcggcgctgccagttccattcccggccagcgtgatcggcatgctgctgctgctggcgctgttggccaccgggctgctcaaaatcgagcatatccgggaaaaggcggattttctgctggccaacatggccttctttttcctgcccgccggggtgagcgtcatcaactacttcgatgtgctgggccgctcggccgtcgcgctggtgttggtctgcctgctctcaacggtgatcaccttcggcgccaccgccctgagcatccggttcaccctgcgcctgctggagaggaggaagtcccgtgtctgagctgtttgcttcccccttttttggcatcgctttgagtatcctggccttctgggttggggtgcgcatccagaaaaagaccggcctggtggtctgtaatcccctgctcattggcatcgtcctggtggtgggggtgctgctgctgttccgcattccctatgagtcctatcatcagggcggagagatcatcaacatgtttctcgcccccgccaccgcctgcctggcggtggccatctacgggaaaatccgtattctgaaggagaactggctgcccattctggttgggtgcgtggtgggctcggcgtcctccatgggcagcatccttctgctctgccgcctgtttgggctggacgcggccatgaccgcgtccctcctgcccaaatccgtcaccacccccattgccatcagcgtatcccaggcccacggcggcatcggccccatcaccgtggtggcggtgctgatcacaggcatcttcggcagcatcgcggccccgctgctcatcaagctgttccgggtgaaggaccccatgaccgccgggctggccatcggcgcctgctctcacgcggtgggcacctccaaggctctggagctgggagagaccgagggggccatgagcgggctggctatcggggtgtgcgggctgatcacagtggtgctctccctgtttctgatgtagcggaatccgtacgcccccgccgacggcggggggcgcagtttgtcgaaaaagtggcaaagccactttttcgagaaagccgcagtctgccgcgcgcagggggtgtccgcctgcggcggccagaccaaacatttgcagcctgagaagtgttttccccgacgcacatgtcgccggggaaaccagattggtacttgattcgcgcctgcgggcgcgaactctgcgaggctttttcgacatactggcgtccccgccgacggcgggggcgtttttgcaatcgtatgtatacaaagccggcatgttgtagtagagtagggggagaaaggagtgctgacccatgctggaggaggaagtgcgccgggcgcggcgggaagagcgggacgtggaggacttgacggtggagggggagtgcctggcgggcgcagacttgtcggggctggagttccgccgggtgcgcctgcaccggtgccggttccagaactgcgacttctcgggggcggtctttgaccgggtggagtggagcggctgcgacttctccaactgccgcttcggcgggacggtctggacggacacggtggtgcgggactgcaagggggacggcggccggttcaccgccagccggtggcggggctgtaccctgggcgagagcgccttccgctgcgccaattttacacagtcgcggtggaaaaagtgccgcatggagaactgccagcttcgccgggccgtgctggccgaggcggatgtggccggactgagcccacaccggacggggttccaggaggtggactttttccgcacgccgctgaagggggtggatttttccgactgcgcgctggagggcatcaccgtatcggagagcctgggagagctgcggggcatgaagatcaacccggcccaggcggttgatctgatccccctgctggggatacagcttttgtgagggagggagcgcccgatgggcggactgtttgactatctggactggcggggggagctgagcctggcccagtcccccttcaacccggtggataatctgctcctgagcaccctatcctacgcgccgctggaccatctggtggaccgggagggcaccgccctctgggctgcggcggagcggtgggaggcggcgggcggcgtctggccgccgcggccggagcggggccggggggagtttcgggaggaggtgctccgcctcttcggggccctggcccgggcgccccggttctccggcctgatgctgctggactgggtgagccacctggacgcagggacggaggagcagttcgccgccctcaccatcgacaccggagacggggcccggtttgtctcctaccgggggacggacagcaccctggtggggtggaaagaggacttcaacatgagctaccagacgccggtgcccgcccagaggtcggcggcggagtacctgtccgacgccctgcggcggtggggcggccccctgcgtctgggcgggcactccaaaggcgggaatctggcggtctacgcggcggcggcctgccggacgcccgaccgcctgctggcggtctacaacaacgacggccccggcttctgcgccggggccgtggatgaggcgggctatgaggcggtgcgggggcggatacacacctttgtaccccagtcctcggtggtggggatgcttctggaccacgaggaggactacaccgtggtgcgcagcgatcagtccggcctgttccagcacagccccttttcctggcagatattggggccggactttgtggaggtggagcgggtcaccgacgccagccgctttgtcagccgtaccctcaaggagtgggtggcctccctgactccggagcggcgggagcagtttgtggacctcctgttcgaggtgctgggggcctcgggggcccagactacggcggagctgtccgagggcgggctccaggccgcggcggctggcctgcgccgcctccgggcgctggacggcgccgaccgcctcatgctgttccaggccctggcccgtctggccgaggcggcgcggaacagcatgggcctgctccggggcgaggagacataagggaacatggagggcgatattaaccgccctccccagagactgtcgataaaacctcttgtcgaaggattcggagggaaggatagtgtgaaaggctgccccgcagggcgattcggagcacaaccgccgcttgcggcggcgcttggtgcggagatgaaccgtcagggttccctgaaggtgaattggccacaggccaagagagaccggcctgggccgttcgcgttggatcaagtaactttttgaacctgttttgcaggttcaaaaagtttagcagcctgtcgaaaagtctttttcgacaggctgcgtggagggcggtatcaaccgccctccacgtttttgtaccttaacctctgcgccggcggctgccggtgtagcggccccggccgctgtaggcgtagccccggcggcccgtccggccccggccgcggaagagcaccacccgcagcaggagggcggcgattactaccaggatgaccaccagaaggatgcgcaccagcaggttgtcaaagaacttctgaatccggtccagccggtagagccaggggtcccgctccaccgagcaggtggccaccagatccagggtgccgtaggacttgccgttgaaataggccgtgatggtgcccagcacctgcccctgctccaccggggcctccacgctccgggtttccagggtgtagtcatacgtaaagttctcggcggacacgtcgttgggcagcagggcggtcagcttcccgtcgggcatgagggtgacggaggcggcgtccttgcccagggtgacctccacctccgggatgtcccgcttggtgttgtccagaatggtctgggtggagaagttggcaaaaccccatttaaacaggcggatggtctcgtcaaagtagatatagccctcgctgccggaggtgcccggctcccgctcacagcccatgaccacggagatcaggttccggttctcccgggtggcggaggcggccaggcagtagcccgcctcaggggtggagccggtcttgatgccggttgcgtactcgtagatgtagcccgccacgcggaagttggagatcagggcgttggtggagcggatgatgcgcggctcggggtgcaggttggtggcgggcatggtgtagttcttggagcccacgatggtgcggaaggtctcgtgcttcatggcctcccggcacatgaggtagatgtcgtaggcgctggtgtagtggtcgtcgtcgtggtagccgtgggtgttggagaagtgggtgtcctccatgcccagctcggcggcccgggtgttcatgagctccacgaaggaggccacatcgccgcttaccgcctcagccatgacgttgcacgcctcgttggccgaggggatcagggcggcgtagagcaggtcgatgatgcggatctgttccccctctttgatatcggccgtggaagcgccctccccgatgccggtgtgaagggcggagctggcggtgacggtctgctccagggacagctctccccggtccaccgcctccagggtgagcaggcaggtcatcaccttggtgatggaggcggggtagttgtgcgcgtgggcgttcttctcgtagagaatctcgccggtgtcggggtccaccagaacggcggccttggcgttgacgtccatctcgtccagaatggcgctgccgctgtccgcagcggaggcaaaggtggtcagcagccccgagagcagggcgaggcagagtaaaacggaaagcagtcgtgattttttcataggaaactccatttgactatgttataataacggtatggctattataacaaaccccggaccgggacgcaacggggagggggatacaaaaagatgaagatttccagactggaatttgtggccctgctgctggcggcggtctttgcggccttcgcggcgggctggttttttcgggggcaggccgcgccccagcccgtgcgggtggagaccgagcgtaccctgacccaggagacgcccctggcgctgcccgcgcctacgccctccccctccgcccagagcaaggaggatacccttgccggcggggcgaagatcaacctcaacaccgccggggtggacgagctgatgaccctgccgggcatcggggagaagcgggcggaggacatcattgcctaccgccgggccaacggccccttccgcatcccggaggagctgaccgaggtgccgggcatcggcgagggcattctggagggcctcattgactacgtgacgactggggaggagaaccgatgaaaatactggtggtagacgacgagaaggtgctggtcaagggcatcaagttcaacctggagagcgagggctaccaggtggaggcgggctatgacggggaggaggcggtggagctggcccggaacggcgccttcgatctcattatcctggatctgatgatgcccaagatcgacgggctccaggcctgtatgcgcatccgggagttctccaacgtgcccatcatcatgctcaccgcccgcagcgaggacaccgacaagatcatcggcttcgagtgcggggcggacgactacatcaccaagcccttcaacattctggagctgaaggcccgggtgcgggccctgctgcgccgggcgggcatggcggcccagaagcaggggggcggcggccggctgtccatgggccacatcaccctggatgtggacgcccgggccgcctggaaggacggcaagagcgtggatctcaccgccaaggagttcgacctgatggagctgctgctgcgcaacccgggccgggtgtactcccgggagaacctgctcaacgtggtgtggggctatgagtacgccggagattaccgcacggtggacgtgcacgtgcgccgcctgcgggagaagctggagctggaccccgccaacccggagtatatcctcaccaagtggggcgtgggctactatctgaagcatggataaggggagcggcgcggtcaggcgcgtgcccttctggcgctccctccagaccaagttcgccctgacctatattgtgattgtggcggcggtgctgattctgctcaacacctaccccctggtggtgtcggaaaagctggcctaccagtccaagcaggcctccatgctcaaccaggcctcggtgctggcctccgccctggccaccgggccggaggccctcacggccgagggtgccacccggacggtggagctgctgcggggcagcctgggagtgacccgggtggtggtcaccgacccaaacggcctggtgctctgcgatttccaggacggcgtggggcggaccgacaccgccgggcggtacgccctgttctgggagctggtcaccgccctgcggggcaacaacgtgttccgctctgagtacggcgacggggccttccgaagctgggcggcggtgcccattacctaccgctccatgacccagggggcggtctacctctacgagtacgacgccgagcagggcgcgctgctccaggggatccagaccaacctgcgctttatctccatcgtcatctgtatggtgtcgctggtgatgggggtggtcttctccaaggccctcacccggcgtatcgcccagctcctgcggggcatccacacggtacgggagggcgagtacagccaccgggtgagcgtccggggcggcgacgagctcagccgcctggccgacgagttcaacgagctcaccggccgcctccagaccaccgaggaggtgcgccggcgcttcgtctccgatgcctcccatgagctcaaaaccccactggcctccatccgcctgctcaccgactccctgctccaggccgaccacatggacggcgagacggcacgggagttcctcaacgacatcggggacgaggctgatcggctcacccgcatcaccgagaagctgcttaccctcacacggctcgacaccgccccggcggcggaggacgtccccgtggatgtgggggcggtggtggaacgggtagagcacatgctctcccccctggcccgggcggtagaggtgagcctggagctgaagctccagccgggctgcgtggtgctggccaccgaggacgacctctaccagattgccttcaatctgatggagaacgcggtgaagtacaacctgcccggcggccgggtgctcgtcaccctcactgccgacggcgggcgggtggtcctccgggtggaggataccggcgtgggcatcccggaggcggatctgcccaagatcttcgaccgcttttaccgggtggacaaggcccgctcccgggccgccggcggcaccggcctgggcctgtccatcgtgcgggacacggtgctccagcacggcggagccgtcactgcccggcggcgggagccggagggcacctgcttcgaggtcagctttgcccagtggaacggagaggaggtgggccgatgagacgacgcatcgcggcgctgggctgtctgctggctctggccgccgggggctgcgccccccgcccggaggagccggagggcggctactgcgtgtactactccgccctgtccgaccgctttgcccccctgccgctggactgtgagccctttgaggggagcgccggcgaccccatccctgccctggtggacgccctgctgtccccgccggagacccagggcctcgccacccccttccccgagggggtgcgcctgttgagctgggaactggaggagggccgcctccacctggacctctccgagcagtacggcggcctgtccggggtggatctcaccgtggccgacgcctgcctgacccttacgctgtgccaggtggagggggtggagtcggtctatgtgacggtggaggggagggagatcccttaccgccgcgtccagcagctcggtcccgacggactgctgctcaccgacggcaccgatgtgccgccggaggagccggagcccagtcccaccccgcccgcctcttgacaagggccgggcgggggtgtagcataacactcaacctgaaacaggaaaggaagatcctgcccatgagtcagcagcgcatcggcacccagtgcctccacgccgggtatacccccgggaatggtgagccccgcaacatccccatcgtccagtccaccaccttccgctacgccaccggcgagcagatgggagccctcttcgacctggaggagagcggctacttctacacccgcctccagaaccccacgaatgaccacgtggcggccaagatctgcgccctggaggggggaaccgcggccatgctgacctcctccggtcaggcggcttccttttacgccatctttaacattgtctcctgcggggaacatgtggtgtgctcctcctccatctacggcggtacctataacctcttcgccgtcacgatgaagcgcatgggcatcgacttcaccttcgtcgcccccgactgcaccgaggccgagctggaggccgccttccggccggagacccgggccgtctttggcgagaccatcgccaaccccgccctcaccgtgctggactttgagaagttcgccagggcggcccacgcccacggcgtgcccctcatcgtggacaacaccttcgccaccccggtgaactgccaccccttcgagtggggggccgacattgtcacccattccactaccaagtacatggacggccacgccaacgcggtgggcggcgccatcgtggactccggccggttcgactggacagcccacgccgacaagttccccggcctcaccaccccggacgagagctaccacggcgtgacctataccgagcgcttcggactggagggagcctacatcaccaaggccaccgcccagctcatgcgggacttcggcgccatccccgcccccatgaacgcctacctgctcaacgtggggctggagaccctgcccctgcgcatggccaggcactgtgaaaacgccctggccgtggcccggttcctgaagggtcaccccaaggtgagctgggtgcgctaccccggattggagggcgacccctactacgagcgggcccggaagtacctgccgaacggcacctgcggcgtggtgtccttcggcgtgaagggcggccgggaagcggcctcccggcttatggcaggcctggagctggcctccattgccacccatgtggccgacgccaagacctgcgtgcttcaccccgccagtaccacccaccgccagatgagcgacgccgagctggccgccgccggggtggcccccgacctggtgcgcttctccgtgggcatcgaggatgtgaacgatatcctggccgacctggaaaaggccctggagggagcgtaaacaggaaaaaataaaatgcgctcccaaaacgggagcgcattttttagaagagaggagcgactgctatggaatggagacggctgacacagccggaggaaccggcgtttggaagggcgatggccctctacgaggccagctttccccgccacgagcagcggctgcccgatgagcagcgggccgtcctgtcccacccggagtaccatttcacccagctttttgatggggcggaattcgtggggctgctgctctactgggaggcggaggacttccgctatgtggagcacttctgcatccggccggagctgcggggccgccgctatggcgccaaggcgctggaggagctgggccgggacgggaaacccgtggtactggagatcgacccgccggtggacgagatcgcacggcggcggcagggcttctatcagcggtgcggcttcgccgtcaacccctatccccacgtccatcccccctaccggccggagtacccgggccatgagctggtggtgctctccagcccccgggcgctgaccccggcggagtacggggcgttcgcgtgttacctgagcgcggtggtgatggcctgaggggcgggctctggcggggcgcgccggagggagcggctgaagcgcaggctgacgaggagaacggccccctcggcggcggggaaggccagccatacgccggtgaggcccagcagggcggccagcagcagggcggcggccacgatggccacaaagccccggagcagggagagccggagggagcggccggggtgctccgccgcccccaggaaggaggcggtgaccaggttcagcccggcaaaggggaagcccagaaagtagagccgcaggccctgctccgccatctgctggagcgccggatctccgtcccggttgaagagggacaccagcggcccggcggcgaagaaggccagcgcggccatgcacatccccgcgcacagggccagccccagggccatgcggcacagggtgcgcaccccggcggcatccccccggccgtgggccaggctgaccaggggctggacgccctgattaatgccggtgaagagggcgagggccatcagcgccaggttggccacgatgccataggccgccacccccagcgtcccagccaggcggagggtcagcaggttgaagaccaccagaaccaggccggaggagcactcgttgagaaaggcggcgctgcccagcccggccagatccgccagcggccggagggcggggcggaaggggcgcaggcggaagcggctgccgcgggtgaggatgtgcagggaggacacgcacaggcccactaccggggcgatgccggtggccagggccgcgccgaagatgcccatatccatggggtagaggaacacatagtccagcacaatgttggacaggctgcccagcagcatggcggccatggccagcttgggattgccgtcgttgcgcacgaaggcggtgagaatgtggttgagcaggaagcagggggcaaagaggagcaccgtgcgcaggtagaccgagcacatgggcaggatggttccctccgcccccagcaggcgggccagcggtacggcccacagcagaccggccagcgccagcagtccgcccagcgccccgccgcaggccagagcgcgggagaaggcgcggtcggcccgcactccgtccccctgggtgcggcagatggcgtaccgggtggccccgccgatgcccagcatcagccccagtccgttgatgaggccgaagaccgagatggccaggttgagggccgccagcccgtcggtgcccagccggtgggccacaaacagggtgtcggccaggatgtagccggacaggcccagcgcgcccagcacattcaggcttacatactgaaaaaagctccgcttcacttcgatccctcctaaaaacgtcctagagcggcaaaaaacgtgcctgggccgattccttctaagacctacggaatcggttcaggcacgtttcacatttatccggtgataaacgggaagccacagggcattcatctgtcgggtattaagataacagaaagaccgccccctgtcaaccccccggctgtaccagctttttttaccatttgttattgctctgtaacttgtccgggaaaaccaggggagctataatacaaataggaatcgaatgttgaagggagtgtgtaccatgaagcggatactggcgctgggtctctgtctggccctgctgtgccccgccgcccgggcggcagagggggcgaaggggtggagccggagcgagccgggcggagattatgtgaccctccgggtgccctgcccccagggggaggccctggactggtcggagcagaccctcctcgcggtgcggtacgccgacacgggggagccagtacccctcaccagcgactaccagcagggctggctcttcgccaccgtcccggcggcggaggcggagcggcccctggaggtctttcagggggaggcgcaccgctttcccgactgcatcacggtctggaaggggcacgagtactacaacgaccccggcggcgcaaaggagctgtatctccggggagtgctccagggggatcacgcgggcaatctgaaccccgacgccgccctgacgcgggcggaggccttcgccctgatctgccgcctgctgtccctggagcccggcggcgaccccggctacgccgacgcggagcccggcgactggtattatgataccgcctccgccgcccgggccggcggactggcggcggaggacgcctatttccaccccgaccggctggtgacccggggagagctcaccgtcatggctgcccgggccatggaggcggtgggctggctgaccataccggaggggggaacggcggcggagctgactctggtcgatgccggggagattccggactgggctttagcgtcctatctggcctttgataaacagggcctgggcatcttcacccagcggtccaccggagagaccgacccggtctacggggagcccggagtggaggagctggcagagtgggacaggcccgctacccggggcgaggcgatcaccttcctggatgacgcccgtacccgcctgccctggtaccccacccagacggccatcgactggggctttgacgagaccatgcccgtcgtcgacggctccacctccacctacccctataccagggcggtgtacggggcgctcttctggaattatgacaaccatccgcagttcccggagagccactccaagagccatgagtcctacgagcggctcatcaacggggaggtggacgccctcttcgccgccaccctgccctcggaggagctgaaggcccaggcggaggcggcgggggtggaactggagtacattcccatcgcctatgacgccatggtgttcttcaccaacgcggagaactctgtcaccgggctgacccaaaagcaaatacaggacatatatgtgtacgggaaatatacgaattggaatcagataggcggcccggacgcggagctgctaccctaccgccgcaacaccgacagcggctcccacgccttaatggagcagtatttcctggagggcggaaagctctccctcagccccgacgtgcacaatgtcctcacctcctacgccatgtcctccgccctcaccgatgtggccggggccatgaccaccgaccccctggcttacgccatgggctatagtgtgtactattattatgtaaatagctattggctcctgggcgacgcgggcggaggggagctcaagctgctggcggtggatggggtgctcccctcggatgagaccatcgccgacggaagctaccccctggcggggtacaactacctggtgctccgggccggcgagccggaggacgcccccgcccggcggctggcggagttcatggtgagcgaggcgggccagaactgcgtgggcagcgcgggcttcggccccctgtcctcgggcccccaggcggacttccagcgggagcagccgaaccggagcgtggacgccgtctttcccgctgggcctggctatgtggttctttcctgggatgaggcccacaccaccctccgggccagcggtctggagcggagcgggacggacggccgctggcatgagctgaccgccaacgagtgccccgcgccggagccgggcaaactctccgccgcccggctgggctccgggggcggcaccgtgatcttcggcgcggtgggcggcgagcggggggacagcctcaccgtccgcctcacctacggaggcgggcagagcctgacccagcgggtctatcccggccagaccttccacttcctgctggagggcagccccgcgctggagaagctggagctgctccagggcggacaggtgctggacggctgtaccgggctttcgtagtgatttgtgaagccgcggcggaaggggcaaacaccgtgcgggccggtcaaaagaccggcccgcacattgttattgctccgccaactgttccagcagcacctgacgcaccaccgccggggccgcctggcccctgagctggcgcatgacctgccccaccaggaagccgaaggccttctccttgccggagcggtagtcggccaccgatttttcattggcggagagcacttgctccaccacctgggccaccaggcccgcgtcggacacctgggccagaccgtgggcggccacatacgcgtccacgtcgccgtcggtctcgaagaccgcctcgcacactttgacggcggtgttgcggttgagctgccccttcttcaccaactggatcagccgggccagggtggggggcgtcagggccatgtccctggcctccaggccgtgggcggagagctgggccagtaccggccccatgagccagttggccgcctgcttgggctccgcccccagggccaccgtctcctcgaaaaagcgggccagggccttctgggaggtgagcatctccgcgtcgtaggggcccaggccccaggcggcctgatagcgggcccgcttggccgtagccagctccggctggctggcccgcagcgcctggatgtaggcctcgctcagctccaggggcggaagatccggctcggggaagtagcggtagtcctgggcgtcctccttggagcgcatgggataggaggcgtccttgttctcgtcccagcgccgggtctcctgcaccacccggccgcccgcctccagccgttcgatctgccgccgggcctcatagtagatggcccggcggatggccttgaaggagctgaggtttttcagctcggtgcgggtgcccagcgtgtccgagcccgccgggcgcaccgacaggttcacgtcgcaccggagggagccctcctgcatcttgcagtcggagacgcccaggtattgcagggtctcccgcagccactccaggtaggcgaccacctcctccgccgtgcggaagtcgggctcggtgacaatctcgatgagaggcacgccgcagcggttgtagtcgattttggtctgctccgtccaggggtcgtggatcagcttgcccgcgtcctcctccatgtgcagctcgtgaatgcccacggtgcggccccccacctccaccgtcccgtcccggccgatgggcagatagagctgggagatctggtaggccttgggcagatcggggtagaagtagtttttccggtcgaaccggctgtaccgggtgacggtgcagcccagggccagggcggcccggacggcgtactccaccaccttcccgttgagcacgggcagcgcccccggcatgccggtgcacaccgggcagcagtgggtgttgggcgcgccgccgaacgcggtggtgcaggcgcagaagattttgcttttggtggccagctccacatgagtctccaggccgattacggtttcccagttcacagcgcgtcacctcctttggcggctgcaggcgtgtccggatggcggcggtgccagtcggtctcctgctggtaggcgtgggcggcgtccagcaccgccagatcccccagggccgggccgatgagctgggcgccgatgggcaggccgccccggtcgaagccgcagggcatggacagggcgggcaggcccgccaggttggcggggacggtgtagatatcgctcaggtaaaggctcagcgggtcggccaggccctcccccagccggggggcggtggtgggggccaccggggtgaggagcagatcgtacctctggaagaccgcgtcaaaggcggccttcagcctggccctggcctggagggcctttttgtaataggagtcgtagcagtccgcggagaggacgaaggtgcccagaagaatccgcttcttcacctccgggccgaagccctcggtgcgggttctgcggtacagctcctccagactgccgcagccctccgcccgccagccgaatttcaccccgtcgaaccgggccaggttggaggaggcctcggcgcaggccaggatgtagtaggcgggcaccgcgtagtccagcaggggcagggagcactcctccaccaccgccccccgcgcccggagcaccccggcggcggcccggacggcggcggccacctccggctccagcgcgccgccgaagcactcggcgggcaggccgatgcgcctgccccgcacgtcgccggtgagggcgcagagcagtcccccggtggggagctccagactggtggcgtcccggggatcccgcccacggaggagctccagcaccgccgcgcagtcggcggcggagcgggcgatggggccgagctgatccagggaggaggcgtaggcgaccaagccgtaccgggacacggagccgtaggtgggcttcatgccggtgacgccgcagtgggcggcgggctggcggatggagcctccggtgtccgagccgatggcgtaccacacctccccgaccgctaccgcggcggccgccccgccggaggagccgccgggggagcgggtgagatcccaggggtttttcgccgggccgtaataggaggtctcacaggtggagcccatggcgaactcgtccaggttcagcttgcccatggacaccgccccggcggcggtcaggcgctccacggcggtggcgtcgtagcagggggtgaagtcccccagaattttggaggcgcaggtggtgcgcattcccctggtgcagaggttgtccttgtaggccatgggcaccccggccaggggggaggcggacagtgtgggtgcgggggcgggcgaatccgccacggtgataaaggcgttgttgcccggctggcaggcggcaatccgcccggcggcggcggcaatggcctcggcctgggtgacggctccggcccggagctgcccggccagctccagggcagtcagttcatacagctccatattccacctcactccacggccttggggacgagaaagctctccccgtcggcggccggggccccggccagcagggacgcccggtcggcggagggggcggtttcatcggggcgcaggacgtttttcagcgggaaaacgtggctcagcggctccgcgccggcggtgtccaggccgtccagcaccgccatgtagtccagaatccgctccagctcccgggcgatctcctccttctccccgccggggagggagaggcgggccagatcggacagatggtcgatccgcgcttcggtaatattcatgggaagggttcctccttttcttcgctgtctggggggcgaaccgcgcccgcccccgctccttatggctcaagcctggtccggtcccggggaaacaggctggcccggcggatgttgtccaggccgcagagctgcatggtcagccgctccaggccgatgcccaggccgccgtggggcggcgcgccgtgcttgtggaacagcaggtagcccgaaaaatcctccggctccatgccccgcgcctttaacttttccacctgctggccgtaattgtggatacgctggccgccggtggtgatctccatcccccggaagagcagatcgaaggagagggtgtaccgggggtcttccggatcgtccatggtgtagaagggacgcttcctgccggggtagtgggtgacgaacacgaagtcgctgccccacacctccttggcgtaccggccgatgtgctgctcctcctccggctccagatcgtagggctcccggatggcatagccgtaggcctccgccgccaggcgcttggcctcgtcaaagcggacggcgggtatgtgctccgcatcgggcagctccgcacccagcagggccagctctccggcgtattcctgccggagcagggccacaaggcggcgcagaaagccctgctccagcgccatcaggtcggtaaaggagtggagaaagcccatctccagatccagggaggtatattcgttcaggtgccgctgggtggcgtgcttctccgcccggaacaccgggccgatctcatacacccgctcaaacacccccaccatggcctgcttgtagagctggggggactgggccagcacagctttccggccgaaatagtccagccggaactggctggagcctccctcggccccggcccggcccagcttgggggtgtggatctcggtaaagccctccccctggagaaactcccggaaggcccggcagacggccgcctggatgcggaacaccgcccgggcgcggggggcgcggagggtcaccgggcggagggagagttccgtgtccaggctgaggggactctttttggacaggggcaccggcgggggcgcggcgggccgggagagcaccgtgcaccgggcctccgccagctccgccccgccgggcgcccggggttcgggccggagtaagccggagacagagacggcgcactcctcacgcaccccctcaggacgccggggacagacgcactggatcagcccctcccgggtgcgcagggtgaggaaggtgaccccgcccagatcccgcagggcgtgcaccatcccgtgcagggtgacggcccggttattccggcccaccaccgccgcgtcaaatttcgttgccagaacttccatgccaatcacacctttctgcaaaaaagaataaaaaaatcccgaagccggttttccagcttcgggacggaacaaactccgcggtaccacccaaaattgcgccgtcgtgtgcaacggacgccactcggaacccttaacgcgggtgggacgggcgcgcctaccccctgaggccagggctcgggacgccggctcaaacgtgttgcgccatcccatcctgccggaccgggctctcagtcggtgacccggattctctgtcggccctcacggggggcggtcgttctctctgcctttgttgagcgtagtatacgcagtttgaaggcaaaagtcaagcacaaaatttttttgcaccgggggcgcgggtgtggtacaatgtcgaaaaccacacactgaggtgagagactatgaaggattgggacgccctctatgaggagtgcatccactgtcagaagtgcggcctggcggagacccggaccaacgtggtgttcggcgagggagccagggacgcggaggtcatgttcatcggggagggccccggcgagcaggaggaccgcaccggccggccctttgtgggccgggcgggccagctgctggacgatatgctggccatgatcgacctgaagcgggagaaggtgttcatcggcaacatggtcaagtgccgcccgccccagaaccgggaccccctgaacatcgaacaggaggcctgcatcggttacctgcgcaaccaggtggccctgctcaagccgaagatcatcgtctgcctggggcgcatcgccgccatgaagctcatcaaggaggacttcaaaatcacccgtgagcatggccagtggatcgaaaaggccggggtgtggatgatggccatgtaccacccctccgccctgctgcgggatccccgcaagcggccggagagctttgaggatctgaagagcctccaggccaaaatccgggaggtctgtgtgcgcacatactgaaacaaaagtgaggcggaattccgcctcacttttgttttgtggtcacccgcttgatgaccttcaaacgggcaaactcctcccgctccttctcctccagggcgtcggtgatgaagcggatggtgccgtccaggccggggatgacaatgttctgtaaagcgttggcccgcttctgggtctttttgatggcgtcggccaggcggtagatagaggtctccacctccgccagccggcgggtcagctccttgaccctgtagaacttgaggtagcactcatccagctcggaacaggtatcccccatgccgtactccggccggggcgggggggactggccggggatgcggggcagctccacccccataacggagcggtagcgcagggtcagggagtcgtccacatccaccgcctccgcgatgcggtcgcagatgcccaggcggatgttggccgcctggagggcggtgtacgcctcggtaaagacggcgtcgatctgtccctgcaactccttggcggtgtccatcatgcccatgagttcccggatgaggatgttgcgcttgcggtccatcagctcgtagcccgtccgggccagcatccgggagcgcttggcggcgatcaggttgcccttggtgggcagcaggttggccatggcggttgacctcctttccggctatgactgcttccgctcaaagagctccttccacgccccctccacatagtgagcctcgatggtcttggcgtccacccggtccagctcgcccctgggcagcatggtcagcagcttccaccccaggtccagcgtctccgcaatggtgcggttgtccaccaggctctggtggacaaacctgcgctcgaaggcgtcgccgaaggccagatactgcttgtccagctcgctcagctcgtcctcgccgatgacgctggccaggctgcgggcgtcctgaactttggagtaggaggcaaagagctggttggacacgtcgtagtggtcctcccgggtgaagcccttgcccacgccgtccttcatcaggcgggacagggaggggagaatggcgatggggggatagatgcccttctgatccagctcccggtccagcacgatctgtccctcggtgatgtagccggtgagatcggggatggggtgggtgatgtcgtcgttgggcatggtgagcaccggcacctgagtcaccgagccggtgcggccgtggatcatgcccgcccgctcgtagagggaggccagatccgagtagaggtaggcggggaagcccttgcgggaggggatctcccccttggaggaggagaactcgcgcagggcctcgcagtaggaggtcatgtcggtgagcaccaccagcacgtggtagccgtgctcaaaggccaggaactccgccgccgtcagggcgcagcggggggtgaggatgcgctcgatgatggggtcggaggccaggttgaggaacatgaccacccggctcagggcgccggcctcctcgaaggagcggcggaagaactcggcggtgtcgttcttcacgcccatggcggcgaagacgatggcgaattccccgtcctggttgggcaccttggcctgccgcacgatctgggcggccagctcgttgtgcttcatgccggagccggagaagatgggcagcttctgcccccggatgagggtggcgcagccgtcgatggcggatatgccggtgtagatgcagcttcgagggtacttgcgggagacggggttgatggcggagccgttgatgttgcgccgctcctccgggtagatctcgcccagggcgtcgatggggcggcccgcgccgtcgaacacccggcccagcatctccttggacagggcgatgtccatgctcttgccggtgaagtgggtggaggcgttctccagagagatgccccgggtgccctcaaatacctggagaaccacccggtcgccgtcaatgaggatgacgcggccatagcggcgctccccgttctccagagtgacctccgccatctcgtcgtaggccacgtccttgaccccctccagggcaatgagggagccggacagctccgaaaggccgatgtattccagtctcatgtcagtgtttcacctctatctccaacctcagcggttggcctcgttgacctgccgcagggcgtcctcaatggcggcgtcatactccgcgaacttctcctggccgtcgttgggcacctcgtacttcatcttggccagggcctcgaagatgccggtctccttgagctgggacagggggatggcccgggagacgatgtccttggccccgtggtagagcttgagcatcagctccatcatgcgcagctgcttgtccaggggcacataggtgtcgatggcgtggtaggcgttctgctggagaaagcccacccggaagagcttggcggtctcgatgatgagcttctgatcctcgggcaggatgtccgcgccgatgagctttacgatctccatcagctccgactccttttggagcaggtgggccatctggtggcggcaggtgacgaactccggccccacgtgctcgtcgtaccagggcctgagatcgtcggcgtactccgagtaggaggtcagccagttgatggaggggaagtggcgggcataggccagggcgcggtccaggccccagaaggtgcgcacatagcgcttggtattctgggtgaccggctcggagaagtcgccgccctggggggagacggcgccgatcacagtgacgctcccctccttcccctccagagtcttcacatagcccgcccgctcgtagaactcggccaggcgggaggccaggtaggcgggaaagccctcctcggcgggcatctcctccagccggccggagatctcccgcagggcctccgcccagcgggaggtggagtcggccatgagggccacgtggtagcccatatcccggtagtactcggcgatggtcatgccggtgtagaccgacgcctcgcgggcggccaccggcatgttggaggtgttggcgatgaggatggtgcggttcatcaggggctgctggctcttgggatccagcagctcggagaactcctccagagcctgggtcatctcattgccgcgctcgccgcagcccaggtagacgatgatgtccgcgtccgaccacttggccagctggtgctgggtcatggtcttgcccgcgccgaaggggccggggatggcggcggcgcccccctttccgatggggaaaagggtgtcgatgatccgctgcccggtgaccagaggccggtcgatgggcagccgctgggcgatggggcggggggtgcggatgggccaccgctgggccagggccagggggtggatctgcccgtggtcgtcggtgagctccaccagagtgtcgctgacccggtaggccccggcgggcgccaccttggtgacccggccggacaccccggcaggcaccaggcagcggtggacgatgaggggggtctccgggcaggaggcatagagtgcgccgggggcgagaacgtcgcctgcctttacatggagggtgacatcccacgtcttctcctggtccagggaggggatgttcagcccacggccgatgaaggggccgctctccgcctcaatgaccttgagggggcgggcaatgccgtcgaagatgttggtcagcatgccggggcccagggtgatggccatgggggccccctggctcaccaccggctggccgggcttgaggccggccgtgtcctcgtagacctggacggtggtggccgagcggtccacactgaccacctcgccgatcaggccctcctcgcccacgctgaccatatccatcatggccaggcccttgccgccggtcaccttgacgaccgggccgttgatgccgtggatggtatagtgcgtttgattcattggaagtaccatcctttcttattcgtcggagagcgacaggccgaagagctcggcaaagtggccagacaactcgccggctgcgctgtcaaaggaggagtccacccgcaggcccagatcgggggactcagcgatcaggccgcccaggcggaagtccccctcccggaaggtcaggcggatctggggcgcggaggcggccagggcctcccgaaagctcagatcgtcgccccgcagggtgaccagcacctcctccgcgccggagagctgctccagcgcctcggccagcagggcagtgagccgctggccataggcgggagtgcgggtgaaggcggcgattttggcccgcaccagggcgaagacctcctgggccatctcggtgcggcgcaggtagagggcccgcttgttctccagcatatggcgggacacgccccgcccggcctccgactggatgcgggccacctcgccgtggatgtactcgtaggcctccttcagcgccgcgtcctccgcctcctgaaggcggagctcccggcggcgcttgacctccgcgagggcgcgcttgctctcgtcggcggcttccgccaggattttggcggtgaagcggtccagcttttgattcatatcaggcatagttaacctcctcacggagctggtcagagcttgactccaatggcctcccggatgtagcgggtgatggagtcgggggcgcggccggcgctgtgccggtcggggatctccaccaccaggggccgctgggcggtgagcttcagcggggcgatgagatcctggcacagggcggccagcttttcggtgatgagcagcacggcgatgtcgggatcggcggcggcggtctggatggcggcgcgcaccaggggctcctcccgcaccacgaccccttcgatgccagccaggcgcagccccacctgggtatccgtgctgtcggtgatgacgaagtatttcataagttgcctctcagcgtttcgcccgccccgcgggcgaaatcaaatcaaaatccgtgcggagcaggacacaccccagggggccttctcttgcccctcggggcaatttaccttgtgcgcctgcgcagcacaccgatacctctggacggattacacgaagagcagcagcagcgccacgatcaggccgtacagcgccacaccctcggccaggccaacgaagatgagggccttaccgaaggccttgtcgttctcggagatggcgcccagggcggcagacgcggaggaggccacggcgatgccgccgccgatgccgctcaggcccacggccagggcagcgcctacgtacttgaggccctcggcgataccgccagccgccgcggcggcctcaggcgtgccgacggcggaggcgctgccgccgatgcccaccacgctggccagtaccaggaaggcgaagaaggaggcgatgttggcgccaagggcccgcttggccctgcgtccggtgtacttgcggatgccgatgaggaacaggggggagaaaaccgcgaaggcggcaaagaacaggacaatgaatttcagcatggtgactacctcctcaggattacccgtttgtgcgggcagcatagtcgatttttttcgggacaaaggggatgccgccgtcgtcgtagaagcggccgaagagctcgtagaactccagacggagcacctggatgcccaccagaaggccctcgaagcccatgacgaaggcgttgcccagcaccaggatcaggatgcccgccgggccgcccaccccgccggccaggccggccagcatgtggaccaccagcatcaggcccacgtgggtgatggcataggcgcccacgcgcatgaaggacagggtgttggtcaggtagctgagcagggtctcgaacagctcgaagaagccggtgcccagcacctcgcccactgaaaattccctccagtgggggtccttggccagcagatgggacagcggctcccgcaggagcatgagcaccagggggaggatcagcacgggcagcacataggcgggggtgaacaggttcacgccgaaggccagggtggacacggccgcggtgagcagtccggcgtaaaacacgatgcccgccgcgccgttgggcccgaagaggattttttcatagtttttctggcggatgccgttgaggatgttgatgaccatcaccagcagcagcataaacacgcccagacagatggacaggaccagcagcagcaggacattgctcaccacgcccaggcccgcaaaggtagtctcctccatgattttaaaaccggggagaatgtcctcaaagccgaacactgacccgtagacgcagccgaacagcgcgccggacaggccgcagcaggtgatgatgccgcccagccacatgcccttccacctggccagtacaaggccaatgagggccagacagagcccctgccccaggtcgccgaacatgatgccgaagaacaggcagtaggtcagggccatgaacagggaggggtccttctcgttgtaggcgggcaggccatacatctccaggaagggctggaacacccggcccaggaagcaggttttcagcttggtggggggcttggcgtggcgcacgtcatcggcggtatcggctacgcaggacaggttggggaaccgggcgagcgtttcctcgatttccggcaccgccgccgccggcacccagccggtgaggtaaaaggtgcccttgctgcggcaggcgtactggcgcagcccgcagcactcgctgtggtagcgcaggtaggagtagctggatagaatgtgctcccgctcctgccggcgcagctcctccagctcctgccccacctgggccaccgccgcctgggcggcctccacctgggcgttgagctctgccgtggcgttgtccactgtcccgccgggcgggtcctccagacgaatgcgtacaaagtgcagggaattgaacagggagtccaccttgtggtgggcctccttggtggtgaagtagaccccatatacccgccgggcgcccagggtggtggggacgaaaaagatgtcctcctcctcgttgagggcctcccggaagccgtcataggtctcccggggcaggtagccgtatcggaaccgggcgtgatccaggccccagagctcgtccaggctgacgttgagtccccggaggttctggagctggtccaccatgctgcgggcctcgtcggccttgtgctccagctcctccctccgccggtgcagggcggcgatgcgcccggagagggaatcgaaataggaagcgaaatcctccaagggggaagcggggtcgaagggggcataggccagggggatgcccgcctcatcggccacctccaccgagcggtggaggagtgcgctgtaggggttttccagctccaggggccgcaggcccttcacgctccgcatgagctgcagggcgttttccgggtggaactcctggtcgatgacgcaggcgcgcaccacatcgtcaaaccgctccagcggcccggcgatggtgagcagcttcatcgggacaacggacattgcggtagctccttccttgacatgggcttggggggcttattggcccaccagatctgcgagttctgcgcggtaagggacgccgtatttcaccgactcgatcacgttaatcagcacactcagctccagctccttgagctccaggtacgccacggcggtgtaaatggaggggggcacggcggcgagctgacgcttgttgaagcggcagatggcccgctggtagtactcctccaccgcgcccaccgccacgccgtcgaagcagtcccggtagggggagtcccgcagcagggcgaagacgtcgtccacgccgggggcggcgcagagggcgcgggtgaagtcggggttgaggcggtagtgaaaggggaagagaacgcgcagataggtctccggctccgtctgggggaagtaggttttgaggcggagcacatggatgatgttgagcaggtcgatctgctcccccagggcgcggagaagtaccttctgggtgcggccggtatactgccggtggacgatgcggtagaggtgggagaagtaggcggtgcgcagggcggcctccgccagggtgaagtcgggcagtgcgccgtcccggcttgggcgcaggtgccggagcacgggcgcgtagatggtgtcgcgggcagcgtccaggagctggtcgtagctggtgcaggaggccagggccccctcgtccagccgcaggcggaggggcaccgcagacgtggggggaggctccttggcgtagcggccggtcttgagccggcgcagggcggccaggagggcgctccgctccgcagcccggagctggaactgcatcaggggcttgtcctcccgggggacgtaataggacaggctccggtactccagccgcagctcgtcccgcagagcgccctccatctccacccggcccacgtaggaccaggcaccgggggggaccagggacagggcgcggctccagcccggatgctgccgcagggcctccagcagttcggcctcatttttcagcccggccagccgggcaaagtcgtccgcccgcaggcgcttgccgtagagggcgcggatcttggcggacagcgcgccgtaggtcatctccgcgtttttcacggctgtacgcccacgatcagggagaacagggtgtccacccagcgctccttgtttttctcataggacgcctccaccgcgcgcatggtctgctccagctttcggtccagccggtccagcgcctcctcggcggcggcctcctcagtctgctgcacctgctccagccgctgccgggcccgcgccagatagctctcgcgcatagcggagatctcctgctccaggccggcctggagctgctgccgcctggcacgggactcctccgccagcactttggcgccctgctcggcggccatgatctggctgaccatctcggcgtagtccatcgtaacacctccgtcgttgtttgaagtgaaaagggatttgtacgtcaccgtttatcataccatattgagaaatggatttctacaagaaaatggcagggataaataaaatatttcatcataccgcacaaagcggcgaatgccgcgcgggggagcttgaatgcgctattgtaatcctgggaggggacgtatataataagagtttataaagctgtcccgcggcttgcgcgggctcaaacgcagatgggaggaagtattatggcaaagctgctccggcttctggaacaagactgcacgctgacccatgaacagcttgcatccatgacggatatgactgtggcggacgtggaggccgccattcagcgctatgaggcggacaagaccatcctgggctatcaggccatcgtggactgggaccgcaccgaccgggaggcggtcaccgccctcattgaggtgaaggtgacgccccagcggggcgacggctttgaccgggtggccgagcgcatctaccagtacgacgaggtggagagcgtctatctgatgagcggcgcctttgatctcaccgtcattatctcgggccgcacgctgaaagaggtggcccagtttgtgggggagcgcctgtccaccctggaggacgtgacgggcaccgccacccattttatcctgcacaagtacaaggagaagcacctgatctttgaaaagcaggagcagcaggagaaggagtggatcttttcatgaattacgatgaaatactctgccggcgcatccaggaggtcaaaccctccggcatccggcgctttttcgatatcctggaggagatgaaggatgccatctctctgggcgtgggggagcccgatttcgtcaccccctggcacatccgggacgcgggcatctactctctggagaagggcttcaccaagtacacctccaacgccggcatggcggagctgcgccgggagatcgcggcctacctgaaccgccgcttcggcctgcaatacgacttcgcccatcagattgtggtcaccgtgggcggcagcgaggccatcgacctggccctgcggtgcatcctcaaccccggcgatgaggtgatcatccccgtgccctcctttgtgtgctacgggcccctgacgtccatggccgggggtacgccggtgtacgtggagctgaaggcggagaacgagttccgcctcaccgccgcgcagctccgcgccgccctcaccccccgcaccaaggccgtggtgcttcccttcccctccaaccccaccggcgggattctggagcgggccgatctggaggagctggccggggtgctgaaggacaccaacgccatggttctctccgacgagatctacgccgagctgacctatggccagaagcacgtgtcgcccgccaacctgccggagctgtacgaccgcaccatcgtggtcaacggcttctccaagagccacgccatgaccggctggcgcatgggctacgtctgcggccccgcgcccatcctccagcagatgctcaagctccaccagttcggtatcatgtccgcccccaccaccagccagtacgccgccattgaggccatgcgcaacggcgacgtggacatcgagaagatgcgggacgagtacgacggccgccgccgctatctggtggagggcctgcgccgcatcggcctgccctgcttcgagcccaagggcgccttttacgtgtttcccgacatccggggcaccggcctgacctccgacgaattctgcgagcggtttttgatggaggagaaggtggccgtcatctccggcgccgcctttggccccggcggcgagggcttcatccgctgctgctacgccaccagcatgaaggacatcgccgaggccctgacccgcatggacaacttcctgaccaacctgcgcaagaagcaggcccgggagggctgagcttccatccacccccattcataagaggaggcagcatatgtacatcacctgtctggacatggagggcgtgctggtccccgagatctggattgctttcgccgaggccagcggcatccccgccctcaagcgcaccacccgggacgagcccgattaccacaagctgatggagtaccgcctgggcatactgcgggagcacggcctggggctgcgggagattcaggctaccattgcccaaatcgaccccctgcccggcgcgcgggcgtttctggacgagctgcgcagcttcacccaggtgctcatcctcagcgacacctttgagcagttcgcccagcccctgatgaaaaagctgaactggcccaccctgttctgcaacaccctggaggtggcgcccgacggggccatcaccggcttccgcatgcgttgcccccagtccaagctgaccacggtgaaggccctacagtccatcggctacgacaccatcgccgccggggacagctacaacgacctgggcatgatccaggccagccgcgccggcttcctcttcaagagcacggcgcagatcaaggccgaccacccggaggtgcccgcctacgagggctttgacgagctgctggccgccatccggcgggccatggactgaggagggcggacgtatgcgcgacccgtttgacggcctggccttccgcccggcggacatcctcctgccccagaactgtgattacaccaagtggtcggtggtggcctgcgaccagtacacctcccagccggagtactggcaggaggtggaggagctggtgggctccgccccctccaccctgcgcctgatcctgcccgagagctgcctggacggcccaagcgtggagaccgacatcatggaggtcaacaacaccatgacccgctacctgcgggaggagcggttctgcaccctgcccgccagcctgatctatgtggagcggcggctggacaacctgcgcctgcgccggggcctggtgggcatggtggatctggagcagtacgactacgagcccggcgcggaggcccaggtgcgggccaccgagggcaccgtcatggcccgcattccgccccgggtggcggtgcgcaagaacgcccccctggagctgccccacgtgatgctgctggccgacgacccggaaaagacggtgcttgagcccctctccgcccgcaaggaccagatggaaaaggtgtacgacttcgacctcatggagcggggcggccacatcgccggctggcggctggacggggagagcatggccctggtggccgccgccctccggaagctggccgatccggcggccttccgcgcccgctacggcgtggaggacaagccggtgctcctcttcgccgtaggggacggcaaccactccctggccaccgccaaggagtgctatgagcggcagaagaagctcacccccagggagcagtgggacagcctgcccgcccggtacgccctgtgcgagctggtcaacctccacgacgcctccctggagttcgagcccatccaccgggtggtcttcggcgtggagccggagcgggtggtggaggagctgctctccgccctccccggcgcataccggggggagggggacggccatgtgctccgcttctcccatgccggggggaagggcgcggtcactgtgccccgcccggaggcccagttggaggtgggcaccctccagcccttcctggacgcctacgtgaaggagcacggggggagcatcgactacatccacggcgcggatgtggcccgggatctggccgcccgccccggcaatatcgccttcctgctgcccgccatgggcaaggagcagctctttcccaccgtcatccgggacggggtgctcccccgcaagaccttctccatgggggaggcccacgacaagcgcttttacctggaggcgcgcaagatccgataagggggtgacccgatgcccgttctggaaacaagggcctacgccaagctgaatctctctctcgacgtgctggaccggcggagcgacggctaccacgagatgcgcatggtcatgcagaccgtgaccctcagcgacgccctccgcctggagaccggcacgggaaagcctctgtccatgcgcagcagcctgggcttcctgcccgccgacgagcgcaacctggcggcggccgccgccctgcgcctgtgcgcggagacgggggcggactgcggcgggctgtccattgagctggacaagtccatcccggtgtgcgccgggctggcggggggcagcgccgacgccgctgccgtcctgcgggggctcaaccgcctgctggggctgggcctcccgccggagcggctggaggccatcggggcccgggtgggctccgacgtgccctactgcgtccggggcggcaccgccctggccgaggggcggggggaggtgctcaccactctgcccgccctgcccgactgccatgtggtgctgtgcaagcccgccttctcggtgcccacgccggagctcttcgccaggctggacggctgccgcatccgccgccgcccggacaccgccggtctgctggccgccctggcggcgggggatctggccggagtggcccggcgcatgtataacgtgtttgaggatgtgctccccgagcggcggggcgcggaggtgcagcgcatcaagaacgccctcgttcagcagggggccctgggggcctctatgagcggcaccggctccaccgtcttcggcctgttcgaccgggaggaggccgcccgccgggcctatgagctgctccaggagagctaccgggatacctttttggcccgcagcctggaaaaaatggtatagaaaccggcatcaccgtccacaatgtaggcactacatagtggacggtgatgttttatgacgcaatccaagaccctgcgccggtgggagctggcgctgctgctgggggtggccctggcggccctgctgggggtgtggctggacggagcccaggcggccctgtccgaccgggtgatccgcctgcacgtgctggccaactcggattccgaggccgaccaggccctcaagctccgggtgcgggacgcggtgctggccgaggcggaggagctgtttgttcccggagccggccgggcggagacagaggagctcctccgcgcccacctgtacgacctggccgccgccggggcggaggtggtgggggaggcgggctattcctatccggtgaccgcctcactggtgcacgactactggttccccaccaagacctataccgacttcgccctcccggcaggggcgtacaccgccctgcgcatcgagatcggcgcggggggcgggcagaactggtggtgcgtggtgttcccgcccctatgcctgggctccgtcagcgagaccacgcaggaaaccgccctggaggccgggctgacggagaaccaggtctccctgatgaccggggaggacgagggctacgtggtgaagttcaaggccgtggagctgctggagcagttcaagggctggctggaagggcgataaaaagcggcctgcgcaaaggtgcgcccccataaggaagtaatttaattgtcgcagagcggcatggctgaaaagtcatgccgtcctgccttttctttgccgttccacggtctgagcggcacccggcaggttgacttctccaatgaagttccagaccagttcgatcttctgcctgcgatggccgctggacttgtccggcgcatggacgatgatcttctttacaaactcattgacgatggtgggcgtcagttcccggatgcccacatattttcgcacaatggctgcaaagctggcaaaatcggcttgatcctgttcaaaggtttctactgcgtcccgccatgccttgacctgctccgtcagttctttttgttctgcctcatagtcggcggagagtttcaagaaccgttcatggctgatcgtaccgctgatgtcgtcctcataaatgcgtttgaaaatccggtcaagttcgccaatacgcttttccgcttgggcgatttcgcgcctgcgcttcttggcctctttttcggcttcttggaaccgttgctttttcgcggcttccccaaatgccatggcatcgtcaaagaacagtgccgtcacatcgaaaatccgctgcaacacaaacagtttcagcgtttcttcccggataaagtgcatggtacaaccacccgtattactcttataccgggagcaacgatagcagtcttgctgcggtgtcatgtttttgccggtggcgaaatgcagcttgcttccacagtcggcgcagtacagcaggccggaaaacaacccttgccgttcggcttgcttggccgggcggcgtttgttctcccgcagctcccgtacccgtgcaaagacttgttcttcgataatggcgggctgggtattggggaaaattcgctggttctccggggcgttatgcagccgctttttcagcttgtgggacttggaataagtcttgaaatttaccgtacagccggtgtactctggccgctccaagattcccgcaacagacttcgggctccattggtacggcttctccggcagcggctttccgtcccgttgggcgtagtgagctttaaccgtcaggatgtgttgggcggtcagcagcttggcaatctgcatggggcctttccctgaaatgcacaggtcaaaaatccgtttgacaatctcggcggcttcctcgtccacaatccacttctttttgtctgccaggtctttctgatacccgtagggcggattggtgcagaggtgttccccggcgtttcctttggctcgcataacagcccggattttcttgctggtatcgcgcgcgtagaagtcgttgaacagattacggaacggggtaaaatcattgtcccccttgtcgctgtccacgccgtcattgatggcgatataccgaatatcgcgctcggcaaagaaactctcggtatagtagcccactttcagatagtcccgccccatacgggacatatccttgacaataacggttctgatctttcctgcttcggcaagccggatcatctcattccatcccggacggtcaaacgtcaccccggaaacaccgtcgtcgatgaaaaaggtgggattgggaaaaccgctatcggttgcgaacttcataaggattttcttttgattggctatgctgttgctctcgccgtccagcgcgtcctcttgggacaggcgggcgtataaagcggtaatgttgtcgggataattggtgtttgctgtcatggttcattcctcctgtaatgaacgcccgacaaacaggttgctgtctttattatactgcgttttctcctctttgtcagcagatgcggcaacggcttccgcacgaataaggcgcaccatcttgtcataaagcggctccgttccgccgcaggaggtgtgtacttcatagaccgtcccaccgagcctataacagacggtttcttgcagcggatttccccgttttggtaaataatcgctctcttttggccttcgttttcgtcccattccgttcccttcctttccggggaagccacaacagagcaagcataggaagtgtggccacacttccgcaaaatctccgtttccggcctgttgccggagcggagatttttgcttgttgggagcttcctaaacccttgttttttgcttcgccaatattacgctggaaaggacggaatctacccgctaaagaggtggaaaaaagtatttttaaatcaaagcagccagtagcctgctagtttgctccgcaggttactggctgttttagttattttgatttgattaaacaagatccaaagaattgatccatgtctggattgcttctgccaatatatactgctgacgcaatacggccatacccgttgccggaatactaggttcgcattccttttcttttatattttcttccaggtaggctttcaaagtattaatgttttcctgaatctctgcaacgcatgcacgttgcttttcatacggtaaagaatccagatttacaattacagcgttgaagtccaagaaaatattaattggctttgaagagatttcaaacatgagccgttgaaattcggattctccagcctcggtcagagagtaaactgccttttccggcatcttgccttctttgactacttcgccccggattagccctttttcctctaactgaattgtctttttatagatagatggggtgctgatttttacccatttagagatgttcctgtattccaccaatttctgtatatcataggcgctcattggctctttttttaacattccaagaacaatcaaatcaatggtagccatgtggatcactcccttccacaccagtgcgtattttgaatggcaacactataaattatagtattggattttatagtctttgtcaagagtgggcgtgacttccttgacaactactataatttatagtagtatagtcattgcagtatactataatttatactactgtaatttaatttgtaggaggaagtatccacaatgagtgaacgcaacaacaaacttgagcttttgggcagtgcgcccatccccaaagctctgatggccctcggcataccgattatgattgggatgttgatcaatgcactctataatctggtagatgcctattttgtgggcggtctgggcgaaagtcaaatgggtgctatttccgtcgtgttccccttgggacaagtcgtggttgggttgggccttatgttcggtaacggagccgcatcctatctgtcaagactacttgggcgtggaaataaagataccgccaatagggtggcaagcaccgcactatatagcagtattctgattggcaccattatcattctgttttctacaattttcctcaaaccaattttggcaatgttgggtgcaacagaaacgattatgccgtatgccctgacgtactcaagaatttatatactgtcctgtgttttcaacgtgttcaacgtgaccatgaacaacattgtaagcagcgaaggtgcagcaaagacaaccatgtgtgcgttactgctgggagctgcattgaatatcgggttagaccctctttttatttacactttcaacatgggggttgctggtgcagcaatcgccactgcgatttcacagatggtatctacactcgtttatcttacatacgttctgcgaaaaagaagcgcattttcattcagcgtaaaagcattttctccaactgggcaaatgatggcggaaatcttgaaaattggtattcctactttggtgttccagttacttacaagcctttcgattacactgattaaccgtgcagccagcgattatggtgattcggtcattgcaggcatgggggcagtcacgcgaattacttctatgggaacgcttgttgtctttggatttttgaaagggtttcagcctattgcaggattcagctacggggcaaagaagtttaatcgcctacgcgaagtaatcaaaacatcaatcatttggtctacaagtttctgcttagtcgtgggtttggtgatggccgttttctccacacagattatctctcaatttaccgagggagatactcaaatgatttcagctggtcaaaaatcgctgtttgcgaacgggatcacattcattctttttggtttctacacggtttattcttctctgttcctagcattgggaaaaggtgcggcaggcttctttttaggagcgtgcagacaaggtatctgctttgtccctgtcattttgttgctgcctatggtatggggcatgaacggaattttgtatgcccaacccatcgcagatgtaatttctgtagtcatcactatttttatggcgttgcaccttcatcgggaactgtccagggctgaaaaacaggctatgtccaattcggaaatgtaaggtacgccccttgacttttgctattgtcaatagtactattgttgatagcaaaagtcggaggtgtcgttatgtcgtcgattgatttagtcatacttggtattgtattggagaaaccgcaaagcgcctatgacattcaaaaagatgtggaataccaccatttttcccgctggacgaaaataagcgtcccctctatttatcgaaaagtactccagttgagcgagaagggttatctccaaagcgatattgtcaagggtgataagtttgcggataaggccatctattctattaccgatcagggcagagcgtatttcaaagagctgatggcctcttgcgccgctggcccagtgcccttgctattcgatttcaatgtagtcattacgaatctgaacaagatggacaaagccgatgcgttggagctggtttcggctttgcgccgaagcatacagtcctcggctgaatcgaacgagggctatgcgcgggaatttgcagacattcccttggttgggagaacgatttttgagcagcagcagcttctctatcgagcccttctggaatggctggatcattttgaagggcagttcttagaagaatgagtacaggcccccaaagcagtttgaccatcctatttgaagctccgttttggatcggtctctacgaaagaacggataacggtaagtacgaggtatgcaaaatcacttttggctcagagcccaaagattacgaggtctatgagtttctgctgaagaattggcacaagttgaaattcagtcccccgatccaggccgaagtggtcatagagcgaaaaatcaatcctaaacgtatgcagcgcgaaattcaaagccaactgcaggataaaggcattggaacaaaggcgcagcaggcgttgaaactccagcatgagcaatgtaagctggaacggaaaatcaagagccgtgagcagaaagaggcggagaaagactgccagtttgccatccggcaggaaaaaaagaaagccaagcacagaggaagataacatgaagatagaatggattttatgccccttttgcggcagcaaaacacgattgaaaatccgcgatgacacagtcctggaaaactttccgctatattgccctaaatgcaaacatgaaaccttgattgcggtaagacaactgaatctatccatcatccaagagccagacgctaagacgcagagccgataacttgcaagagtatttcttcttgtagttatcggctttttctattccttaacacatgattcaatttaccccgcccgacggggaaagaaaaaaaccgttgccgggcaggttgattttgtgcgctctatttcatatcccagcggcggttttgaggaatcaagaccgccgctgttactttgcttactctatgcaggatcggcggcccacggaggaaaccaccatgctgatacagtctgtttatcaactatatagcttatcaaaaaaagcttatcttcagcacgggagaggtttggacaaaaagatgtacaatacagtgtaagttgtcggcatattacatttacttttactgatctgttattgcggtttttcggtgcgggccgaaactgccgtatcaacatagacgcaagtggtggtggcaccaactctaacttctcattctcccgcggatcggaggtgagaagatgaagtacatttctgatagttatggagaacgctgccggtttgacgctttctgcaaaaccgtcatccgtaatgaggccaaaacctatctgcgagatttgtgccgccagcgaaaacgggaaactcagttcagtgccttgtcgcagtatgaaatggacaagctctgcacgatggacgaatacccaagcgacagcgttgtgttcacggcttttggctgcgacctacatatccagggcgagctggtggctgacgcctttgccagcatgccggaacgggagcaaagcattttgatcctgtattgtgtgttggggctgacagatggtgagattggtcgtattgcagaaatatcccgcagcgccgtccagcggcacaggacaaaggcactgaatgaactgcgaaaagatttacaatccaagggagtgaggcactaacatgaaggaaccaacttttaacggcagagtgcttttgtcaatggacgtgatcgaagcggcccgcgccggtgatccgttagcattagagcgcgtcttgcggtactacgaccgctacatcaacaagatttgtacgcgaacgctctatgacaaagatggtttgccgcacatcgaaattgatgagtacatgaagcatcgcttacaggcaaaattggtggaagccattgtagtcaaggaatagcaaagacaaaggaagccatcaagggtcaagatgaacacttcgcgcccttgacggctcccttcgtctttgctgtgtggtaaccaagcgggcgcaagcagaaatccgcttgcgcccgctgctattatggtgtttgtgtctacgcatttagcaggtaaaatagcccgatactactaggtttttcggcttatttagactgctgaaagcatcatatcactcttctacctgtaaatacagtttgaaatgcgtagaaacttgccgtgcgttactgagaactaaatttttaattagtcattgcgattgaaaatagttgtgctaacaaatgagcatctttattcgagtttttaacttcaagatgctcaaggacagatttctctgtctctgggctccaatatattttcaatttattttttgcacgggtgattgccgtataaaagatgttatgggtgatgcgttcttctacttcatttgtgataacgatttttacagagtcatactctaaaccttgagctttgtgaatagatacagcatacgctacttgaaatggtacaactgtagagttattattgtcatcgtcttcgtcagtacttcgaaacttattaacgctgaatgagataatggaatttccagattcagactctccaatgagttcaaagtcgtagtcccacgcatctatctcgtttattgattcctcgagctcaatatcaaaccagatttgttgttcgtctgggtgaatcccagcaattctaccttttgtgttgttatgaatcaatggggaaaaaatatttgattcattaaacaggactggatcaccaatcttatatgtgttgattccccatacaattccttcgtttggattgctattctgtaaaaaacggttaatattattaattccatagagtccatcgtaatttaaacagagaataatttcatcattattgctatgttcaaaaatggattcatcaagtcttgcgacgtagccgtttttcactaatggttctaaaatcgcatcatcaagtttacgtacgcgatcccacacagttagcaaatcttgattcgtggttctgtagggatacgttaattcaaacacagaagttgcaggtacaaactttcgtgcaatgctaaaccaatttccaaagtaaattgattctatctgatacacatcacctactaagactagaagcttgaagttggccttttcaagtacctgtctcatgtcgctgttgcttacggtgctacactcatcgataaatagtatatcaaactcagtattgagatttctctttgacaaaaacttagcaatggtattatattcgctgttacccgcagttacttttctccgcatattatctacagcgggatgagtgtttgccaaaaagagtttatccttttctccccaaaaattagctatatggttaattagggtggatttgcctgtcccagcagaaccatatattaatgcaacatgtgatttttcaaacatttggcgaagtgcatgttttttgccatcgtcatcaatactgtatgactctcgagagagccatgagtcaacagatgccgtatattgagtaacaccagaagacgagagttgttgcagtttttttattatttcagcactatcctcagcatattctttaatataaatatggcctttgtattcttctagtctgcgtccagtatgcttatagtaaagagcagcattatattgcctaatcaaatcatcaatgttctcaaaaccttcaatctcggctttaggagtgaatagttttccttctatctctgtattattcttaatatatcgagcaaatagttcatgctcatgaccagaaacgggaattgcgttaaatagatcatatattctcggattgtgctgacgaagagaagtgcaataaggcatacgatcaaacggcatacagccatagtttagataaagatttgataagccttcgcattgtttattccagtactgccatttgataacgcgattattcattttatataacaaataacgcaatacatttgagccagctttgccgttcacaattacttcccgacattgatctagaagttcatatattttgattgacttagcttgtgaagtaatatgactttttataaaattgtaataatcttggtcgctacttacaagctcggtcaaaggcattttgacagttgagagaaatctcatcagttctctatattcaatagagttggtgctatgttccacgcgtggcccaaagatttcagaaaggttatcccattcacacggccgaatagatacttcatacccatctattattaggatagacatatccttgtccagaatatgaattgtatcattataaattgaaaactttatagcgtagttatccatgatttcgtgactagtaaaagcaattactcgatcaaacttgctagtattagccgttgctgcagtaaatgtaacctcataatatattctttgatttataaagaaaggtttaattttctgaacataatagcgatcattgtatgttacagcataactaaatctgcttggcgtctcaattctttctgcaattttcgtgtaataatcggatagttcggtatcagtgtccaaaggaaaatcttctatattctctagcacgtcaagattgtatgcctgtttaagatagagttttgttttaaataggtgttcataatatttgagcataagccgctcggagccatctttgtctacagtgtagtgcgatacagacttctggagtagctcatgaaatctatataaaaaacgcaaatttccatgacgttgcatatcttttagagcggcaacattgagattataatcattaggattaacatcagcaccattagaaaatgccttgattgctacatattctacaaaattgcgaatatgccccaatatgttttggctcaaaagaccccgctcggttgcgccaaaacgtgcaatgttgtcacaaatcacgccacttgtgtccaaaatagctttgtcaattcttagcaatattatcatctccttttgcagaaaatcaaaattatagtcactattattttacacctttatactcgagtcgtaaatccgccaaatttcgagtgtttgtgttttaaaataaattctttgaacagcctaaaaagaaaaggaaccggcgtgccatttcattgcgaaataacacgccggttttttagcaaccctgtttgtcagccgttaagttagtatgattttgatacttccttatcggtgttcaccaaagcgcgcaggccgctttttgcgggggaattcagccgatgccgccgtaggcgatgcccagaatccataccgccacggtgaggaatacatagaaccgggcggtgatgccgaaaaggcggccgggggcccgggcccggcccagagccagctcggcccggatgtccttcatacccagcacaaagtagatgcacaccgccaccagcagcgcaccgaagggggagacgtagatggtgatgagatccatccagccccccatgcccgccagggattccaggaacaggccggggaggaaggcggccgcgcccaccaggagggtggaaacggtgcgggacaggcggaaggtggaggtgagggcctcgccgcaggcctccagcatgttcatcagggaggtgatgcccgcaaagaacacggagacgaagaagagcagggcgaagatgcgcccgccgggcatctgctggaagatctgggggagggtgacgaacatgagctgcggcccgctggtggggtcgatgccgaaggcaaacaccgcgggcaggatggcgaagcccgccagcagggcggccagggtgtccagtacggcggtcatgcccgcgtggcggaggatgttctcgccctttttcatatagctgccgtagatgagcatgcccgcgccgttgatggacagggagaagaaggcctgtcccatggccatcacccaggtctccgggttgagcagatagctccagtcgggccggagcaggtagaggtagccctccatggcgccgggcaggaaggccacccggacggcgatgatgaggaacaggatgaagaaggcgggcatcatgaccttgctgagcttttcaatgccggaggccacgccgaagatcaggatggcggccgtcaccgccaccgccgcgaagtgccaggggatggagccgaagtccaccgccagggcggagaagaagccctgggcgtccccggccaggacggagccggtgagggagcctgcggcgtaccgcagcacccagcccaccaccaccgagtagccgatggcgatgcccagcacccccagcagggggatggcgcccagcacccggccgccccggcggccccgctgccggagcacgtagtccagcgagcccatggcgccggtgccggtgaggcggcccagggcgaactcccccgacaggcccacatagctgaacagggcgacgaacaggaaataggggatcaggaaggcgccgccgccgtactgccccacccggtagggaaagagccagatgttggccatgcccaccgcggagcccaccgcggccagcacaaagccgatggagctggtaaacttgccgtcggaaccggatttatgcatgatattcctcctcattgagcttgaccatgtggatgtggtcctcccacacgccgttgatgttgagatagcgccgggccagcccctccggccggtagcccgccttctccgccgcccgcagggaggcggcgttgcggggcatgacgttggcctccgcccggtggagccccagcacccggaaggcccagccggtgccgtaccggatggcctcggagccgtagccccgcccccagagggcggcgtcgattttgtaggacacgaagcaggactggaaggctccccggacgatctcgttgaagcccagcgccccgatgattttgcccgggtgccggggctgtaccagcaggaagcggaagctccgccccgcctccgcccagcccagctcctccgccagacgctcggcctgccccgcctcggtgaagaactcctccggctgcgtcgggtcaaagggggcgaaggccgcccggttgcggcggtagaaggcggcggccggacgggccagggcggggtccaccgccaaaaagcccagccggggggagcggaacacaaagcggcgcatggggatacctccttctaatctgactggagaggtattataccataccggagacacttttgcactataaagtcaaaaagattttgaccgggggcaatgcggttttcacatgcaaaagattccatttcggaaggttgacctgggggacagttttcgttacaatagaggtattgagacaagagccgtccacccaggggcggctccgctattgccaaggagaaaaccatgctgaacagagaagaggaactgcgcttctgcaaggcgcggagggcggccatcgccctggactaccagaacctgaacccggagcagaggagggccgcactggccaccgaggggccgctgctgctgctggcgggggcgggcagcggcaagaccaccgtgctcattcaccgcatcgccaacctgatgaagtatggccggggatcggactgcgatgaggcgcccgcctgggccgcccccgcagacctggcctttctggagggctacgtccagaaccccgatcccgcccaaaaggcggagcaggagcggctgtgccgggtagacccggcggttccctggtccatcatcgccatcaccttcaccaacaaggccgccggcgagctgaaggagcggctggagcggatgctggggccgtcggccaacgacatctgggcctccaccttccactccgcctgcgtgcgcatcctgcggcgggacatcgaccggctgggcttcaccagttccttcaccatctacgacaccgccgactccgagcgggtgatcaaggacattgtgaaggacttcaacctggacgagaaggccttcgccccccgctccatcctgggctatatttcccgggccaaggacgccatgaagctggggaaggactaccttcaggagtgtgagaaggcgggggactaccggctggtgaaaatcgccaaggtctacgccgagtatgagcgccgcctccgggaggccaacgccctggatttcgacgacatcatcctggacaccgtccgcctgctccagaattttgatgacgttcgggagtattaccagaaaaaattccgctatgtactcattgacgagtaccaggacaccaacaacctccagtatctgctggcctccaccctggcgggggggtacgagaacatctgcgtggtgggcgacgacgaccagtccatctaccgcttccggggggccaccatcgagaacatcctctccttcgagtcccagtacaagggggcgcgggtgatccggctggagcagaactaccgctccaccaaaaacatcctggaggcgtccaacgcggtcatccgcaacaatgagggccgcaagggcaaggagctgtggacggagcacgaggcgggggacaaggttcactgctacaccgccatgaacgagcacgacgaggcccagttcgtggccgcccagatcctggccggcttctccgcgggccggggctggcgggagcacgcggtgctctaccgcatgaacgcccagtccaaccagcttgagcaggccttcaagcgcaacggcatcccctaccgcatcatcgggggcatccgcttcttcgaccgggcggaggtcaaggacatgatggcctacctctgcgccgtcaacaaccccaacgacgatctgcgcctgtcccgcatcatcaacaacccgccccggggcatcggggccaccaccgtggagcgggcccaggccatcgcccaggcggagggccgctccctgtgggacgtggtgagccacgccaaggacttcccggagcttcagaaggccgccccccgcctgtcccagttcgccgagctgatggcggagctgcggaagctctccggcgagatggagctgcccgacttttacgaggagctggtgcagcgcaccggctacgccgtcatgctggagcaaaagaacactgtggaggaccgtacccggctggagaacgtccacgaggtgctctcctccatccagaactacctggagaatgcggtggatgagccctccctggcgggcttcctggacgagatcgccctctataccgacctggacagccacgatcccagcgaggactgcgtggtgatgatgaccatgcactcggccaagggcctggagttcccggtggtcttcgtggtgggcgtggaggagggcatcttccccggcatccgcgccatcggcgaggccgaggagatggaggaggagcgccgcctgtgctacgtggccatgacccgggccaaggagaagctctatatgacctgcgcctcccagcgcatgctcttcggccgcaccaactccaaccgcccctcccgctttttgggggagatcccgccggagtatgtggagaagtcgggccgcctgccctacgccgagcgggccgaacgggagaccgagcgccccgcccgccgcccgccgttgcgccgcaccttcgaccggggcttctccatgggctccgccgccgccccggcctctgccggcgcgcccgcccccgactggaagagccccgcggcgggacgggcctccgccggtggggccctgcccggcttcaagatgggggacagcgtccagcacaaggccttcggccggggcctcatcaccaaggttacccccatggggggcgacgccctggtggagatcgccttcgacagcgtgggtaccaagaagctgatgctcaagtccgcctcacagtacatgaagaagctctgagccgcggcccctacagcagctcggtgaagctggtgatataccggtcacagaacccccgcatttccgcctcgtaggaggcgtagaaggggtcaaacacccccacggcccggatgcccacagcctgggccgcccggcaggcgccgggggagtcctcgaagagggtgcagtccccggcctcggcccccagaagggccagggagcgggtgaaggcctccgggttgcgcttctccaggcccagctcctgcacaaagatgatctgccgaaagtacccctccagcctgtggcgggccagggcggcccggcacagctcgggtacgcaggcggtgagaagggccatgggctccccggccgcggcgcaccgggccaggaacgcctccgcacccggcttcatgggcacctggcgggcgtaggcgtcccgggccatgtccagccactcggccatgatggcctccggcgtcatatccaggcagtagtagtccttggtgaactgggcggcgatggggaagatggagtggcccacggtgtcgctgtattcgcgggtgggggtgagcccccggcgggccagaaagccgttgtcaatctccacccatacgccgttggagtccaccagcgtgccgtcaaagtcgaataagtacatgctcaaaccctcgtttcccggtgaatgtgtgtaaacctgattttatcatagtcaaaggagaggtacaaccatgaccgaacacaaagagagcagcgtcctggcccgcttcgccagcccgctgctgatcctggccaccatcatctggggcagctccttcgtggtgatgaagtccagcgtggacgtgctgcccaccttctggctgctggccatccgcttttcttttgcggccctggtgctggcggtggtgttcatccggcggtggaaggtgctggataagcagtacctgatcggcggcacggtgatgggcttctgcctgtttctggcctacaccttccagaccttcggcctggagcagaccacctccggcaagaacgccttctttaccgccgtctactgcgtcatcgtccccttcctgtactggttcatcgccaagcgccgccccgaccggttcaacctgattgccgccttcctgtgcatcggggggatcgccctggtgtccatcaccggggacaacgcctccgccttcaacatgggcgatgtgctcaccctcatcggcggcttcttcttcgccgcccacatcgtggccgtgtccaggtactccgagggacgggacatcttcatcctcaccaccctccagtttgcctccttcgccctcttttcctggctgggggtactgatcacccgcccggcgctgacgcccggcgtatttgacagcagcctgatcatgggcctggcgtacctggtcatctgcgcctcctgcggcgccctcctgttccagaacatcggtcagaagtacaccgccccctccaccgccgccgtgctcctctccctggaggcccccttcggcgtgttcttctccatcctcttcgccaatgagcggcccacccccctcatgttcgtgggctttgcgctgatcttcatcgccgtggtgtgctccgagaccaaattctccttcctgcgcaaaaaaaagagttgacaaagccggaacaggtgcgtataatacggtacaacaaccacacatggtaaaccagtgaggaagagaagtacccggcgtttccgatgcaaagagagtcccggaaggtggaatcgggatcagaggagaccggcgaatggccttccgagggcggcttgaacgggcaacctagtagatgccgacgggaccccacccgttatccatcgggcacgcatgatggtgcgtgaagcgagtggacgtcattgacgtcaatttgggtggtatcgcagaagtgttgaaacgcttttgtcccagcaatggggcagaagcgtttttttacatcctgcaccatctgccgccccaatttttgattgggaggaaccaaacatgaaaaagctgaatcgaatcctgtctctctccgccgcggccgcgctggccctgtccctctctgcctgcggtgcgcagggggagccggtggagtccggcactgccgctcccgccgccggtgaaacctataaggtggccgtgatcaagcagatggaccacgcctccctggacgagatcgccaacgcgattaccgcccggctggacgccatcgcggaggaaaacggcatcacgatcgagtatgaggtgacctccggccagggggatcagactgtcctgcgccaattgtccgaccaggctattgccgacggtgtggacgccattatccccatcgccaccaccgccgcccaggtggccgccgtctccgctgaggagagcaagaccccggtgatcttcgccgccatctcctatccggagaccgtggagctcaccggcatggactacgtcaccggcaccagcgacgccctggacaccaatcagattctggacatgatgtttacccagaatccagacattgggtctgtgggcctgctctactccctgtccgagcccaattccgaggtgcccatcgcggatgccaaggcttatctggacgccaagggcgtggcctacaccgaggccaccgctaacaccaacgacgaggtcatcgccgccgccagctccctgattgccgacggagtggacgccgtcttcacccccaccgacaacatcatcatggccgccgagctggccatctatgaggacttcatcgccgccggcatcccccactacaccggggccgactccttcgtgcgcaacggcgcctttgccacctgcggcgtcaactacaccgacctgggtgccgaaacggccgatctggcctaccaggccatgaccgggggcatggacggcctggaggactattaccaggtggcgggcggcctgatcaccgtcaactccgagaccgccgccgccctggccatcgaccccgccgtctttgaaagcctgggacaggtcaccaccgtcaccaccactgaggactgagatcaaaccaaagccagccccccggctcccgccgggggcgctggcctgtgaaaggagcgtttttccgtgctctacgtcgcccaaaccgccctggagctgggcttccagtacgctctggtggccatggccctgttcctaagctaccgggtgctggacatcgccgacctgaccaccgacggctgtttcgtcctgggctgcgccgtgtcggtgaccctcaccgccgcgggacaccccttcctggccatccccgccgccatgctggccggggcctgcgccgggtttgtcaccgccttcctccagaccaagctgggagtgccctccatcctggcgggcatcgtcaccaacacggggctgtataccgtaaacctcatggccatgggctggaaggccaaccagtccctgctcaagcaggataccatcttcaccctcttccgcgccaccggcatcggcggcgactggaaccccatcctcctctccggggggatcaccgtgctggcgggtgtgctgctggtggccttcctgggcacccggctgggcctcagcatccgcgccaccggcgacaaccgggacatggtgcgctcctcctccatcaaccccaatttcaccatcaccatcggcctgtgcgtggccaacgccctcaccggcctgtccggcgcagtagtgggccaggcccagaagacagctgacatcaacagcggcaccggaatcgtggtcatcggcctggcctgcctgattatcggtgagaccatcgtgggccggggcgccatgttccggggagccattgcggtagtggcgggcagcatcctctaccgtctcgtttacgctctggtgctttacaccaaggtggtgccagtggactgcctcaagctggtgaccgccttggtggtggccctggccatcgcggccccctccatccggcagtggtgggctttccagaccagaaagcgccgcgccctggccgggcgaaagggggagaagtaaatgctggaactgaacaaggtctccaagaccttcaaccccggcaccgtcaacgagaagaaggccctggacggcttgtccgtgactctggccgagggagacttcgtgaccatcgtgggctccaacggcgcgggcaagtccaccttcttcaacgccgtggcgggggacttctttgtggacgagggctccatccgcctggacggggcggacatcacctatctgcccgcctaccgccgcagccgccagatcggccgtctgttccaggaccccatgcggggcaccgccccccacatgaccatcgaggagaacctggccctggcctatctccgcaccgccaagcaccagcgtgccttcttcagccgggtctccaaggccgacaaggcgttcttccgggagcagctcgcccggctggacatgggcctggaggaccggatgcgccagccggtgggcctcctctccggcggtcagcggcaggccctgacattgctcatggccaccatggtgccccccaagctgctcctgctggacgagcacaccgccgcactggaccctgccacggcggagaaggtgctccgcctcacccgggaaatcgtggagggggagcgcattacctgcctcatgatcacccacaacatgaaaaacgccctggagctgggcagccgaaccttcatgatggatgccggacgggtggtgctggacatcggcggagaggagcgtaagggcctcaccgtggacgatctgctggagcgcttccgtgccggcgcggggaagaacctggacaacgaccgcattttgctctccaacgactagaaaaatgccgcccaaaggcggcattttttccgtgtctgcggcagcggggccatgtatccccggctgcgacgggagtaggccgatggcggtggaaaaagtgcgagatctttcgaaaaaagcattgacaagaatgcggagatatgctattattttctggctgacatgccaaagagatcagcgcccatgcgggtgtagttcaatggtagaatcccagccttccaagctggtcgcgtgggttcgattcccatcacccgctccataagcgcctgtagctcaggtggatagagcaactgccttctaagcagtgggtcaggggttcgagtcccttcaggcgtgccatcgttttctaaagccattcgatatggtgggtgtagttcagttggtagagcatcggattgtggttccgagtgtcgcgggttcgagtcccgtcacccaccccataagcccttaaggcggaagggccggagcgtccgctccggtcctttgcttttagaaccagccagattggggtgtagccaagtggtaaggcacgggactttgactcccgcattcgctggttcgagcccagccatcccagccaaatgactcgttagctcagtcggcagagcaactgccttttaagcagtgggtccggggttcgaatccccgacgggtcaccaaaatgtgtagacaaaaaagatacacgtcagaaacaccgcacggaagtgcggtgtttctgccattttagaaggttttagaggaaactagcacaaaaaagtttaattttagaagtcagagcaaactttttcaaagaagggccctgggggtgatgcaaaatccagtttttagggaagtgagtgtttcgaactcctccgcattttcttatgtgtgataaagaagtaatagaagtgtaaaaaattttgccgttcctatccggcacttagctattgtgtcggataggtcgggcagttattggggcaagcccaccttgccaacaaaagtctcaatatcttgtctgcggggcttgttttcgtcatagcccgtccaggatggggcgggtcttggaataggcaagcacctgccgttgcagccccttttcccgttcagcctcttttccacatttttcagctctgtaatgcttttctgcatggcggtataggctgcggaacaggcttcgtccaatttctccggggaagaaaagccggactgctggtaggcagtaacggtagccgccatctgctttaggttgtgctttgccgcccagcggtcatagcccatgcctttgccctcggctcgcttggcttccagatcaaccatgcgctgcaaggtgttggctactggggtggttttgaagctttctccctctgtaacggctctttgacagcggcagggtattcgggtaatagcagaaaaacagggtgtggagcggaactatttttgaaaaatccgaaaaaatattttgagggattttcagcaacacaagccgcatggcagggtttggggaagtcactccccaacaagattcccgcaggggcaaaaatgagcagaaagtgaattttggcacctcggtagaatcttgctctaagaaactgccggactgccgctcacttcctactgccactttttcgggcttcactccttactactgggcatttggaaatttgccaaacagacaacaaaaaagcagcaaatcggtttcagatttactgcttcatgtgccactgtggggcggcggatattcagttgtaaataacaaaagagggcggtagcattttgggctaccctcctacaaatggatagttgtaatattactattccaaccacatcatattagtatattcatgcctgatttgtagtcatccaagatatcgggcttgactggctttccccaattccatgaggggtctcgctgatgtacatactctcccaaccggtcagcctcttgcagactaatctgatttaatgtccacccagcggcagctcgttcttcgggtggcaatgacataacgtaatcctttataatttcgctctcaatctctccaccactcatgccgccgttcttttccattctctcaaacaccaaagattttatcttatttgcaacgccctcgtcaacagggacaatgcggcgaaaatccgttcgacctgtaatatccattccctccggacaatatgggttaacatgaccctttggcggcaaagagccatttggaagtttaggggttaagtgcgaattttgaaccttataattttgttgcacaaatcgtgtcattcctgtaatcgtcataagaacacctccaaataataataaaccctgttttaagaataactgtcataaccatagtttacagttatacgagccgttgctgcagaaacatcccctacagatataatcggcacttttgtcaaaaatataatatccgcacaagattttatcgttacaaaaacacaaatttattctgcttgtttaacaaagaattttatctgctttattatatttatcgcatgatttttaaaaaatgaaacacataacaaaaaatgtaacccggaatagtgggctgctatctatcaaatttttgtttgttactttatgacatatgagcattcggccagggcatgcaagaagaaaaatcaagccgcctgttggcctcagaatacctgaagcccacaggcagcttttttcattccccgcagcactgttccttttagtgcttatgcttcgtctgttcgccattccttgatggtgttggtaatagcttttccctggctttccggctatacttgcgttgcaaacgacaagaaggaggccgacagactatggcagagacgaaaaatttatgcgcccagattcctctggagctccacgccaaagtatgcggtgagcgggagcagcgggaacagaccaccagccagtacatcacagagttactcatggaatactacaagatgaaagaaaatggaggtaagacgactatggcgaacaatggcagcaggacgatggccttccaaatcccggaggaactgttccagcggatcaagcagcacctggagcgcgagagcgcccgcagtggccgcaaggtgacccaacgggagttcgtcctgagtctgatcgaggaggccctggaacaggctgaggaggaagccgcagaggaggaggccacgcaggaaaagtgtggtgaggacgcatagcagccggagtgcgcccccaaacaaccctataacataagtcagagaaagccccccagggtgcccgaacgtagaatcgggtaccctggggggctttttgcgcttctgtggaaggagggaaaaaccatcgagcaacagaagaaccgctttacagacgcagaaatggagatcgccaaagagaccgatctcccagacctgctggagtccctgggctaccaggtcaggcgggtcggccgctaccataccaccaaagagatggacagcctgcgtatcaagaaccgccgcacctggtttcgttactcagagggcgtcggtggagacgccatcaccttcctccagcggttctgcggcaagagcttcccggaggcggtggaatatctgcttgactaccatggctgggcgcgggattcccccgcccctcaaaagtcggtgccgtccaaaggccaggacagacagaaggatgagcccccgcctccctttgccctgccactccccaacacggatcagcggcgcgtgtttgcctatcttcaaaaaaggggcatcgcgccccaggtgatccggggatttatccaggcaggactgctgtacgaggacgccgaacaccacaactgcgtgtttgtggggcggaacaggtctggaactccggtgttcgccagcaagcgcggcacctatgaccggagcggccccggcttcaaaggcgacgtaactggcagcgacaagaatacggccttccgcctcccctgccgtccggagttgaatgcggttcttgtctttgaagcccccattgacctcatgagctattgtaccctgcaccggcaggtcaccagcaacgcggtggccctgtgcggactccatgagggggcgctggatacatacctgcgggagaatccgcagctcaggcacattgtcctgtgcctggacgcagatgagccgggccagtctgcagtggaacgcctgcgggccaagtacgaggccgcaggttacatggtgcagtcccggacgcctccttgcggcaaggactggaatgagtatttacagcagcgaggccccatccgggaaaggggggatctgcgacagactgtaaccagatgatcattcaggctgaaaagaacaaaacatggaggaacgatcatgatcaaacaccttttgacgaccctgtgcgccctggccctggtcacaactgggagcatccccgccctggccgccgaggcggataccggcgagagcgcccgctattaccccatctcagtggaggagtacacctacggggaacagaatgagccccgcatcaacaaggtgtatcagctctccctctcagacgatccctccggtatccccaggtcggactttgtgcggaatgggcggctgtattacctgctggatatgacccggaaggatgaggtgggggtggacaccaagccccatactgagaccgtcacccgccccagcgataccgacaacatggaggagatcctccaggggctggaggccgagttggaggtcaccaccgaggaagggtacatcggggtgctccgcctggaccacaccagcgtccaggtgaccacagacggctacgccaccaagacccgcaatctctccgccacccgcacttaccccaatctgtccgacgcggatctggccctgatccccaagtccatcgaggacaacgggaaggagctgaccctggcggatgtccagtggagcagctccgagcagacggacggcgcgggcggcacagttacccgctacaccgctacagccagctacaccggcaccagcagctaccaatacgccaccggctacacagtcactgccaactacaccggcgaggtggccaagaccggctgcagcgtagtgacctataccgccatcttcggcagtatggaggccccggaggagtccacagagcctgagtcgggcagcagtacagcgtccgcaggcgtggatctgtccaccctgaagctgccgctgttgatcggcggcgggatcgccgtactggcggccagcggtgcgttcgtattcaagaagctcaaggaacggaggtgagtttcaattgaaactgcgcgtctttctgctgacggcaatgatatgcaccctgtgcgttggtcaggccagcgcgctggaatacacgatggacgccccagaggatcacctgttcggcaggcccaccagcgatgatacgatctatgagtgggaagatcccaatgtggaccggagcaagaacacagccctgatcccgcccggcttcggcagcccaaccagctatctccccggctccggcacagccctgacccccaacctggttcccggtgcgttggagggcggcggcctggtatctcagacagggagcatcacttatccgactgtggacagcggcggcaactggagcggcccatcgtttaccgccgtcacaagcgatctctactactccggcggatacctggggacgctcaagatcccggccattggcctgtctgtcagggtctatgaaggaacggacagcggaaccctggccaaaggggccggtcacttccccggcaccagcatctgggatgggaatgtttgtgttgcaggccacaaccggggtgtacgggatgactttggagacctgcacaccctgaagccaggtgataccgttacctggaccaccaagctggggacaaggacctacgaagttgtttcggtggaaaaggtgctcgagaccgacaccagcggcaccacatccaccagcgacaaccgactcaccctttatacctgtgtcaaaaaccagcgggcttaccgctggtgtgtcaccgctgtggccaagtaatgctgtctgccgatttcgctcgactttccaccaaaacagtggtatggttcggagtgtagacccccactacacaggaaatggaggaagcgagtatgaaacataggaaatcggtatccctgctcctggctggcgtcaccaccgtggccatgctgaccggccctgtccaggcggcagaagcccccagtccccaggagctggccgccgcccggctgcagtccgaggggctcatgaagggagatgaaaacggcgaactgcacctggaggacgacctgacgcgggcggaactggcctgtctgatcagccccatcatcctgaacccggagcacgtggcctgggaaacggagtggtacacccggatgtgtaccaccaatttcaacgatgttcctgaatgggcacaggtcgctgtgggcgtgtgcgcctccatgggtacaatggccggatacggagacggcctgtttggcccctcagatccggtcagcccgcaaatggcctgcacggttatgcttcgctacctggaacaggatggctggacctacgataccgcctgtgaaaaggcagcggaactggggcttgccccagcgggatcgctggaaggagacgccatcacccgtggggatatggctatcctgctgaccggctccctggactacctggcatatctgcaaaccctgtaagaaaatactgcgtttttccaaaacggcccctggtgcgcaccaggggccgttattctgcgttttaaggaggagatctcaaccatgaaaaggcgattactgtccctgttcctggcttttgtgaccatactcagtctcctgcccacggcggcctttgcggccagctctgaggaggatgccttgggcgaagtggacatctataacggcgactatgagctgggctacctcgccatcaacggcgcggtcaaaaagcagaaatatacctactttttatacgaatccaatgatgggagcaccaaggaatctcctgcgtactgcgttaacccgaaccagtacggcgtcccccagaccgtaggccccggagagagcatcaaatacctagccaacgaaaaggccagcgaccccaaggtggtgggcatcatctccaacggctatccccaccgcagcctgggagagcttggtctggagaacaaatatcaggcgttctacgccaccaaaatggcgctctggtgctacctgatccccagctgggacatttccaacctgaaggtggcccccggcctgagcggcgatgaactggacagaggcaaccgtatcctggccgccgccaaggacatctacaagcgcggcaccacctacaactatatgctcactccccggatgaccgtcacggcagacaagtccacggcctaccccgtgaccatcggcggccaggcatacttgcagcaggtgttcaccatctggagcgagacttgggtgtatgactacgatgtgtctgtggccttctccgacccggacagtgtgccggagggcacgaagatcgtggacgccaacaacaaggagatcaccgccgtcaccacaaagtacacctcagacggctatgccgggacgttcaaggtcctctatcccgcaggcagcgtggagggccagtccggcaatgtccagttctccctctccgccccggtggcccagtatgccgctatgtacgccgtgtgccaggaaaaggaccaatacggcgatttacagaattacatctgtgacttggacaacaaggtacagctggatgtggccgccgtcagcagctatgcagacagtggggaacctgatcctgacgagacggccctgaagatcgtgaagctggaggaagggaccgagatccccctggaaggggccgtgttctctgtctatgacccggagggaaagaaagtcggttccttctccaccggcccggacgggaccgtgaccatccccctgaccctggagggccactataccataaccgaggagatcccgccccggtatcacctgctgccggaggagaccacccagcacgccgatgtggagtataacaagaccgccaccctgaccttctggaacgccccctacggctccctgcgggtggagaagcggagcgacaccggcgacgccctctccggcgtcaccatccagatcaagcacatcgagactggcgagacccgcaccggccagacccgcaatggcgtcatcgtctttgacgagctggcccccggcggctgggaggtccgggagctggcgggcattgacggctgggtggcggatacggacacggtgcagaccgtagcagtcgtgactgggcaggaatccaccgccaccatcatcaacaaggaactacccggcctgcgaatcaccaagtatgagcgtgggaccatgacccttatgcccaatgtgtcctttgagatcttccgggacgcggaaagtttgggtatcttcaccacggatgagttcggccagattttgcttaccaactgtgagccaggcacctaccgggccgaggaacgggacactggcggggacggccatgtgctggataccacgccccaggaggtggagttaaaagctggggacggcatcaaggagctggttttcttcaatgaccgcctgcccggcatccatctcatcaaggtggacagcgccgacctgtcccagcccatcgccaacgcccgcttccgaattgaggcggtggatggttcctggggaccggaggagtacaccacctcggaggacgggaccatcgacctctccaaactccccgtgggcgcttatgtcgtaaccgaactggagtgtccgggatatgtgattgacgaagcacagcgcatcatacatctggatgggaatgaaacggcccaattcgtatttaccaattccaagctgccttccctccatctcaccaagatcagtgcggatgggtctccgctggctggggtgacctacagcctgacccgcattgaggacggcagccgctatatggatcagaccacatcttctacggggaccatcgtttgggacggcttacagcctggggtctattccctgcgggaaacagatacgttgtccgaccacatcctggaccccaaggaataccatgtggaactgtttcccggcaaagacggcaccatcgtgctggaaaacgataagcgacccaatctgaccatctggaaacgggacgcagatagtggcgcgcccattgaggggacggtattcctggtgaaaggtgcggacgggcattctgtggccgaagtgaccaccgggccggacggctccgccacggttcccaacctcctgcccgcggtgtatgaggtatccgaaaaatcggtgccgtctccctatctgctggatgcggagccccagctcatgaccctctatcccaaccgggaccgggatgtgtattttgaaaaccacaaggccccgtccatcgaaatcatcaaggaaaattccattacccatgagccgctggccaacgtgcgcttccaggtgtggtatgccagcaacgatacggagaccggcgaatacaacgacctgggcatcttcacgacggacgagaacggccgcatcgaactgaccggcccggccaacggcctgcgggacggctggttccgggtaaaggagctggagccgcccgccggattctccatcaaggacagcgacacccaggaggcgttcgtccctgcgggaaaggggcacaccttccgctttgagaacaccccgctgtccgccttggtggtctacaagcgggacagtgtgaccggcgatgcgattcccggctgcctgttccaactgcgttatctgggcggcgagaccagcggctccggcggcacggtcattgggacctatcagacttcccagaacggttccttcacggtcactgggctgaaagtcggctactacatctgtgaggagctggagagcgacagcggccatgtcatcgacagtgccccccagtccttctatatctccggcaaggaccaggacattgtgaccctctatttctccaacgctcccaagggggccgttctggtcaagaaggtatcggcggcagacaactccccgctctccgatgtggagttcttggtgacaaaatcggacggctccgtagtaggcgacgccaacggcaaatttgtgacggattccactgggaccttcctagtggaaggggtggagcctgggaccacgctggtcatcaaggagatccgcgctaaggacggctatctgctggacgatacacctcagactgttcaggtcaaggagggccagaccgtcaccgtggagttccgcaaccagcctatgggaaatctcatcatccacaagctgtccagtaaggacaagaccccgctggagggggtgcagttcaagatcacctatgcggacggctcctacctcccagacgaaggcggaaagctgtcctccaacggcctgtactggaccaatgcggagggtcagatcatcctctccggcatcaccggcacagtggtcgtgaccgaagtggagagcatccccggatatactatcgacccggacacacagagtcagaccgtggtagttgacccggatgatacgcaggaactctatttttacaatgcgccggtgggcggcgtggaactcaccaaggtcaacgaggcggacaaaacagagcgcatccccaataccaccttcgagattcgtcgggtatcggatgatgtcttggtggacaccgtgaccaccgggaaggacggcagggcgtacctgtccctggagagcggcgactactatgccgtggagaccgaggctgcggatggattcaagctggacgatacgcccatctattttaccgtcaaggatggagagaccacccgcaagaccgtgaccaacaaggcgttctccggcatccacatccataaggtggacccggatggccgcggaatccccggtgtgaccttcctgctctatgacagcggcaaaaaccccatcggccagtacaccagcgacaacagaggatatgtctacatcgacgacctcacagagagcggccgctactacctgcgagaactggagaacgaggggtatgtgccggacacagagctgaaaacagtctacgtcaagagcggcaggaccaccgagatcacctgggagaacatccccatcacgggacagatccagatcatcaagaaatccgccgactacaacccgaccaacggtttgcccgcaggcacgctcctggagggggccgtgttcgagatttatgacaaggccggaaatgtagtggacaccattcggagcgacagccggggccgtgcggtttccaaacagcttcccttgtcccgctacactatccgggaggtcaaggccccagaccactacggcgtcaatgagacggaactcaccgcctacctggagcatgaggggcagatcgtccgcttcgaggtgacgaacaagagcctgaccaccggcgtggccatctctaaggcaggtcccaaggaggtggtgagcggccagccggtccgctacaccttctccggcattgccaatacctccaatgtccggctggacagtttctattggagggacaccctgcccgccgccgtgacgctggaccacattatcaccggaagctacaactcccccggtgtgtataaggtcgtctacaaggtgaacaacaccggcagctaccgcacactggcggataacctgagcaccagccagacctacaccctggccgcatcccccgcggccctgggccttgccgccaatgagcgtgtgaccgagatcatgttcgtgtttgggcaggtgccggctggtttcgcccaggtggaggccccggtcctctattgtaccgcagtcaatggcctggccgcaggcagttcctttgtcaatgtggccgacgtgggcggcgtctataacggccagtgggtacaggccgtgacccgctgggtaaccacggtctatggcaagcccaccccgctcccccgcactggctattgatccacactttgggcgtccattcttcgggatggacgcccttcccttataccttaaaatataacatcttatagtaaaaagtaaaggagaactgaactatgctgaagatcactgcaatcggtaacctgaccaacgacgtggaactgaaggtaaacgagaccaccggaaagccctacgccatcctgcgtatcgcctcggaccgccgctaccgggaccgggacggcaaccggctcaccgactttatctccatcaaggtacgcggccctctggcggagcgctgtgcggagttcgcctggaagggctgcaagctggccgcggtaggcgactttgagactatctgcttcgcggatgaccccgaccgccagcccggcttcctgatcaaagccaccgaggtggaatttctctcccccagacgggtggaggaggccgccatggccgccgaggagccggacagcgctgacgccgcctaatgaagaacacaggcatcgtgtaccacagcacggagcgcacgcccaccgtgctggcggagctggccggactgctcccccctctgagcggggagcagctggccgccctggaggcggacctgctgcagaatggttgctactcgccggtcatcgtcaatgaggagctggtcattgtggatgggcataaccgccagagcctgtgtgagaaacacggcatcccctacaacatggcggtgttcgcctttgacgatctgctggaggccaagcagtgggcgctggacacccagaagggccgccgcaacctggacaagtgggagttgggcaagatcgctctgaagctgaagccggacattgaggccagggcaaaggccaatatgtctgctggcggtggcgaccagaaaagtgaacacgcaagatcgggttcggcaacattgccgaacccgatctccacagtggacacccgcaaggagctggctgacacggtggggcttggggagcgcaccatgggcaaggtgatgcagatcgacgagcacgcccccgcagcggtcaaagaggcgctggacaagaaggagctgtccatccaccagggctaccagatcaccaagcaggtggagaacctgccggaggagcagcgggagcaggcggccctggaggcggtggagctggccaaggcgaaaaaggagatccaggaaaaggacgcggagattgaccgcgaggggaagatcgccggagtcttctgcaaggcgtatgaaaaggcggtcctgctggaccccacagaggaaaatgtccgaatctgggctaaatgtacccgcatgaccagggacgagatggaagatacggtgaaagagtcccgtgaattggcggaggtgtttcggaccattgccgacctcatggagcgcctcctgccggaaagggggacgctatgacggaaatgagtgtccgccagtggcaggagcggttccgtgccggggatttttcctcgaaagatcgtgccgttcagtgtgaggccgggtggtatgactggttctgccaggatgacgcgctggccggacggctccagaagttgagcaaggtggtcatggggatcaccgacccctatatcctggaccactactatgtctggttcaagaacaactgcccgctgtccggcccgctctatgatgacatacggtttgaaccgctgcatggcgaccgtagcgggaagtattttgtggtcatccgggacagtccccatgaggcccataagtggacgctttacacagggcgccatggatttgagcagccggaattcacctgtggaaacgtgcgggatatgctccgccatatcaattccatggccccagagtcctggcgtggtaatccgccgcccgaaaaagcgatgcatcctcctcaaaagaagcgaaaggaggcagagcgatgaaccgggaaaacacgggtgccaagccgactgctccgcccagactgccgccagaggcggagcaggagatcctggaggcgttgttcgagggaatggagatccattccagcgagatcgccgcgatcctgaaaaagcatggcgtgtgcggggatgtggaggccctccaagacagctaccgcaagcgcctgggccagcggctcatggccagtctccgagacgagggcggcaagcgtgaagtgctggccaacggaaaaggcagctatgtagtgctggagggctgcggcgacaggcggcagctcaagcagatccgccgccgtatccagaaccagatgaaaggactggatctctcggcgcggaaagtgtccggcaggctgacggttctggaacggctggcccgcaagtggagaagggctggttgagatggatgccaagacattctatgagcagatcgctccaaaactggacccaggtggcttcaagctgtacttcacggccaagaggatgactggctttgatctatatgggcagttcccttatgaggatgcccgcgggatgttcgaaatgatgaacggccaccagctcatgcgctatctgctggcggatcagttccatgcggttcagtgggagatcgtgcctggaacctgctatgaacgggctgtccttctccccctcgaccgcaccacgccggcatatcgggcattcgagcagaagctgtacacagcggtcctgcacgactaccatctgaatcctcagaaacaacatgatcggaaggagcacagtaccagatgaaagatgtaattgtgatcggcgtggatcatggctacgcagccatgaaaactgtacacttttcgttccccactggattggtggagtacgaacatgagccgtacacccagaaagacgtactggagtacaacggcagatattatgtggtgggcagcggccgccagccgcttcagagggataagacccagacggaggactactatctgctcaccctggcagccatcgccaaggaactggagcatcggggtgcggagcacaccgccagcgtccacctggccgcgggcctgcccctgaccagctttggccgggacaagaagtccttccgttcatacctgtatcgggatggaagcgctatcccttttcgctacgaggggcaggactacaccgtcaccatccaggaggtgtccctgtttccccagggctatgccgccgtactgacccagacggaactgctggacgagccgtccgtcattgtggcggacattggcggctggacggtggatctgatgcggctggataaccgcatccccaacgccgcttcctgccggagcctggaacttggcatgatccgctgcattgacgagatcagcgaacaggtgcgccggttgttcgggctgtccatgacgaccgctcagatcgaaagcgccctgcggggcagttccggcgggatggacgagcggatcagagcggtcatccacacccaggcgggcaagtacgcccgaaacctgctctcggcagtcacagagagcggcctggacatccgagccatgcccgccattttcctgggcggcggagcggcgctcttaaaacgccacctttcggccacagacggcctgtgccgcccgcttatcctggacgacgtatccctgaacgccaaagggtatgagcgccttgtggggcagatgtcgcggggtgtcggccatggcggataagcggcggctcaacctttctttttctctgacatcgccccagcagcgggaagcttggcgcatcctgagttccatcccagtggggcagcggacagacaccgtgtgcaggatggtctgtaaggcccatgaacaggacgccctgttgtccgccatccgggggctgatccgggaagaactgcgccatttggatctgacaacagaaaaaagccggcaggcacaggccggggacatggatgagaatgtcctcggctttcttcttgccctgcagcaggaaggagatgagatcacctgatacgctattttgatatgttcgccgggatcggcggcttccgggccggactggaccgagctggaggtttccagtgcgtcggccattgcgagatcgacaagtacgccgacgccagctaccgcgccatccacgacatccgagaggaggaacgatactatcccgacgccagaaaaatcgacccaaacgacctgcccggcttcgacctcctgtgcgggggattcccctgccaggcattttcaaatgctggccgaagaaagggatttgaagatgccagaggcactctcttctttgagattgcccgcctggctcaagccagacgacctgcgtatcttctgcttgagaacgttccaggactgcttacgcatgaccagggccggacgttttctgccatcctcgccacgcttaatgacctggggtaccgcgtggaatggatggtgcttaacagcgcggatttccgtgtcccccaggtccgaaagcgggtgttcattgtcggatatcttgatccccgatgcgccggaaaaatacttcctgtcttcggaacagacggaaaagctcttatacaagtcctcggcgggccgcagggatcgagagtctatgaccccagagggaccgcctgtacacagactgccggaggtggaggaaaaggagtaaagaccgggctgtatctgatggagccggacacagcacgatcctgttttgtggatctgtgtatcggcaggccgacaccgaccgagaacgccaggtgccttaccgcacgatacagccaaactacactctgcaaccaccgcggagaacgctctggggtcctgctgatcaaagaggcaaccaaacgcggctacaaggaagcagcgataggtgatactgtcgatctggggtatgcgggcagcaacacacgccgtgggcgtgtgggccacgatatcgcacacaccctggagaccagctgcatccagggaatcgtggagcgcggcgggcgcatccgccgcctgatgccccgtgaaagccttcggctccagggatttgcggaagagcagatcgacaagatcctggcattcacctcagatgcccaggcctataagcaggccggaaacagtgtcaccgttacggtgatcgaagccattggccgccgtatcctggcggtggatgaagaaccgcggaagatgggtgatgcggcatgaccggcctgaaagaccagtgcttcggcgtagaagtggagatgaccggtatcacccgtaagcaggccgctcaagcgctggcggactactttgggaccataccgaaagccaaaggcggcgtctatgatacctggaaagtgaaggaccccacgggcaaggagtggaagctggtcagcgacgccagcattattggggagcagtggaccggaacagagtatctggaaaatgacatcaaagattttcgtgtggagctggtcacccccaagctgacctatccagaactccccaaactccaggagtgtatgcggcgcctaaagcagatcggcgccaaggtcaatgactcctgtggtatccacgttcatgtagacgccgccaaccacaaccggcagagtctgaagaacctcatcagcatcatgtactccaaagaggatcttctgtttaaagccttgcaggtaaatgaggtgcgggccatccgtttttgtaaaaaggtacgagaacctatgttgcggaaggccagggccctatctgcagaggagacaccagatctgactcagttggagcggatctggtatgagggagatgttcacaaaacggatcattacaattggacacgttattacgcgcttaacctccattcggttttttaccggggtacggtggagtggcggtgcttcaactccaccctgaaccccaatctggccaccgcctatgtgaacctctgtctcgccatgtccgcccaggccatcgcccagcgcagcaccatcatgcgcaagacccgcagcgataatgagctgtttaccttccgggtgtggctggtgcgcctgggcctcaatggcgatgagttcagggagacccgcgatctgctgctggcgcatctggatggggaccgggcctggcgcttcgacaaggacagctatgaagtcaatcgaaacaagaagaaaaaacatcgtgaggcggagaggtgaccatgaagatacgaattgatgacactatttatgaggggactggggcggagatcctggaacagctccggctggccgcctttgaccccactgagttcccggatacggagagctatctctggcagctccgcagcaacttcatccgcatgacggaccgggactgtgtcctgccgaagcacggcctggaggagcaggcacgggtactgtttggggaactggcgaaaattggtgcgctggaggtgctggaaaatggctgagggaaagctgtacttcgcctatgggagcaatatcaacctggatcagatggcccagcgctgcccagacgcccaggtggtgggaccagtcacattggagaattatgaacttctgttccacggcaatttgcggggcgccggagtggccaccatcgctcccagggaggggagcacggtacacggcctgctgtggaacatcacgccagagtgtgagcgctccctggattattatgagggttaccctcacctgtatgggaaggagccggtaacggttcatggacatgatgggcaggagcacacggttatggcctatgtgatgacggagctgtgcaaggaaccatccattccctccttttattattacaacggcatcttggagggctaccggcagaacggactgcccacagcatcgctcaagcaggcgtgggagcactgtgtggaggaggttcaccgggagacagagcggatcaaccgcagcgcctgcggccagctctcgtccagacggaagaaagaccgcgggcgataaacctcaaatcagtcaggaggcagaacctatgccaaacaaaagcatttccctatctggggaagtacatatcagcacagaacaggtttataccaccgtagacgcactggaggcgctgaaagccattggtttggcctatggcctctacagccgcgcggaagaactccgcgggcagcgcgtccatctggcggaccgggacggacataccgccctggtggtgcaggaggatttcagttgtcacgggagtccctgctgggagacggttcggactttgaccgaggacccggcagagatccagcagtacatggcctttcgggatgtgctgcgtatcattcagcagcgggatcgggaggaacggctgcccgcgaaacagcggacaggcgacagcgtccctgggcatccacccaggcaaggcggaagatcccatgagcgctgaaccgtaccagatccggaccagcggtgagcttgatgtcaacgacctgtttacgaccaaattacaggagggcgcctgtgcggcacatctgcgtggagggttcaccgatacgggcgaagtcgaaatcaccctgttaaagaagaatgaggggctggcctccccagcgttccaggcagaattgagcgttttactgggagcccttcgaggagacagcggtcctctgcgggatctctcctctatgcgggcatattgtgaagcgcatccccaggcgctcatgcgcggcagacaagccttttacgcattccgaatcgacactggcaaataccgatattatctacgatttttcccacagcgggaactccataaattctttattttctgctatcagacagaccggcttcgggaagatctccccaagccggattttcattatctgaaccggaggagaaaacatcaaaagagggaggaaagatcatggaggttttgattgtggagcccatgaagccctgctatgtgcgggagatcagcaggctgaaagatatgcaggaaatcgtaggcggccatattgaagcaatctacccattcaaggagcaggtggcgattatcgcaaacgaggagggcaaaatcctgggcctgcccttcaaccgccacctgtcagatgagcgtggagtcccgtatgacatcgtctgcgggacattttttatggccgggctgggaagtgaagattttacttctctgacagatgaccagatccggcgttataaaaagatgtttgacaataggatggtttttactgttccggcgaaagcacaagcggagaaaaatcatcccaagaaaggaaaatcacatgagagataaatacattcaaaccgcagagtctgtcaccgagggacacccggacaagctgtgcgataccatcgcggacacagttctggatgcctgcctccgcagcgacccagccgcccgtgtggcctgtgaggtcctggccacagcgggcaagatcctcgtggccggcgagatcaccgccgcggagctgccggacattcccgcccttatctgccggacggtgcgggaagcgggctatggcggctccaactacgaagtggaggtcatcacccatgaccagagcggcgatatcgccggggctgtttcccaagaggagcagaccggagctggagaccagggtatcctgtacggctacgcctgcagcgagacggacgagcttctccccctgcctgctgtgctggcccaccgcctgactcgcctgctcacccatgcccggaaaaccgggaccatccgcgggctgaagccggacggcaaggcccaagtgtccgtggagtatgtgttcggcctgcccaaccgggtcaccagcgtggtggtatcctgccagcacgacgcggacaaggacctggaggatctgcggcaggagattctggaatgcgtcatcacccccgcgctgcgggaactgcccccggatggggatacagagctcctcatcaatccctccggccgctttgtactgggaggctttgaggcggacaccggcctgatcggccgcaagctgatggtggacacctatgggggactcatcccccacggcggcggtgcgctgtccgggaaggacggcactaaggtggatcgcagcggggcctacatggctcggtacatcgccaagaatatcgtggccgcgggtctggcggaggaatgcaccgtcagcctggcctacgccatcggcagggccgatccggtggcggtggacatcgacacccgtggcaccggcgtgtactccaatgctgtgctggagcaggccgtccgggcggcctttgatctgacgcccagcggtatgatccgcgccctgaagctggaccaccccatgttcgctcagttctgtaactacggacacttcacgcacccagaggctccttgggagcagacggaccggacagagctgctggagaatgtctgccgcgcgaaagaggcaggtgtttcggaccgttgagatacctggcctcctgctccttcggtaaggacagtcttgccgccatcttattggcaaagaagcatggagagccgctggatgaggcggtctactgcgaagtcatgttcgataaaaccatttcaggagaggtcccggagcaccgggacttcatctataccaaaggcatccccgcactggagcgcatggggattaaagtgacagtgctccgcggcaaaaagacctatgtagatctgttcaccgggcgtattacccgtggccccaagaagggtatgctgcggtccttccctgtgtgtgggaagtgctatgtccagcgggactgtaagctgagaccgattctaaggtaccagaaaacactgccacctgacacggtgcagtatatcggcatcgcaaaggacgagcaggaacgcctgctgcggcttgaggggcgccaggtgtccctattggaaaaatacaactgcactgaacaggacgcaaaggagctctgccggcaggcggggctcctttctccgatctatcagttcaccaaccggggcggctgctggttctgccccaacgccaagcggaaggagctgcggcacctctatgaccaccacccggagctgtgggcccgaatgctggagctgcaggccatcccaggcaaggtgacagagaagttcaaccgcacccagcgcttctccgatatcgacgcgatgtttcgggaggaggatcaggaaaacggcctccggcagaaggccgcctgaacacccaggaattgttggtatcgctgggtttgtgtctgctttttcgttgcgtatggtgatagcttttcgccgcccaaacgggtattgttgtggtcggaaacccaccccaaaatcagtaaggaggacgctctgatgaaaaaaatcgaaacccatccctcgccggaaaaactgcttcgacaggtcaccgaggaggcggtcaatgccctggccctgggcgggccggataagatcggggacgaagcccccatggaggcaggcgtgatgctgatcgccaaagcctggggcctgccccaggagagcctccaggccagcctggacctgctcgcaaaggaacggcagctccttcgcagcgagagcggcgaggacgccctgcccgacagcgaactgctggagccctacgacggcagaatgatcgtcgagctgctctggggcctgtttgagacggcaatcaagctggaggacgcccaggaccgggcggcaatgcacaagctggccctgctcatggcggagagtctgagcctggatagttggatcgcagagtgcgggccatctaaaatctgagacagaagcatacgggaggggctgtcccaaggggcggcccctcgcctgtctgtaaaaaggagatgaagcagcaatcaatcagaaatacgaactgaccgatatcgcccatgagaaatatccctttctccaccgcatccgggccctgcgggatatcgggaagaaggtaaaggccggggagctgggcggctttgtagagagcgagcgcaacctgtcctttgaggtgggagatgacgcctggatcttcgacgacgccattgcgtgtaacgatgcctatgtggacaagggctcgtccctgtttggagagtccgtcgcctgcggaaacgcctatgtttcccagaactctgccctgagcgcccatgcccgcgcggaggacgacgcctatatccgggggagtaatctctgcggccacgccagagtatccgactgcgggatggtgctggactcgccggacacaggccatgcacccattctgtccggtaccagtgctgtgtatggcagggtatgcggcgatgtgcatttaaccgataccgcgttgatcatcagcggcgaggagatctgcaacgattccctggacactctggtgatggatggaaaggggcgttccgtcatccgtgacccatccagggacgagttggcgccccaggagccggagccgcagcaaaaaggacacaaggaacgggggcagagcagatgagtaattttttcgagcaggagctccgcaagctgtttgcagacgggactatcatccgcgatccggttttcgtgggccgggcctgcctgggcagcttagacagaaaccgtcaggtgagggctgaatttgttacactgggccatgcagaccactatgcggcgctccgtctgacgctgttggacaacaatcacggcgtggtagacaagctgatccttcggttcaaagatatctgggggaaaaagaagatccctaacaacccctacctgcgggatggtgttgctccacatatttgggtggatggcgaccgaatcgattggtatgcctaccatccctcccaggaggactaccagcagctcaggcaaatagccagcgactatgtggagaccttccgtattcaagtcctgacgaagaaccatggccccaggctggtctacatctgcgcaccgctccgaggcgaactggaaaagaacatcgccttcgcaaaggagaaagcgcaggaggtgttccaggccggggatatcccgatctgtccccacctcatgttcccgcccttcgcagacccggatgaccccgcccaggaccaggcggcgcgggagatgggcctgcggctggtggagcactgccagcaggtcaatgtgtacggtactgtgcgtacaccggggatgctggcggagatccgcagggcggaggaacttaacatcccggtcaaggccgaccagccagggcttaaaaagaaaaaggaccgtcccaggcgcggccagatcagataggaggtaaaatggcagaaatcaagacagtcaccatcgacgaactgcgtcagatgaacgatcaggagggcctcatcctccagggctgcggcggggacctccaggagtgggtggatggtatcaatgagctgtttgcccaggctggtatcctacaggccggcagcgcatggaaagccaaggctgtgaggagcttccagtacgatggcctgaccaacctgctgtttccctttgcgggtgtttctctggatatgggaaggctggccatatggcggctccagacatatgaacagttcggcgggacctggctcagcgactatgtgcccaaccggctgggcggttttatccagaagcagcggcccgcaaagcccaaaatggcgctggtgggacaggacggaaatatcttcggcatcctgggccgggcctcccggctgctgaaacaggccgggcagagcaagcaggccgatgagatgtttcagcgggccaccagctccggcagctataatgaagcattgtgtatcatcagcgagtatgtggagacggagctctccaccgcgccaaaacctcaaaaatctgttcaaaagaaaggcagggatacccatgaacgataagtgggagattctccacggcgacgcgctgaagctgctgggcggctttgcccccggcgccttcgatgcggtcatcaccgacccgccttacgcctctggaggccgtacccaggcagagaagaacaagtccacggccaagaagtattccagcatgggggatcacgcgcccccgcccttcgacggggacgccaaggaccagcggtcctggacccgctgggcggcggagtggcttggcgatgccagaaagatctgcaaacccggcgcgccggtgtgtatgttcatcgactggcggcagctcccagcggccaccgacgccctccagtgggcgggctggatctggcggggcaccgctgtgtgggacaagggcaacagccgcccccagaagggccgcttccgccagcaggcggagtacatcgtctggggctccaacggggatatgcccatcagccggcccgtgccctgcctgcccggcgtgttcaagtacggcaatccccagaaccgcattcacctgaccgaaaagcccctcccgctcatgcgggacgtggtgaagatcaccgagccgggcggccatatcctggaccccttcgccggcagcggcaccacaatcctggccgccgtgctggagggctacaccgccaccggcatcgaggtcaccggcgagtatgccagacgggccagggagcggattgagcaggagctgcgccaggcggcgtgaacatggccgtcaacgctctctttcctttctgtgcggaggcgtcagggataccttcggcggctccaccacaagcccggcagtgatgcaaagctgccgaacggaggagaggacaatatcccatgtcagctcagaggcgtagctgtacctcgcacggtaagtatcccagagcttcctcatgtggggatcgttcgcaagctcccgcagaacatcctccgcctcagacagcagtcggagcgtcccacgcctcctggccgtcgcgcagagcgcgtctgccagaacccgcgccgtcagggtgccgccatagagctgacataaaatgtggagatcataaaaatcccgcatacgggtattggttgtggcgcgggaaataaccgtctccagcttctcggccaaaacagtctccaggctgtaggccaatatctcgatggcccgctcctcgaacatcaaatgaaaacggtagcgaacctctcttggcgtgattgcatcgccggtggaaatgtcaatcttaaatggggtacgcaccccatcgaacatcgtctccatggacacccgcacaccggggtactccgcctcgtccataatctcagagacactttttaaggaaaagaaaacgccatccttgaccgggacggatatgatctcggagatcatatcgctgacgtgatcgacatccactgcggcaccccggaccgtcgcgtcaatgtccatggtggagcgtgtatccagcccaaccatggccgcgaccagcatcccgcccttcaagataaaattctccctgaactgtgagagcgagacgcgctccagaaagcgctccatcatgtaattccgcatgagaagctgcgcgtctgccgcattttttcgggcgagattgttgatcaggtcttttaactgtctggatgttttaatcataacaggacctccaaatactgtctcaggatgttctctacatggaacgctccggcatagtgcatcaggcggcgcagatccctgtctctccggccggcgtaccgcctcagtgtatcccggaggacctggacatccatgccgctccggctgcgtaccacatcgcagacggtgcgctccaagtcataaaccgccaccggatttccaaatggtgtgtttgtttgcgacaggcccaggccgtgcagctccgccttgatgcggtacaccttcacgccgtcaccctttaagcggtgcggattgtatccgctttttacagtcaccgtataggcaagcggctcccggtcggtcaggtcgtggaggaaaagagcggtatcatgggaaaacacggcctgcggacagcgcaggtggagcaggtacatcccatccttccaggcatccggggcaagatagagcccgtggcctacacgctccaagcctcgttcccgcacataatttccaagcacaggcctggtgatccctgcagcaacggcatccgcagtccgcagcacaccgtttccgccgcgaaccagagcatccagaacatcgaatgcaggcatagaacgccctcctttcgtgctcatataataactcatataggcacaaaagtaaacaatgcaaacagagatgtttgagaaaaagctggaggctggccggcatattctgaccgggaagcccatcccactcatgcgggatggggaggagatcagcggtgggtatgcccgctgggccagggctgggcggtatagcagctcccgcccggaagggctgttcgtctattccagccactgtgtggggaatgggtatggccttctcgacggcgtccggatatactgtaggcgccacaactggagaaggagtgtaaaaatggaagaacagaaattgatccaaatgatccggtttgaccatgacctcgtcgtattcatcgagggatcggatgaccagcagcggcaagtgaacatctatgggtatgccatgcatcaagcagtaaacgtatgggactttgttgagtggctgtgtacgcgcaaaatgcgggcggtatttgccggaaatccctacgcattccctgatattgtgaattggctgggcgggaagctctatgcgatccgggccaactatatcctgacacacaggggcctgcttcttccctggaatgcggtggatggcggaaccgtctggaaaccgcggtattgaataccttttttctgatgacggcaaatgcagccgctatgtagcgggctttttgggcgacctgtccgatgtgaaggatattcacagccagcccctgtgtgtggggaatatggtgacgatgctccgcggtggagagccctatgaacagatgatcatcctgaaccacaagggaaaatcccagctctcacaggagcacctgaaccgtcatggtgcggttttccagaccccatttacagaggcgggcatcatgcctacccgataatagaacgccaatcctgcctcacagcctactatcccgatcagaaacgggccagggcgcctgccaagcagcctcaaaaaacagagggccaaactcggtgagggctgtctggcccggccactccgaggccgtgctccagactgcgggtggaaagggctgtttggggatagtcctgcctgttcgggaacaggaatcgctttcccgcccggtatgtggtattgtgtagctgtggaagcaacccagtataatacagattgaaacggagggaactgtatgggagtccaacgggcgatcaatggacagctcatcacatgggaagtcatcgtttacggcttcctcggtatggagcaggtggcggcacgctacaaagacccttggaaagcggcggtctattgctgtgagcacaactgcgctgaggtcaagatggccctttccgaaccggatgagccgttaccgacaaacgactaaccgcagcggccgcggcattcagtcaatgccgcggccaaccgtacaaggccgactttaaaaccctgtttacattctataaactatcgggtatcatgaaaggagaaccgcacgaggaggcaggacaatggaacagcgatataataaggaaaccggacttcccgtagatcgcgcctatctggaatgcggccttccgccttatttgcagaggtctctggatacgatgaagcgggcctgggaggcggaggacaacggagccaacgacctccacttcgacgcgtattattgtgagctccaggccgatatcaactccgcggaagtggagggagaaatcagctctgagcaggcatggtacctgcgggaaacctatttgcgcattcagcgcggagtaatctgatatgatagactttacgaatcttccaagacggaacaagacctatggcggcgccaatggcagcaagcgctctgtcatatatcaagatgagcagtatatgctgaagtttccgccgcatccgtccaggaacagggacatgagctatgccaatagctgtctgtccgagtatttgggctgccacatctttgccctggcgggcattccagtacaggaaactctgctggggacctatacctatcagggaaaagaaaagattgtagtggcatgtaaggactttacatctccgggtgttgtcctgcaggactttgcctcaatgaaaaaccaggtgattgattcggagcggaacggatacgggacagagctggacgatattctgttctccatccatgagcagccggccatagatcccaaggagctggaagaacggttttgggatatgttcattgtagacgccctgatcggcaattgggatcgacacaatggaaactggggcgtcctctatgatactgtgcgtgatatggtagccttggctccggtattcgactgcggcagctgcctgtatccgcagttggacgaggggaaaatgcaggccgtactcaatgatccacgggaaatggacttccgggtatatgagatccccctgtctggaatcaagcagcaggacaaaaaaatccggtattttgattttctgtcctctctggaatacgagggctgcaacgcggcgttgaagcgaatcggaccaaggttggatatggagcaaatctgccgtttgattgatgagacgccctgcctttcaggactccagaggaggttctacaaagagattctggcgctccgaaaggaacggatcatcgactactcgctgcagaggcttcaagagcgtgagcgaagtatgcttccaggccatacaaagaaaccgtccagagatactgagcgttaacatggctggagctgggtgttacctgtagcacccgaatcgctacaatttatcgtaagatttgggcccagggtgtgcaacagcgcaccctgggccttttgtctgcgtcaggaaatagggcaggaacggacgggaaacagccaagctgcgaccggatgggaagcacgcctcccgccttttttgtggaaaagcggtccgtccctcggaatttcaatcaatcataccgctgaaggagcagccccgccctggcggggctgggagcctcgccgcctctggcggtgaggccgcgcaagcatagcgcaaagatatcttttgcgcgcttgcaggggttgaacccctgtcccccatgccgccttcgggcggaaaatcagcggccacaggccggagaaggagtgacgatgccaaagagctacgagatatgcctgagattgtccgcagaagaaaaggaacggctggagcacagtgcccgcacctgcggtctctccaagacagcctatctccgccgccttattttggggaaggaggtcaaggcgctcccctcacaggagatcaaggccctgcgcaccgaggtgcataaaatcggcgtcaacatcaaccagattgcccgcagcgtcaacgccggaattgccaaggcggaggacgccaggcgggggctgtacctgctggaacaggtctatgagctcatgtatgaggtagcaaaaaagtaatggccatcaccaagatcctggcccggaagggccgcctggacgtgggcatccgctatgtgctcaacggggataagacccaggagcagatcctcacagcccgtctcaactgtgaccctggccatgagtgccggcagatgctggagaccaagcgggccgtgggcaaggagggcggcgtacagtattaccacctcattcagtcctttcagcccggagaggtcaccccggagttggcgctggagatcgcgcgggagtttgcggaggagcacctgcccggctaccagacggtcatcggcgtccatgtagacaaagagcacatccacgcccacatcctctttaactcggtcaacgcagataccggcgaaaagtaccacagcaatgcccagagctactaccgacagatccgggccatatcggatcgcctgtgccgggagcgcggcctgtccgttctcctccagggggagcccacccaggcggtcagctacattgagtggctgcgccggtccaggggccagcccaccttccgctccatgctggaggaggatctgcgcaccgccatagcggacgccaacgacctgggccacttcttcctgctcatggagcacatgggctacgaaatcagccacgggaaccgcctgggctttcgtctgcggggacaggagcgcttcatgatccccggcaggaaaaatccactgttcaccgaggacggcatccgggccgccattcaggggaacctgtctgccatcgaagtgggacggcggcctgccgtccagctccggccgcagtaccgcccctaccagaagtaccccaggtacaccggctttttggccctgtatgtccactatctctatctactggggaagatcggcaagcggcagtacccaccccgcatgatgccccagctccggcaggaggtcatgcgctttgagcagtaccgggaacagtttgccttcctccgggacaacggcatcacgacccggacggacatggcggccttcaccgcccgcacagaggagacgctggccaacctgatgaagcagcgcaccgtcctcaatgtgcggaggaagcggcgccggacgctttacaccgctttggcggatgcggaggccctggcccctgtcaaagagctctatgaggccggactgtccggcatggagacggagtttgcccagtacatggacgctgtggccgccctggagcagtgcggcgtccccagagaagggctgattcaggaaaaggcggagctctatgagcgactggcagagctcaaccggcagatccgggcggagcggaggaagctggccctgtgccggaagatccaaaacagcctgccccggatggagcaggaaatcgacaaagcagaagcgcgtgaaagcgaggtgagaaccaatgaacataggaggcggtgaggcggccgaccaaatggtgcgtatgctgctgtccgggacggaggtggtcattcggctgtccggctcggccctgaagaacctgctggccctcaccctggcccttgcccggaaccataagaagctctccgggaaagtcaacctggggaagatgctgcgggagacacgggatctccggcagttctccatgaccccggagcagtacaaggaatttcagcacagggcgagaaagcagaagctgttgttcgccaccgtccgggatcgggatggccgggggaagctgatcgacgtgatcctgccggtgactgaactggatcgggccaaccagattttccagcgtatgctgtaccaggaaccggaccggcagccggaagcacccaccccagagagggagcggacgaaggagcgtaccagccccgaaaagggcccgcaggagcgccagaggcaccccaagacccccacggcacggcaggacccgcagacgcccacacagggccgccagagcggccagacggccccacatcaggcagatccgccaaaaaaagagtctcggtcgggacgcggctcgcgcgatacaagaaccagctcctctaccccccaaggccaaggaactatgactgaacgcccctcagtggagggacggctcagggcttaccgggcgcagttggagcggagttccgtcccggccaaagagaaaacaaaatccaggcccaagacgagataatggcgcgtttaaaacaggcattccactcctctggggtgtgccggtctatgaccggcgcaccccagattttttgcgttttcccggaggtgaacgccactgaaacagccatcccaagcaaacaggcttcttgtctgcctgctcttttacatccccgtggtatgggcggcgctgctcatcgcccaatcgatggaaaccagccagggcccggctggcggactgctggccctgatcgccaacctgaccgcggcactccagaatcccctggaggtgcggtggacggacaagagtctcctctccattctggcctgtaccggcgcctacatcatggccctcgcgttgttgagcgcggagcagggccggatgcgggagggcgcggaacacggctctgccgcctgggcctcaccccggcaggtcaacgccatgttcgcccagaaggagaacaagctcctcacccgcaacgtccgcctggggctggacacccacaagcaccgccgctccctcaatgtcctggtcatcggcggcagcggcgcggccaagacccgaagctatgtcaagcccaacatcctggaggccaataccaactatgtggtcactgacccgaagcaggaggtgctcaccgccactggtggctggctgaagcagaacggacatgagatccgggtgctcaatctggtcaacctggagcagagcgacggctacaaccccttccgctatctgcgggacgagaaggacgccctcaagctggtgaacaatctcatccaggctaccaccccgaagggcagccatgagagtgatcccttctggaccaaggccgagacagcgctcctccaggccatcatcctcatgctgttccaggaggccccggagtatgaacagaacttctccatggtcatgcgggtactggaatacgccgaggtgaaggaggaggacgaggagtatgtctcgcccctggacctgctcttccaggccatagaacaggaccggccggacagcgtagcggtgcggcaatacaaggtctttaagatggccgcgggcaagacctccaagtccatcctcgtgtccaccgccgtccggctggcccccttcaacctgccccagatcaaggccatcaccgaccacgacgacatggatctctacaccctgggcgaaaaaaaggtggcactctacgccgtcatcccggacaacgataccacatttaattttctggtatccctgctctacgcccaggcgttccagaccctctactacagcgcggaccagacccaccacggggccctgccccgccatgtccacttcgtgctggacgagttcgccgcgatgcccctgcccggctttacccgtgagctggccaccatgcgctcccgcaacatttccgccagcaccatcatccagaacatggctcagatcaaggagctgtacaaggacagctgggagaccattcctggcaactcggacaccatcctctacctgggcggcaacgaggccagcacccacaagtacatctccgaggcgctgggcaaggccaccattgacacgaggacccacggccagacgaaaggccgctccggttcctactccaccaatttccagatgagcggccgggagctgctcaccccggatgaagtgcgcggcctggacaaccggtatgccatcctgttcatccgcggcgccaggccggtcatggatctgaagtacgagctcacccagcatccggccatccgccacaccgtggacggcggcgggccgccctatattcataaagggaaacaagcgccagcgtttacaggaactcctctttttcaggcattttccgctgaagaactcaatgaaagtgaggagaatgctgcatgaaacatgatctcaaccgcaacctccagcggcgggcaaagcggctttacgccctgtttgcctgcctcgtcctgaccctgcccttcgccgtcgtccccgcctttgcggcggatgaccctctgtccgtggtcaccagcctgtccgacttcatcttttccctcatccgggccgtgggcctcatcctgctgggttacggcatcctccaggtgggcctctccctccagtcccacgacccctcccagcgctccaacggtatcctcaccatcgcgggcggcattgtaataacttttacgaaggagatcctcactctcatcaccgggggataacaagcggccgggaacgcaaatgcgttcccggccactcatcttcacaaaatgttttgatagttccgccgcccatagaggatgcgctggatctgcaccgtttgtcctgagatggtataaaagaccagataattctccacgatgagatagcggtatcctttggcggccagggccagatcacgggggcgcggacaccgttccggcatatgagacaggccgccgatctcctccgtcagcttgtcatagtaccgcagagcggtctctggggagagcgtgttcagatagtcgatgatctccagaagatcctgctttgcggtggaaaagatttttacctcatacttttccatggacgcgctccctcagctgacgggccactgcaaggaaatcttccccctccgcgccggcggagatctcctgctccgccacggccagctttccgtaaaggtcgatgagcgcctgctgccgctcatactcctccatactgaggactaccatgtcgccgctgccgttgcgggtgatatagaccggctcatgggtctggcggcaaaaatcagatatctcgttggcattgttgcgcaggtcggaaatcggacgaatggtcggcatgacagccacctccttataggaatagtatagcaaaattatgagcaaatatcaaatgaaatttagagtgaatcgaggtgatcaaaatcggcagtggaaactggatcgtcgacaacttaaattccgctctggagacctggaacggcaagctcacggagatctggcagctcatcagcaccacaccggaggagttcaagggcggcggggtctggaatgtgatcgtcaatatcaacggcgcactccaggccatcggctacgccctcctggtgctgttttttgtgatgggcgtggtcaagacctgcggcagctttaccgagctgaagaagccggaaatggccttcaaatgctttgtccgttttattctggcccaagccgcggtaatgtatgggatggagctcatgaccgccctgttccgtgttgcccaaggcatgatctccaccatcatggactcgtctggcctggcggatctaagcgccaccacactgccggacgagatggtggccatcattgagagcgtggggttgatcgagagcatccccctgtgggccatcactctgctgggctccctgtttatctgggtgctggccctggtcatgattctgaccgtctacagccgttttttcaaactctatattgcgacggctatcgcacctgtaccgctggccagctttgcaggacagccctccagcaacatcggcgtggcctttttgaaaagctacaccgccatctgcctggagggctgtgtgattgtattggcctgtgtgattttctccgccttcgcctcgaccccgcccgccatagcggacagctctctcgctccagccaccattgtgtggaactatgttggcgaactgattttcaatatgctggtgctggtgggggccatcaagatgagcgaccggctcatccgggagctgatgggcctgtaaacattacagttcctccgtatccactatggatgtccccgccgccctggcctgccgtacacgctggacaagccgcttcgctgcggcgtgctcagccagtgcatcccccagaacttcagccgccttccgcaccagcgtcaccacccaagagagggcggctgcgccgaccaggaggagaaggatgccgtccgcaagcgccgtgtgggcctgataccagccgtggaacacggtgagcatcagcagcacatacacaagcgggattcccagccggagccggatcgccagactcagcagtaagggcaggaggcacagccccgccccaagcatcaaaaccaccatcgccacaacctcccttttttgtttgtggcatattagcatagacagacagcttttgcaaccgtctgtctgccaattcttaaaaccggaggtgagttcactggaggtacgcatcaacaaggaagtacgggactatcaggagagcttgttttttggcctcaccctgcggcagtttattttcgccctgctggccgtcgccgtggccgtgggcatctacttcggcctgcgcccggtactgggcagcgaggttggctgggtgtgtgtcctggccgcctttccctttgccctgggcggcttttttcggtataacagcatgacctttgaacagtttatcctggctgtgatccgctccgagctgctctatccgaagcggctcgtattcaaatcggaccacctgtatgccaaagccttggaaaattcaacgctgaaggaggctctcaagcttgattaaaaccctgctgaccacgttaaagcaggacaaagagacattcgaggtgccgaaatccgtacaggacgccatccccatccgccgcctctggccggatgggatttttcaattcggaagcaaattctccaagaccctgcggttcagcgacatcaactacgccatcgcatccaaagaggacaagacggccatgttcctggactactccgagctgctcaacgcgctggatgccgggtccaccaccaagatcaccatcaacaataagcgggtcaaccgggaggactttgaacgggagatcctgctgccccggcaggatgacgcgctggacggctaccgggccgagtacaacgccatgctcatggacaaggtcaccgactcctccaacagcgtggcccaggagcggtatatcaccctgtccgtccaccgcaagagcgtggaagaggcccgcaccttcaacagcgtggcccaggagcggtatatcaccctgtccgtccaccgcaagagcgtggaagaggcccgcaccttctttgaccgggtggtacacgatgtgacctcccggctgaatcatctggactcccacagcgaggagctggacacggtggagcgcctgcgggtgctccacgacttctaccgcgccggcgaggagacggagtaccgcctggatctgcgggagtgtatgcgccgcggccactccttcaaggacgctgtctgcccggacagcctggaatttaagaaggaccacttcgtcatggggaacaagtatggccgggtgctgttcctcaaggagtacgccagctacatcaaggactccatgatcaacgagctgaccggcctgaaccggaacctgatgctgtccatcgacatcatccccgtcccaaccgacgaggccgtgcgggagctgcagaaccgcctgctgggggtggagaccaatgtgaccaactggcagcgccggcagaacagcaacaacaacttctccgccattgttccctatgacctggagcagcagcggaaggagacccgcgagatgctggacgacctgaccacccgtgaccagcggatgctgttcgcggtggtgacgctggtgcatctggcggacagtaagaaggagctggacagcgacacagaggccctccagtccatcgtccggaaacacctgtgccagctcgcccctctgagctggcagcaggcggacggcctcgtcacggctctgcccctgggcctgcggcggatcagcgccctgcgcaccctcaccaccgaggccctggccgtcctcatgcccttcaaggcccaggagatccgccaccagggcggcgtgtactatggacagaatgtcatcagccggaacctcatcctggccaaccggaaggagctgctcaacggcaacgggtttgtcctgggcgtctccggctccggcaagtccttcaccgccaagcgtgagctggcggcgctggccctggccaccaacgacgatattatttgtatcgacccggaatcggagtaccggcccatcattgaagggctgggcggcgaggtggtcaatatctccgcgacttcgcccaaccacatcaacgccatggacatggagcagggttacggcgacggggagaacccggtggtgctcaagtccgagtttcttctctcgctgtgtgagcagctcatgggcagccgccagctctccgccaaggagaagtccatcatcgaccgctgcacggcccagtgctaccacggctacatccggggcgggtaccagggcagcgtccccaccctgcgggatttccacgcggaactgctccgccagccggagccagaggctcgcgacgtggccctggccattgagctgttcaccgagggcagcctgaataccttcgccaagcccaccaatgtggacaccagctcccgcatcctctgctacgacatccgggatctgggcaagcagctcctccccgtggggatgctggtggtgctggacagcgtgttcaaccgcatcatccgcaaccgcaggctgggcaggagcacctgggtctatattgatgagatctatgtgcgtccggaagccgcctgaagcaacgcaggcagcgcgggactatgcaaattccacctttggcaagtggaagggaaaatgtgaaatctgaaaccctgtcatcatccggcttacccgcaagagaaatcccaaggggaacacagcacgccggaaaaggcataagtcagccagtcatcacgctgcgactgagtgccaagatgaaaagttctgcatgaggatgaaagccaaactgcctgaacgatagtcagaggagcgttatcgtccgccacggcgaaaagatgactatatgcgccgtgtgatatgggcaagtggtgaaggtaaatcgccaaatgcgtacacatccatatcagccgcccgcagtcagcgggaaatgacggaagtcgcatccgacagcagaacaggccaatttgcatagttctaaccggagatgacctaaaccggaacgctggaaacagctatggcctgggcctgaatatccggcacggtcacggagccaccatagtagtccgagggcgttaatggcgtccacatggcgaagggtggcagtttatcccctgatactgaaaaggaaaggtgcgtgaggcactatgagaagtccacagacagtattggaaaccctacgaaagcacgcgcagaaagcgcattaccagtatgagcgtctttaccgcaacctgtataaccctcagctctaccttctggcctatcagaacctatatgcgaacaaggggagtacgacggctggagcagatggcgctaccctcagcggtatgagcctgaagcgaattgagtccctgattaaaaaactgcgggaccgcagttatcaaccccaccccgccaggaggcagtacatccccaagaaaagtggaaacgggctgcgcccgctgggtatcccggcggcagacgacaaactggtacaagaagccgttcgcatgattttagaaagcatctatgaaccgacctttcaaagcacatctcatggttttcggcccggaaaaagctgtcataccgccctgtcgcagatacagaaaaccttcaccggcgtcagctggtttgtggagggcgacatcaaagggtgtttcgacaacatcgaccaccacatcctggtcaacattctgaaacgaaggataaaggacgaggctttcatagacctgatttggaagctgctccgggccgggtatctggaggactggatgaagcaccagacctacagtggcacgccgcagggctccggggtaagtccactcttggcgaatatctatatgaacgagctggacctgttcatggaaaagctccgggcgcaattcggcaagggcgacaagcggcggttcagcaacgactatgtcaatgccaaccaccactatgcgcgaaccagagaacgaaacgccaaaaaatggaacaccatgagcgaagaagaacggaaagacgccaaagtcatgcagaagaaattacaggcaatcctgctatctacccccagtcgggagccaatggaccccaactatcgcagagttctatatgtccgttacgccgatgattttctaattggcgtgattggaaataaagcggacgccgaacaaatcaagaccgccgtcagtgaatttctgaaacaggaattgaacctcaccatgtcgcctgagaaaaccctgattacccacggacatgacaaggcaagattcctgggatacgacatcaccatcagcaagaatcaggcggtcaaaaagacaaagggcggcgtaaagcgagcctataatgggcgcgttgtcctcctgcttccaaaggaaaaatggatgggtaaactgcaagagtatagggcgcttaatatacaaaaggatggcacggggaaagaaatttggatgcctgtggcaaggaacggcttgcaaaacaaagaacctattgaaatcctcgcacaattcaacggagaaatccggggtatctacaactattatcgtctggcacggaatgtatctgtcttgaacaagttttgctatgtcatggagtacagcatgtataagactatcgcaaggaaaatgcggtgctccgcagcgaaagtcaagaagaaatatacgagagaccgcatatttggcatagaatacgaaacaaaacacgggataaaacgggccgagttctaccataacggtttccggaaaagtgcgccgtctaaattagacatggacacaacgccggactatagatactccatccgacccaaggaagtcattgccagatttatgcccggatactgtgagctgtgctgtaaaaatgaactcccggttatgatttaccaggtgaagaacctgaaaagtctttccggcaacgagccctgggaacaatttatgttgaaaaagcgccgcaagacgctgattgtgtgcgaggactgctacaaaacaatcacaaattcgtagggtggataaatagagagccgtatacatcgagaggtgtaagtacggttcgggggcgagctatggaaaacccgccgccgcgaggcggtaaggcgtctatagtttagcccacttgctgttccagcatgagtacagcgccaacttcctcttcaccctctggaagcgggtacggaagtacggggcctgctgcaccggcctgacccagaatgtggacgacctgctccagtcccatacggcccgcaccatgctggccaacagcgaattcctggtcatgctcaaccaggcgagcacagaccgggcagagctggcccgcctgctcaatatctcggacaaccagctttcctacatcaccaatgtggactttggccgggggctcatcaagtgcggcagcgccatcgtgccctttatggaccatttccccaagaataacctctaccggctcatgagtacgaagccctccgaagcagatgcggcggtataatgtagaaggggcggggccctcctgggccctgccccctcttcgcgggaggtgatactccattcaaacgataaaagaaaaacccacggtacagaagcagctcaaggagaagatacaggcggcgcccaaggagctggcccggcgcgggctggaggacggcgtcgagcggctgagggggcagctccgggataccgcccagggcgggcaggcagaccgctatggcggcgaccagattgaggatgccgcggccagtggagtgcgccaggcggagcaccgtgtggaacggctgcttggaaaaggtaaaaagaagcgcggcgggtcctccgtcgacgttgccccaaatgagccgcctgccccggcagaggacaccccagcgcacctctctgccgaacagcgaccaagaatcaagacacgggaggcagtcaggccctcttcggccactccggcgcaaggacagcccgcacagacggcctccaagcctgccgtcaaaacgaagggaacctatctccaaggggaatctgtccctcccactgaaccgccctcccaagctgggcaggcggctgggcgggaacaggggcggatcgcggccagggatctggtacagcggcgtggtcggccagaggtcaaatccgcgcctcagagtgacggcagagtggcttcgtctcacaaagctggtgggaaagctgggaggaacagctgcgcttcaccgcgcccagcctccgcatcaggagcgcctgcacgtcggatatctcaaggacataccgttccaggaaagggcctgtccgtatcaaagggagatccacgccctccgcgcggcgcagtaaagaccgcggagcacacctccaggcggaccatcaagacggcgggtcaggcggctaaaacggcggagcggacggcaagagccgcccccggaaccatgcgggccgccgcagacctcacccggcacaccgcccaggcggtccgcgccacggcccagacagcggctgtaactgccaaagcagcagccagatccgccgtggcagcggccaaggccgtcattgccgccgctcaggcgttgctctccgccctcgcggcgggcggcggggtcgttcttgcgctcgtagtcgtggtgtgcctggtcggaatcctgatcgtctcacccttcggcatctttttcgcggacggcgggaacgccccggacgccgtctccccatcagcggccgtggcccagctcaaccgtgaactggtggaccggctggaggagctgcaggctggcgggacgtatgacagcgtggaggtgcatggccagcctcctggctggccggaggtgctggccgtgttcgccgcccggacagccggagcggaggacggcgtggacgtggcggtactggacccggagcgggtggaacggctgcggacggtgttctgggatatgacgaagctcactacccaggtggagaccatagaacacacaggaactggagaggacagcggatggacggagtccatcctgcacatcaccatcaccccaaggacgccggacgatatgcgggtgttctatcaattcaccgatgaccaaaatgaggcgctggacgagcttctggaaaaccgggatctcctggccgcactggcgggcgacttgatgatctccgacccggacgccaaggccctgctggccgcgctcccggaggatctgtctccagagcggcgggctgtggtggaaaccgcctgttccctggtgggcaaggtgaactacttctggggcggcaagtccctggttttaggctgggatgagcgctggggaaccattcagaaggtcactgcggcaggcagctccactaccgggacctaccggccctacgggatggattgcagtggattcgtcgattgggtattctacaatgtgacaggcggcgagtacatcataggccacgggggtggagccaccatgcagcacaattactgtgcggaaatctcctgggatgaggccctccctggggatctggtcttctacccaggcgacgagcacgtgggtattgtgggcggcagggatgagaacggagagctgctcattgtccattgcgcgttcagccaggacaacgtggtcattaccggaaagagcgggtttgtgtcgattgcgcggcccgactattacagcgaatagcatccgggcggaggcatgctccatgcctccgcccctttttatagatccatgcggcgggcgccttgcggccgcaatatgaatttgtacgaaaaagcggtcaaaagccgcgattatactaaaatcaggagttgagcgactatggcagtttttcgtgtggagcgcacccagaattacactgtgatgagcaactaccacctgcgggaccggaggctctccctcaaggcaaaggggcttctctccctcatgctctcactgccggaggattgggactacaccctctccggcctgtcccgcatcagcctggagggaaaggacgccatccgggcagccgtggtggagctggaacgggccggatatgtccagcgccgccagaccacggaccgtgacgggaagttcagctccaatgagtacatcatccgggagcggcccactccacaggagctgccgccgaaggggccgtctgcggctgatccgtcgtcggaaaacccgacggcgggaaaaccgtccacggccttcacgtcgccggagaagccaacgcaaataaagaaagactcagaaaagacgaatatagaaaatactgaattaccaagtatagaatcctttcccttctgttccacgcctcccgcgttggaagcgaaaggacgggatgcgattcccaagagagggcggagcatggatgagcgtgagatggcggcctaccgaagcatgatccaggagaacatccgctatgatgactttgtgcgggagcacccctgggatgtaggccgtctggatgagatggtggagctgatgatggagacggtctgttccaccaggagaagcattcggattgcagggaacgacatcccccaggcggtagtcaaatccaggctgctgaagctggacggtgagcatatccgctttgtatttgactgcctccagaggaataccacggagatcaggaacgtaaagcaatacctcctggcggtgctctacaatgcccccgtcaccatggagaaccactatgcctcccaggtcaaccacgacctttatgggaaagcagcgtaatccaatataaatttctcattcatttccatgcagggtaggcttccgtaccagaacatggctgctgcacaatttttgtgcgtgtttatacatctgcatcagattcttttggggaaacagcatttgaaatctttcttttccgtccagaacgactctttttagaggccaaaacgattttgaaatacaccattttgctctctacaaactatatcttaaacccacacactaaatattagcgattctgtatcactgaatcgtttcaccctatactaatcatgaacaatgtaggaaatggtataggagagtgaggcaagcaggatgattgataagcgtgttggaaagcggatcaaacagcgcagagaacaactcggtttgacacaggaacagtttgcggaaaaacttggtgtggcgactaactatatctcgacgattgagcgcggagcctcgtttccacgctatgaaaagctggtggctatcatcaatgcgcttgaaacctccgctgacgcaattttctgcgatgtggtcacgcactctctagagtacaaaagctatatgctgttggataaaatgagagatttgccaccagaagagcaaaaccggattttggaaacacttgattttctggttcagcagtccataaaaatgagaaagactgtgccttaaaccgcacagtctttcttttttcgacaaatttctccacattccgcctttctctcatgatactatgtattagcgatatatactaatccaaaaacacataggaggagatatcggtggaatcgaaagaccggataccccagaacttcgatgttttggacctatccagggccatgaacagcttcaaacgggagcagattcgcaaaatattagaactacccgatcatcagtctttctccgtcgtccggtggtattccccggcggaagtaaagccgatagaagcgacgtatgtcatggcgaaactttatgagccggggatcggctttatctgtatcggcgcggcctatgaacacgggcgattttgggagctcgatccattgaaggacaagccgctggaaatcgttcgtgtgttggcctggtcttatccgcccctggatgaccgtgttgatgagcttggacagctgcaatatttgagcagctagtctgccagcggtaaaaataatgatgtagtaatacaccatattctgtgatacaatgcagaaaaagaagacaggcacttgaaactgctgtacctgtcttcaatcgtccaagatatcctcaaaagaaaaatcgttcaaatccttaaagttcaaaaactcacttacggtcatgccaaatgcaagagcgattcgatggagggtacatattctggggttgaatgtcttgccatttaccaaattgtcaagagtggattggctaactccgctcatttctgataacttattgacagagatgcctctgcttttgcatagcgccaaaatcctattaacaagaatctgtgcatactgctctctcgctgctatctgaagacccccccatcgcagtttagtgtcttcatgatagcaataatcatacctcggattacccgtatacgggtaatccagcaaaattctctttcgtatacagccactgctggatgaaagtaaaatatgaccacgggcgacacctgaatgcggtctgtggcagatttcaagatataaggaggagctgcaatggaacactcggtcccaatttccgatctcccatttaatgtccacgcttttgagagtagatatgggaaaatccgctcggtggaaaagctctgtccaggcattttcagaatcctgacagttcccattcctctcgatcaatttatatgctccgacttatttgtggtaatggcagattctcccgccatcccactcactgcaaaagcctatgggataccgctggaatcatccccagaagtccttgtggtgtactgcaatgcagattattttgacaagtcccggtgggtcatgacctatgaaattgataagtatcttgtagatcataatttccctctgcccgacggagaatcattactagaagtccgggtacgggggatggaggtctgcccggagtattttggagagttcccgatcccgaccgaaactccgtggggagctccactccagcatgaccgtctggcaaatggggttttctggctgagaacagagaaagctgggtgggtcctggcgcttgcataccctatttgtgacagccttcttccggaaactgtaaagatagctgtgctcaatccatatgaccgggagaacgggattgacaagacatgcggattccgctttttcaagtatgagcagagctgcctcccgctttttcagcttttgaattgtgcccagcagccctggagcgaccggatcaatacggctgccctacaaaatgcggttctgtatgctcgggagtacaataaaaactgtatagaggcgaatcagatagcggagcttcggcacaccccgagcgccggaacctgctattatctgttcccggcggaggatgcatgatggccgtatgttcatttctgggacaccgccatatctacggccatgatgtacagcttaggctgcaggccgcagtcaaccatttggttgaagaaaatgattctgtggagtttctgctctatttatggaaatccacagagccattttatgctttgtgtctgctggccgctctgagggccaaacagtgtgcgccccaaaaagtgaccctgaccttggttgcggaccgtttagagctggaacagcgtttggcagacaaatggacccacccgctctttttcatcgcggacaggctgcttccgctttccgtatccaaagacagaaatccactcaaagtcctaaaaagaactgtccaatggatggtcaagcagtctactcacgtcatcaatggcttttatgaagacctttttgatcgggatgatttcgtccttaattccgcaaggaatgctggagttcagatcatcaatgtcacagcaccagagctggagcaggttatccttgccagttctgagcaattacccgagcggcaacgtcttgtttttcaaatgcgaaagtcaggatacacacagaaagagattgcaatgcacctcaatttgactgtgtcccgtgtgcaacagattgaagctgctgttaccaaaaatcttcagaagcaactggattccataagctcctgtattcccaaaatccctcaaaagttatcggtatgtagtatttttgcgttgggcgatgccaactataaaaacctatgtgttttttcaaactgtatccgctttttaatgacgcggtatcaaattgaccaattttgtctggaggccgagaccgtccactccggatttatgttcgcactgcagcaatccataccactctatcataaaattccaacaagagctgtggcctgggatgctggttctagtgaactatatgacttgaaggccgaattctgtccgccatgtgatgccgccgaaagcattgggggtatccctgctgtcgattgccgcatcagcacgattctggagctgatggaccgctctatgttctgcatctgcgacctgtctgcctcggcctacgcccagcagatcctggcccatattccgcagacaaggcaggctgttttgctggatatcggtaaaaatacggctctccccaagtctgaggtactgggcgagtggtctaattctttacaattatcatctatattccctgaaggatatatactaaataatagcaaagaaaaatcgggggctttctgaacggctccagtcatggagagaaattcaatgaaaagtatctatcagctcacggcattgatcggcaataaatcggacgggatcaatgacgaaaaatttatgaccgcagcgtggattctctatgcctggatgcgccgggaggtcatcgactgcattccgctcccggagcttccggcgaccgtaagtaaatcagcaaaaacagggcggtctgttgcggccatctaccagccggaagagcacttctttaccctccgctcctccgtgtttgagaacggcatccgggacaccgtcgaggccgagatcatgccataccgccaaagtctgcttcttgcggtccgggagaccgcttttctccgggagcccggtgccaaagcgaagcccgcgtccggaccgctggcatttgtgggccaactgatagatgaggtgggcctgaatgatggccgccagctttcgacaggccttcagcgtattaccacacaacaggttggcgagctggccgactttttgtgtgccccagaccgatggttgccagttgttgtggtctcctaggccaaaaaccccgcgcttgggcaaaatggatatttggttgacggtcgcgagctggcctcagatctggctggcagctcccatgtaatggtcatcgactgggacgtgacctatgagttcagccggatcgttggggatgaatggtcctgcttcggcggcgctgtccgtatctactggcccgggctgtttgactttgaaacggatgacccctatgtccatccactttacacagcacagaccatccggcgcaatttttaccccagctagtttgagaaagaactgaaaaagataattcgggcccgaaatgccgagcaagtcattgcctggaatcggtttggcatccggttttatgtggaagcagagcagatgcgtatgctctccgtcagtggagaagagagcacagaggaactgttgaaacagtgccgggagcaatgctcatgtgtggtaaagtagcacgaaaaactttgatagacagtagcccttactattcctaaaattcagagaaaatgaatagctttcttaaagtctgtatggtaaaatatgattataaacaaatcgacaaatcggaatttggtgcaacgaaacagtgtattatatagggataaaatcttatcaaaacaaaaggacagtggtctattcagttactttgagttttgccaaatagtacgaaagttttttaagctaaaaaggaaaaatagagatgggaagaaaaaatcaaaataacagaaatgaacagaataacagcgtgccgccaagtatttttttctcgagtaaaattagtagaggaatttctggggtattgatatgtttaataaatttagttgcattatattacggaataatgaattggaatagttttactcgtgaggtgctaactgacacgataaatattggctttactgttgtattagcaatcgtcgcgttagcgattaccgtatttcagacggacaaagaattgctagaaaaaaggaactcagacgagaatgtaaaaaaagtttatctttcgtatgtttttagcatatttccaactatttcagtattgatattagggtatttagtggcttatgcatttgagaattatccacatataatttgtttatattttattgcgacaattttgattttgacagaatgtattacaggaacgatggcatcatttgtagcttttttaaatataagagattaaatgatacaaagttgaattgataaaaatgtatagacgtgatatatggtatctttattggttctatgttaaatatattacatacaaaataccatcctcacagataaattcccatttatcggggggggggggagcgaagcagaaaatcgaaatttgacggaagagaaaatgaatataaaattaaatattgaaatacttatagaagaattgagaacaactattctttggggtaatgtttgcttcattttttgtatttgcaggaacttcatattcaaaacaaacgatatagcctgcattatacgaaacgctcctctgcaactccttccagaccagggccgccgcatcttccgacgtatgtctctcatacaactattcatagtctttgtccttgatatccagcggaagatcaccgccgtacaggacagtgtcccaggttcgttactccatcagtaaagccatccggtttacacttacgctagacctgctttggctgaatagttactatacactacagcaaaagtaagtgactgatattttgaatcggtcacttgcttttttactgcgttacttgttctcgcgataagcagaatttttcatgggcagataaggatagatttctgggacgatcgtgtataacagttcactagtagagcagggggctccgtccctgtgtccttcaccggtcaatgttaataattttggatactgctataatatcaggccaacgccaaatttgcctgttcccaatccgacgggggctcaggcaaagctgccacagttttagccaaatgttcttcaataatcagctggattggaggtttgacctcgtccttcttcagaatcagttcggcgatggtaaacacaaacgcgagcagcatgattcccaagccaacgcctggaatcacggacgcaatctgtgcagaagctgtgataattccaaagcgaatccccatatccgccaactccagcacaaaagatacagccagcaatatggtattgataaccgaaaccgcacgcaaagcttcggagtaatcgtacttaaacaactctgccagagacagggttgacataataaacgcataccccaacagcaacacattcatcacccgaaacgaaatctcaagacaaacgaaaaccttggaacagaaggagagctttaccttcacacccgacggatcatggatctccagggaatactgctttgacgcggaattcagccgttgggacagatcataggggttggcagggtcttgggggatcacgttcttgatggcctcaaggtctgtgcctccgtatttcagacggtaggcggcctgggtacgtacgtcagggggtgtgctggggtcaaccagttgggagaccgatctccaggtgaccgcctcccgcgccacacctacaatgcaaaagatacaggaaagaatgccttcagctttctcagcatccgtcaggctgtcccactgtgtaaagactgaactgaaagaggcgccaatcatcgcgtacatggcacagaatgtaatcttgccgaacacatttgttgccacaccgtatttgacaatagagcttaccaggtccgctgtgagcatggagaagttcagatactcctccaactggcaaagctgatcgacaataaagatatcccggtcaatctcaaggatcttttgcagctctttgaacacatcttccgggatatcggagggctggccgccagtgattttgtcatacaggtcaccgaacacgatctccataattttaaaaaaatttgcctcgctatccggcccctgaaagctgttgcccacctcagacagcgacatattgaacagttgggcataaagagccgcgccataaggcatttctacatctttgccatcgtcgtccttaaccggatcaccgtgctgtgactgccttaaaacatgcttccggctgtccaggatcgacagcatttttgcaaggtgagtgccgcggttgctgccgccgatggtttgtagctgaagcatgaccagtcggtccagcgcggcgtaatagagatcttccgcccattgctcggactgttccccataataatccttgagacgaggaaccaggctcatatagacatagcggtcgataatactcatggccacctgatagcccttttcatgctgcatcgcgcccggatgattattggccatatagtattgacagcgttctaccggcttagtcaccttcgcaaaccctttttggatatatttgttgctggaactggcgtaggaactggacaagataatatctgaaaacatcttgaggaattctactacatatttcctgcccttctcatctacttctgcttcaatctccgtaataatggcaggactgacctggatgatctgagttttggcatagtctttggtatatccgtagaggtcagcgtaggtcagctgtttgtcgctgctctccacaccggcagtatagtaggcggctaggcagcttaacagttcggtggacttttgatgcacgtgctgctgaccatccactgtcagatattggcctgggttgtctggatcctcaatctgcatctgtggaggggcagacagggtaaataaatcgtccacggaaagaggggccgtatcaaacccgttcgcaagacagttttccttcaggcgggcaacagccagcttgtccacacaaaaacgccggtcccgattttgtagtgcttgggggagcctgatatggcctgtggcggagtagttgacgatctgtgacactttttcatatacaaaggcagggcgcagagaatcctcccatacagttagagaatcggcgtagcagccgctttcaaaagaggaaaggcctttcgcggagagcttccatttccccgcaagtattccgcaggaaaagatatcctgagccagtttttcctcgtcggtagaggggatggcaacaatctgggtctgcccataatctacactgccgtagtagtgatcaccgccattcttcttcaggctgtcaaccgtaatagtaatggtgcgctcccccaagtcgaacttgctgttgtatttcatccgcagtttgcccttcagggtaggagaaacctgctgcatctcccacaggtccaagttggcctggcactgttccaccttgatctcgccctctgtgaccgtggtatcgcaggtgttataggtggcgtcaaacaccatgtccaactgggaaattgggaacccggctgtcatatccttgtagccgctggagtcaatcacaatatggagcaggccttgcttggtgacatccaccgacataatgcgctggttgatcttctcactgtccgttttgggtacggaaatgatttccttaccattataaattactccacagtagtaatgggacctttggctggtatcgaaacaaatgccaaagcagacctccaccacagcatcggcggactttccctgctgacggtagctgatggtgtaatgctgctcggtggaggcgttatgtatttcccgtactccgtctttttggagaactacttgggccatcagcccatgatggtacagatagagagctccacgctccttttctgcctcccaatagaacatatttttggaaaaatagctctgtaccggagtgccgtccagatagagcagccctccgtagagggaaaattcccggttggccgtgtgaattttaaagcagttcatcgaaatcgtctttaaacttctcatatgcacactcctcaaaataagctgttaatccgtttggaagcaactcgtcaaaaaggtcccgttctgtttgaaacagcgtgagaaagcggcggcggcgcccggcctccatcccctcaagggcccgcatcagccgcgccagtgtaatgtcaggataattcagcagcaccaacagtccgttggcgtagtaggatttctctccactgataaaatgcaggtcatatcccgtaaaattttcctctggtttcgcttgtgccactgtaattttctctacccgcacagtcccctccagggtaaatacctggtcgccccgacgcagcagagttacattataataggagttgatctggttggattgttcgggggcaagacttttccagccctcagtagtcatcaccgcatgctccggcgacataaatggctctaactcgttgatcccgtacagggttttcagccgacggtttacaataaactcatccgaaagcacagaaataccacctgcgctgcgtactttcatacccgagcgcagactgatgatgggcttcgtcatgccatcggacatcgtaatcagagtttgggcagttacacagcctgttccggtattttccctttggctctcacagttatggatgtggttattcaaggtatattcactgcgcagattgtactgacacacaatattactgttcagccacttcagcacagcttcgcccacatcgtattcgtgatgtgtttcagtaatggcaggtacggtgtaggcctctccggcgcaaaaatagccatgggactcctgtcggatagtatagtctcgaatgttagtttgccgtttgatcgcagtggacacatcgtccttaatatcaagataaagcctgtcatcgctggcgtagctattaaaatagggagtttgagcgagtgcctcgatcaggttttgtttttcggaaggaaatgcagaatagaattccttatatcttgacggcatgtaggtttttacaaatctaaacaacaggactgccttttcccggctacctgattcgatttcaaggatagtccctaacacatagtgacttgttgtaatgatggtaaaaatttcagctttaaagtcgtctgtcaaatcactggggcttatcattttgtcgataaagcgtgtcagtacccatttacccagcgcatcgtttccgcaaagcagcgttccgattacagtgggataggatatcacgttgatgcatttgttaaagccatagtctgtaatctttgtgatggtatagcagacaagcttgaccgcaagttcactgcagctatcaggacaggggagcgtttcattttttgggaaaaatgtgcttttcaatgcttcgtcgcatcccttgaccgcttttatcagttcgtcgtgttcaaagatgttgtagctcttgcttttttccgcaaatgcggctataaactctgccgcggtcatactttcacctccggaattactcgctttttgttgtttccatggtaacatgtcccttttatgatttcaattatttttctgaaacgatggtactctgaaacacgaatatacctgtgaaaggcggtgaggcgatggagcgggaacaaacatggatcagggctatccagcggcgaaactcccgggaggcaaaggtcatctatccgggcaaccgagaaatgcatagctaaattaaaacacaagggcggaacaatacccgcccttgtgttttttcctttattttacacttagctcaggacaatgcctagggccggatagagaagtatttagttactatgcacagaatgttgctgcttataagcatggggcattgtagtcacactatttacaatagtttagtgttctattggggagtggctttgccatcaacaaatacccatagctagtggagttctttaccgaatccagctctcgctgacctcgggttttatgtccctggcctgcggctgcaggccagggacaagcaatcgggcagagtaacagttgacgtaaaaagtcattatttatacaacctatgctctttagtggcttgtatcttcaactaacataaggatatttttaaattcttgaaaacaagattggcatagccaatattgccgattttctgaaacataaccctcatgttcgtctgtgccatatggactcaatgttgtccaacagagttcgcagtgtttatgaaatcctaaatcttgaggctgtgggagcattctttctttgtgaaatacaacaccggacaaataatcttcctgcccacgagataatctccagtcttccatttctatcaaactccttctattatccaggcaagatagagccatctgggaatactctccatgatggttgtcctttgccgggggtataatcccaatgcggaccaataggcggttgatgattcaaatcaggatgccaagacttacctgttttaggatcgtaccatgatcctttatcgccgccaactggcttttggccacgccactccattccttcttctggcggagtagttggatcatcgccaggatattcaactgtaagcgaggggcggcccactttgttgggccacccctgttttctaaagaggttccttgatatacagtggaagatctccgccgtacaacgaagtgtcccatgtacccattttccgccttcttcggtaaacctatccggccctcagaacaatacccgagggccggataggggtgcttagttgctatccgtagaatgttgttgcttatataccctggccatgtctagaactacatacttttagtgtcttcctgctgtaaacccattaattctttagctttagcaccgattaattcttccgaggagcaaatactcaggtgagaacaatgctttccgtctggactaaaggaattatccgaatttcggacattgtaaatcatttcgtattcgtgatgtgttttccagacgcaaatcaaacccaccgcttgtgcaaactttctccacgaactcattcctttcaattccttgaagaaatttgcattctcatcttttgaagtaaaactatcaactctcgaaaaatgatcgacaattagtttaccaagaatctcatttgatgtagtgtatggaacaattgttgggaatccacatgtcttgtaaggcccatcccaagttcgacttccaattattagaatatctctatcttttctaaaatacagttgcaccaaatctttgtcattgtacaaaatcacttcacaaccttaataattagtttaatcccattatctgcggcataggtaaatgcatcaagcaaatctagtctttggctccatgtcagtgccttgttgggtagagctataattagtcctttcgaggtagaagccgaaactgctacggtggtaccacggtaagaaatgtcttttgtaacgtcaattaaagtatttatatcacactttagttgtttataccaagacctagctttttggtaactagttgccgtatcatagcttttaatactatatatagcatcatctgccttattccatatgtcgatacgaggaaatgtcctccctaggttatttccgagtgcatcatctacgatttgtcctcttgtaaaaacgtctttcccccaaggatttttgtttgtattgacataacttgcatcagcaatcatctccatagttgcgaagtccatgcccacactaatacctgcattaaatgcattaaatagtccattccaaaattctttatcgggatggacaggtacctggtactcttcatacagcggctcaagtgtggtatgaattatatgagatgtcgaaatagcaggcccgctagctatatatatcgtataaaattcatcttgtagctcttgcgcatttttataaattactgtatctgttagtaaaacacgcagtgcgtcatcttcaattttacctatgcctttttcgtttagctctttagcaattttttcactcaaaatattttcccaattagcccatctaaccccttcttttgctaattcatctacagttttctatccttccccacttagccatacacgaaattcctcaataacttcaccggtaggatcaatataaatcaaggagttatttttgacataaaggtattgaaccatggagatgggatcagtctgcgtcccctttaccgggtccatggagataaaccgccggttcccggcatcatagaaacgggctttggcatagtacatccccagcaccgcgtcgtactcgtggccggtgtaattcttcaccagattcagttcccgctggccgcacttgaggacggcgttgtgggtgacctcgccccactcattgtagtgggtccagctctccaccttgccgctcaccgggctggtcaggtagtctacaggagctgatgtatcgtatgttctgcataaccaggcatggcctaggaacccttgtccccgctgccgcttttttcttcgcccttgccaatatcactttgggttcctaagattgctctgtgcctgtctctggactgccgagatcgaatatcggaggacttgtgttgtcatacacgaaatacatttcaattcacctctacagcggctgggcaaaaggtgaccactcatcccaatatcataacgcctttataaaagtgcgagagaggaaaaagtgctccatttgagccccatatgattccatgcctggatgacaaatgacaggacatcagaccggacgcctggccgaggatcagactcgcctgtttcaagcacaacaaacctttctatctccggcattgtgagaaggtggtaatacggatcgtccggaggtgtgagtggagcccatcccatactatagtgacgggccctcttcacaaacagcatgccataaaaagccgccatatcgatcatggtttcatagtttgcatgaaacacatcacgcaactcatgcaaattctccggacgaatcgaacgcaggacagagtcgagctggagcagcgtagattgttcaggtatcagtgggatatgatattgagaagaaaaccgtgctgcacgttgttccggatggtccgcaagcgcttgataatcttccttcctcggctcctgaacggcatactttatcatattctgtatatagggcagaacggtatttactgtagcatcaagtgcatggcgcaacctactgtccaattcttcctgtgtttcataagacaaaggagattctcccggaaagtctgtcagtctgaaccacactctctccaggtcacggacgttgaaatcgacctctatctctttttcaaaacgatgcgccacgcgcgccacatgataagtgatacaaattcccgcttcatcattcctataacaatacgagccttggccgccgaccacccttctgtacccaagcgaaagcagcagcggttccaactctttttcaatagttcgcttcattttcattttgaaatcacatccattttatattttttgtgctggccgtccgtagacggccagcacaaaaatttagaatgcaggtacaggcgagccacttccgccaggcaccagagggattgacgtaatcatgtcaaagaaattgaacgcatcttcctgcgatgtggcccaaagatccccgttcattccaatgccatgttccctgatctggagcaactcttgagaggtcagttttggagtagttgttaaaaactcaagccccagcccctcataacgataatatttactcctatccgcatatactatttaatttaaagagtttaggagaatgccttaatttacaacacatagccatgcatgtgtatgtccataaactgtctctatatcctgccggctggattcttttttttcagccaatgatacatcacgtttgcgcagatcactccgccgaagtatagccaagcacacatgatacctgcggagatctcaagaggggtattgggaaagaaaaatgcaaacacaaagttgagcactcctattggaataaatacagcacatagaaaagtccccatgaaacggccgattattccgagtagcagttcaatcctaaaaggcttttctgtaaacgcctttatgacagcgatcagggacaggacagcaaatgcaataagcgataaccatatgcaggcgtgcattctcccttttttcatgacactcctccgttgccatttattctggcatccattttgacagttcttcatgtttgtctctaggaacaaaggtgtatgtggtcgcgcccctgtatgcatagtactggatatcaataaagatagcaaagagaatgagaaaaggaatcaggataccatcctgctctgcaaaatcaatgcgagtcctcccttcatcttccatcgtaaagagcgcaatttgctttccatcttttgtaagggaatgttttctttttgagtgtccccgcaggacatagatgttttgagcaatatgaaatacatactttggtacaaagagtgactgcttagagtatccaatttcaccttctttgtattcatacatataatatggtgcacagtttaaccccagaaatctgagcggaaagtatttgattatatccgatagatttttttgagacatacttaaattttcttgttcattgtggtacaaaacgatgcttgatctaccccaaagggctcttttagcaaagccagtatatgagggatattccaaacaaacatatgtgcattctgacggcaacttatactttcttatcaatgtgatatgcattatttttcatccttgtccttaattccaactgaaatagagccgccaatcccaagtgttaagcccattttccattttccattaacaaatccaaacgaagcacctgctcctataaggtctccagtagcttctatttcgagatacttcgtgtcatttaaccatattttccatgaaccacttccctgaataagccttgcaccagcatctaaacctggcccagtaattccaattgcaacatttgcatctgctgtgacagcttgaagctcccaaccaccattttggtaatctccgccaacaacagctacaccagcaccaacttcaattaaatctatagccagaacagcattatgttttgctgacatatttggtgacctaacatctacattactgttcacgctaccctccaacgaaggctcaagcacattagctcctgcatatatcccatacccataatttccggcgttatctttttggggacccgccggagaagcaaagtgctcatatggtgcaaaatcaggttcacagttcaattgatctatataatctttctgtgacatagatgtggttgataccactcgcatattcaccaatgtacgtgtctgtttcagctcattattcaactgccgctgatcgctgtaccgcccttgtgtgtcctttccctgaacatattgaccgcccaagattactgtccaggtttgaggaccgacgctaccatctacctgcaaaccatttgcgcgctggaattcctgaacagctgcatacgttttggggccaaacgagccatccaaatctgtatagtgataatagccggcatcaatcaatatcttctgcaaattgtagacgtcattacctgttttcccgagtgtaagtaccggcttctgcgctgccgcagactttatcgaatttgtctgcggcaaagagggtaccttgccaagtacaatatcgtcatacatcagtcccatcgggtcgatataaacaagtggactattttttacatataaatattgtacaaagaaggcaggtgtggttgcatactggcttacgtcataccggctactgtccataataggatcaagagagataaatttccggttctcagcatcatagaagcgagcctttgcgtagtacatccccagcaccgagtcgtactcgtggccggtgtagttcttcaccaggtcgagctgccgctggccgcacttgagcacggcgttgtgggtaatctcgccccactcgttgtagtgggtccagctctcgatcttctggctcaccgggctggtcaggtagtccaccgtaccgcgcagatcctggtggtagtagagccgtacctggttgccgttctccataatgctccccgtgccgttctcgattccggtgatgttgacacttaggcgctcattgccatagacataccggtactccaggccgcccacctcgttctccaccagcgagtccagggtctcccgggtgtaatccgggaagaactgtttgaccacggtgatcatctggttcggcttgtggccgggcttatcatccggcttcttgtcgctgtggtcgttcttcaagggcataatccccgactctgcatccagagcagcagccgggtcgcccatggcatccagctcatccagaagagtcgtaccggcatcaggagtcggagccgcggcctgcgcctccgcatcagccccgctctcagtctctgttccttcctgagcagtcagcgcaaccgtctcagaaccgtcgtgatagccgtagctgttcttcttgatcgtccaggtctgctccaccagcgcccccaggccgttgaaggtataggcgctgctctcgctgtcggcgttgacgcccagcaccatccggttcgtctcatcgaaggtgtacgcgccgaccgtggcggtctttttgttcttcccgtactcctcctcgaccaggttgccccggccatcgtaggtatagaccgtatgctccttgcccttgctgtaggtcttttccaccagttggttgagattgttgagcttatagtcgtactggacattgttgctattggtctcataggtcaggttgcccaggctgtcatactggtaagtacggctcttgttgccgtagttctccttggccgttatcacctgatgaagctcatcgtaggtgtagaaggtctccaccgtggcctcgccggtgccgttgccccgcatatactcataggtcatgttgccgcaggcgtcatactcaaacttgttcttctgctgcttcatgtccttgccgctggggtccgtatccaggatagaaagcacctgtcccatggcgtcgtaggtgtaatcctcctgccagccgtccggatagttcatgtggaccacgcggcccatgccatcatactggtaagtggtgatgcggccatcgctctccacgacgctctccagattgcccaccagatcgtaggtcttggtgacgctggtcccgtcgggatagcccaccttggtctggttaccggtggcgtcatattcataggtgaccttgttgcccttgtggtcggtcacggcggtgatccggttgagcagatccacctcgaaggtgttggtgcccgtccagtcgtccatctgcaccagatcgccaacggcgttgtactgataggatacctctttgcccccattatagttgatatgtgtcaccatatcaagggcattataggtatattcggtcacaaatccgtccgcatcagtgacttttgcgatattaccgttgccgtcgtattccgtggtggtcacgttgcccagcgcatccacgaccttggtgacgaggccgcggccatcgtactcatacagcgtgacctcgtactcgtccacgccgtcctgcgtatccacccgatggagcgtgactttggtaagattgcccatcaggtcatactcgaaggccgccacattgcccttggcatcgatggtctggatcacatttccggcagcgtcatagacgtacttcgtggtgtggccgcccttgtccgtggaagaggtcacctggcccttgccgtcgtactcgatcttctcggtcttgccatccggagtggtggtggagatcagtcgatccagttcgtcataggtataggtggtgtcgccgtccacggtggtctttttcaccatgttgtggttgccgtcgtactcataggagatggtgtagccctcggcgtcggtctcggtagccacgtcgccgcggtctgtgtaagtataggtggtcacaccgccgcgcgggtccgtcacagtgagcacccggtccatggcatcataggtgtacttggtggaattgcccagcgcgtcgatcatctccaccacgcggtcgcaatcgtcgtagacgtacttagtcacagcgccttccgcattggtggtctggatcagacgtccgtcagcgtcataggtgttggaggacacaccgccctcggcgtcggtcatcccaacctgccggttcaggccgtcataggtataagtagtcgtgttgccccggccatctgtctcggtgagcgtattgccgttgccgtcgtaagtgtaggagtgagtgtagccctcagtgtccacatagctgctcaggcggttgagcgcgtcataggtatatgtgatgacatggccttccgcatcggtggccttgaccagattgccattggcatcgtactcggaggaggtcacgccgcccttggcatcggtgatggtgagcacccggcccagcttgtcataagtataggtagtcgtattgcccagcacatcagtctcggaagtcaaattgccattggcatcatagacgcgactggtcacgccgcccttggcatcggtgacagagatctgattgcccaccgcgtcgtaggcataggaggtcttgtaaccacgggcattggtcagctccgtcatccggccgtccaggtcatagacataggagaccacatagccctcttcgtccgtagtggtcagagtgtttccgttggcatcataggtggtagaaacatgagtcccgtccttgttatccgtaccgaccagccgtcccagagcatcatagtagaaggtgatcacatggcccatggggtcggtctcgctggtctgccggttccgggcgtcataggtatagctggtggtccggcccagcgcagtggtactggtcaggaggttgcccaccgcgtcataggtataggtggtcgtattgcccaacgggtcagtttgagaggcctgcctgccgtccttgtcataggtgtaggtccaagtattgccgttggcgtccgtctcgctgacaagctggccaatggcgtcgtagctcttggacgtggagtaatccatcgggtccacggttccgaccgcgcggccctcgttgtcataggtataggtccatgtattaccgcgggcatcggtcatagatgtggtgcggccgagcaggtcgtactcatagtgggtcacaccaccttccgcgtcggtgatcgtgctctgattgccagcggcatcataggtgtagctgctggttccgcccatgggatcggtcatagtgctcacacgatccatggcatcgtaggtgtaggaggtcttggcgccgttggcatcggtgaccgtggcaacattattgtccccatcataggtgtaggtggtcgtgaagcccatgggggtcttctgggtaagcacattgccgacagcatcataggtggtgctggtgacgccgcccatgggatcggtagttgtcaggacctggccgtttgcatcgtaggtataggaggtcacgccgcccagctcatcggtggtggtcaggacctggccgtttgcatcataggtataggaaacactggagccatcagcataggtggtcttggtcacacggccaaggacatcatattcctgtgcagtcacacggctcagcgcatcggtggaggagatggttcggttcagagaatcgaactcggaggaagaccggtttccttccggggtagtggtggagatcagatttccaagctcatcatactcatagtgcgtcgtctgcccaagcgcatccgtgctgctgaccatacggttgttggcatcgtaagcataggtcgtcttggcaccggtacggtcggtctgagaaatcaggttgccgttggcatcatactccatcaccgtgctgttccccagcgcgtctgtggttttgatgttgtttcccacgccgtcataggtgtaagaggtctcagcgccacggaaatcggtggtggaactggtgcggccggcgccgtcatagctggtggtagaagtcccgccagcggggtcggtagcggagacctggcggccatccttgtcatactcatagctccaggtgccgccattggcagtggtcatggagaccatctgaccagctgcatcgtaggtgtaggtggtggaatggccattggcatccgtggtcacagtcatgttgccgcgctcatcataggtgtaactggtgctattgccaagggcatctgtgaccttggtcgtctgattctggacattgcgctcactggttatcgtattgcccatccagtcgctctcgctggtattgaacccgtttccgtccaccacataggtttggacattcccctgcgggtcggtggtcttgaccagcttgccagcttcagtatattcataggtcgcagtattgccctgagcatcggtctgggagatcagacggccctggccgtcatattccatagtcctcttgttacccttggcatcggtgacggacgtgcaattacccatattgtcataggtataagtagtcgtgttgccctcgccgtccgtctgagagagcatattgcccttggaatcgtactcataggtagtggtgatcccacgtccgtcggtcgcgctggtgacatttcctttattgtcatagatataggtacactcagcgccgttgcggtccacgaagcgtgagaccagcttgtcctcattgtagccgtactcttctgtcgttccatccggataggtgatccgggagatattgccctcttcatcgtggtcataacgagtggtattaccttcccgatccgtttcactggtaatctggaagaggtcattgtatgtgatctgatagtcgccctcggagttgcggctctgggtgatgcggccgaactcatcgtaccagatctccaacacataaccatccgtaccggtggcagtgttatggcggttttccgtatcataggtaaagtcgaaggtaccgatatcggaggcatactgatgtacgacgcggccagtctcatcataggtattctctacatagacctgacccttgaaattctggacagtttccacgaagccatccggggtgtaggtatactgaagactgtcgccgtcgggattctgaactgagatcaaatagtctccgtcataggatagggtgattgagcggccaacgctgtcggtcacctgctccaggtttccgtccgcattataggaaaattggaacgagccagtatcattggatacctgcgaaatcagattgccatcataggcatatgtgacctgatttccgtccagatagtcaatgctttggatcaggccagcttcatcgaatgtgtagagagtcgatgtttttgtgttaagtacacggtagtagctgccatcccatgacaaagtataatcgcctgcaggctcatactgggcactgccgtcataggtcacattgaactgtatccgcttcccgccggggaaaatcatctgtgcaaagagggtatctacacgcagctcataggtgtaatttgtggaccagccataacccaaaccgtgattctgagccgcgtcagaggattcatagcagcgggtaaagggtagatcatttttcccatagagtgagaaatctgtgtactcccagctgaagctgccggtcagcagatccactggatcgggagtccgtgacagctttatccccttttcttccaggaaatactcgtatatctcctgatactcgatagaacagaaaaagtcaacaaaggagttggaatcctgttcaaaggccaggaaactattataaattcgtgcctctggggtgtctggttccaaaacgatgatgtactttttcccatcttcataagaaggacggaacgtcttttcaccatccgaaacaaggccattccataggacatagtttgtgatgattccatcctgcgttgatggatcgtcgattccaaataggctgaatgcatctcgatcgattagaacatcactttcatcgatccactggatttgttctgaacccggagcaggctcttccgatggctcctcagtgggcgcaggagcaggctcctccgacggctcctcagtgggcgcaggagcaggctcttccgacggctcctcagtgggcgcgggagcaggctcttccgacggctcctcagtgggcgcaggagcaggctcttccgacggctcctcagtgggcgcgggagcaggctcttccgacggctcctcagtgggcgcgggagcaggctcctccgacggctccttagtggacgcgggagcaggctcctccgacggctcctcagtgggcgcgggagcaggctcctccgacggctcctcagtgggcgcgggagtaggctcctccgacggctcctcagtgggcacgggagcaggctcctccgacggctcctcagtgggcacaggggcaggctcttccgtcggctcctcagtgggcacgggagcaggctcctccgacggttccccagtaggcacaggagcaggctcttctgttgcttcctcggtaggtacgtcggcgggagtttcctcggggatgatcagcttctggccttcaaagccaaatgcataatcgttgctaatcacatcatagtccgagtcgggaagctccacagcattcccgatgatatccatccattgatcatggctgatattctgccatgtaacagtttccaggtcttccacgttcggatcagccgcctctacgatgttatccgtcacacggataccagcgatcgtaccaaggcgggttccaataaatggctctggcatatcggcattttctctgtcatatgccagttcaacctgagcatagtagttttcactaccaggagtcgggtactcaatggaacatccatcctcattgagctcatagagggatagtgtaataggttgagatttctcgatcgtataagaaagccgcatccatgtgttggcgttagagaggtccacaggtgcataaaatttattattttcgccatcatatacgtattgggcaacatcaccagcagcgaggttttccaggcgcatagccttgtagtcggtgatatcaagagcgcggtctgatgccgccagggcggaaacaggcaacagtccaagaaggatcgccatagtcagggtcgaagcaacaatgcgtgagaaccgttttcgtgccttcatatgtatactcctctcatatcgttctgatagcccgacttccttgggacaccagaaactagccccctttccttttctgaatattgaaaataagttttccaaagaagtccttctatatattgtagtgggcaaaaacgcagaaatcgtgacatataatattaagaaatttgtcaaatttaatattgtaaaataagagaaagaagcaaatatgatagctcaaaatattcttttaatagtatcatttcaaaaaaatattatttaaaaaagtatatatttaaaattatgataaaaatgattattttaatcatcctaccgatagatagaaattggctatcatattatggtaggtggtgatatgatggcagactatcccaaacaattaagggagcggataaccaagtttcgggaacaaaaaggggtatcggaaagcaggatgtccagagagctgggacaaagcaaatgttatctgcagcagatatcttctggaaaaacgctgccttccatgggagcatttttcaggatatgtgaatatcttgagacgctaccgatagaattcttttgggatgacggaattgattcgatatatatgcatgagcttctggggtgtgtaaaaagtatgacaaaggaagatgccgactacttgctcatgtcggcaaaatatttgagcggccggggatatacttcaaaaaatcaaatctgatttttcaaaagcgacctggaaaggcgcaaagtgcaagcccttggaggaacattcttccggggcttgtctttctgtgtgtgtttataaaagggtgaggcttaaatgaaaaagaaaccatggaagaggttaagtcagtcagattctgaagctgtgatgcggttggtggatgaatatcagtcgagcataaaacggatcattgtatccgtcttaaaaggacaatggccagatgcagtggatgatatacttcaagatacatatgaggagatatgcagacagctcaatttgattgaggaggcagagaatcggcgcgcatatgtgtgtaagattgcagccagactggcgattcaagcgcacagaaaattagggcgggatcttccgttggacgaagacgtccctgcaccggaggatttatccttcaacctggatacgattctaccctgcagcctatctccatccgataagagattgttgaaaagagtctatgaggagcaggacaatatcgtagacattgcgaaagaattcggaaagaaggataccgcgcttcgacagcagttaaaacgggcccgcgaccgagtcaaaaagattattatgaaggaataaatttaaatagtatgtcacgttttagaaaataggacccactaataatagtgaggaggtagataagatgttgcagcggaacggtgaggacattgcttctaaaagcgtcttcaacgaagctaatttgaaagaacatcttaggggaaagaccgcagatgaactgattgaggagttggaaaaactttatgatgaggaggaactgactggggaagaatttgatccgcggattgtagagatctatattgaagccatggagaaggtaagccccccagatcctgccgctgaacgtgcgtttgatcgatcttgggcgctgttccacacgaagcatcgtgtcgaaaaagaaccttccagttctcatagagctgtaaaaattcgatggcgtatcgaagctgccgtgcttatagttattttcttatgcgtatccgctgcagcatttggttggaaggattatattattacatggaaagatgaactgtttggaacagtgccgcacataccagggactatggaacttaaggaaccgaatgtgtctggctatcgttcattgaaggaagccgttcaaaagtatactgacatttcggtcgtgcctggatggattcctcctgggtatacgattgacgagatctatgagatggaagtcgagtcagctgacgttatatcggcaacatatagagacggacagaaaagtattgttatcagagtattttgctaccgaaatacggaagatatttcggatttgtgggtagaaaaggattctggtctgtataaagacacttaccagacgcacggaattgaacatgccatctcagaaaattatggacacacgcagataatgtggagaaatggtcaatgcacatgtagtattacaggggatatttcccgagcagacgctgaaagaatgatcaattctatctatgaaaacgggggataacaatgaaaaaaagacttggaactgtacttttattagcactctttgtcatttccagtatgatgcctacctctgcagccacagcagagatctggaatgaagcaagagccagccactactttgatgcatatatgctgggcatatccgcgaagggagggggcgaaatggcggtttcgttcggtgtattcgggacagatactatggataaaattggagtatatagtctgcggattgaaagcgaaatcgcccccaacaaatggatagaagaattcactgtatacggaagcagtgatccggacactttctatgctatggatacaatacagcacggcggcgatttctattttgacggaatgccgggtgtaaaatatcgtgctgtaatggtggcatatgctaaaaatgcttccggctatgaatatagcaaggagatggcatgcacaggacggtactgtgaataaaaatatttacatttctgcaggtaaagttatatatctcgaacctttatctaatatctaagctggtcagtgcgcaaaaaacagagagtaggagtatacccctactctctgttttaatttttatatgggaaaataaagtacattaaagcaagggacaaaatatggtggggacgctcaacggcgtatgccaacgagatcaagcggctctttttgcgtccatccagctctttggtcgagttggatggacgctttttgtttgctgacataaaaaatctcgaaaaaagtttttaatccggacatgagctgtccgctttaacctgtatgattcggccatggaggtaaaagggggggagtgtgtgaggatgaacgatcggcaacagcagcttatcagcctgctgtgtcagcgtcggagtgatagcattcaaaatctggcgatggaacttggtgtctgtgagcgaacgattcgccggaatattgaagaactcacacttacttacccaatcgagactgtccgtggccgatatggcggtggggtcaggatggcagactggtactttcaggaccggccaaaactgactcccaaacaaacagcgctgctcaaacgcctagctattgggctgcatggtgaagatttagatgagatgaatcgaattctcacccactttgcttcctgaaggagcctgactacaggcctcattgttctttgacaagttcataccagcagcgcggaacaccacacagacaccagatccaatgtgcgccaagacccggaggcccctggggggcctcggcgagcgataccacagcggatcggacggccccggcaaggtcgttttctcattccctggactgaaagcagtagaggtccccggaatgtgtttgtgaaggtctgccacaccttttccgtgctgttcctaactcaccgggggagcgagctgcaaatgcggtgagatgatcagtaaccaaacaaatgatatgaggatttgaatgatggaaaaatgtaactacaggaaagaccctcaccaagatattgaccatgtcttccgggacttgctcccggctcacgggatggtggagcgtccggcacaggtggaactgagccatcagatgctggacaccatgctgaatggtagcattgccctgtgcgatgccgggacaggcattggaaaaacatacgcctatctggtagcaggggtagtgtttcggcgataccggtcacgtgccggcctgccgaaccagcccctgctgatctccacctccagcatcgcactccagggtgcgatcatccacgattaccttccgttcctctccaaagtcatgatggctgatggtatgttggacagtccgctccgagcagtgctgcggaaaggaaaatcccactacgtctgcgatgcccgcctgatgaagcggctccagaccgcgaacctggatcggaagaacccgctggcaaaagcggcactcctctccatgagagaccatttggacctggacatggcccctcatctcagcggatatgaccgtgaacggatctgtgttcctccaacgtgtgactgcggcaagactgaatgccgctatctctgctatctggatgtgtgtgcctcagagagatatgccatccaggtttgtaatcacaacctccttctggccgacgccattcaccaagggagtgggaaacgccccattctgccggatagctgcgccatcgtaatggatgaggcccacaagttgccggagaccgctcggcagatgttcggtattacactggcagcaggagaactgcatactctatgtagaaaactgcggagggagcagttcctgctggcggcggagaccttggaggacacggcagggcttctgctgtctgagatagccaagccctggagcggagacagctccttttctcatttcagcatccccctggatggggtggaacgtaccttgtcggtgatccaccgacagatccggcggatgctgactgccggcaccaggatggaactggagcgagtgctggataaaacgaagctgttctgcctgcaccagccggacatggtgtattacaccgctgaggacgagactggcggttccatgctgtgtgcctctgctacggatcttacagcacagctccggcagacgctatggcagcaggaccggcccatgatactggcttccggcacgctggcagtgggcagcaacttccggcggttcaaagaggaaactggcctgctggccgaggggagagtacgggagcatatcgcaccctctcccttcgactaccagcgaaactgtctgctgtacctgcccccaataacgcccagccaggccgacagcgattactatgacgacctggcagaacaaatcgtcaagctgttggacgcagctaacggccacgctttggggctatttacctcctacgcggccatgtccgctgtgcgtgaacggctgaaacagcgggacttgccctatcccgtgttgactctgggccggaacggcggacacacgatgtcggagtttatggctcacccaggcagtgttctgctggctgctggagcggcgtgggaaggttttgattttcctggagactgcgtatctctgctcatcctccccaggctgccgttcccgatgccggacgcagtgaaggaacaggagcggatgaaacacgccacgcttcacgattttctccgggccgtggtggtgccggagatgcagatcaaactgcgtcagggattcggacgggcgatccgcaccgagacagatacctgtgtggtcgctatcctggatgaacgtgccgggaagaatcggcgctatttccgggacgtgctgactgctttgccggaagtgccggtcacccacagcctgaaggatgtggagcggttcatacgggctgtgaagccggaaggctacttcctggagggcgtggcatgagcaacatcaaaacagaactgaaatactggatcgccctgggtattctgggacagatgtgttcagctggccttgtcaacggccaggaggcagagaccatccggcggctggcagaagagaaataccgcccggaaactgttcggggattgtaatggatattcacgcccaagtgtggtagtgttggcgttgaccaaactggcagaaaggagtcagcacgatagaatacacattttacgccgagcagacataccttctgaaggaaggatgtgtccgggccagagtgctgcctgcccaggaggcggaagcacttggctatgaggacggttatacagctcagaagccggagggcagactgtatgtagatggctttgacagcgaggccgcagccagataccatctggagggcctgacagactgcaagatcatgaattgaaaggagctgagacgatggcagcgaatgtgacctacataccgcccaaggcggcaaaaccggagcccctgcgggttgcggcttactgccgtgtcagctccgactccagtgaccagctccgctcctatgccacccagatcaaggcgtacacggagcagatcggcgcccatgcggattgggagctggtggacgtgtatgcggatgagggcctgaccgggacccggatggataaacgggaggactttcagcgcctgctggctgactgccgcaagggaaaggttgaccgggtgctgtgcaaatccatctcccgcttcgcccgaaacaccagagactgtcttgtagctctgcgggaattatccgccctgggcgtgaccgtctactttgaaaaagaaaatatcgacaccgggacgctcaccagcgaattgatggtgagcgtctccggcgctctggcccaacaggaatccatctccatctcccaaaaccagcgtatgagctatcgcagaagaatggagaagggagaatttataacctgctatgccccatatggatatgacttaaagggacaggaactggttattaatgaagaacaggcagcggttgttagatatatcttccaacaatatctcaatgggtgcagtgttgaaaggctggctcatgatttgacccaaatgaatgtcccaacagggtttgggcaatcaaagtggtgggattatcctattcgatatatcttgaagaatgaaaaatatgttggagatacgttgtgtcagaagttttatacaacagaacatctcccatttattaataaaatgaatcatggtgaacgggaacaatattacattgagaatacacatccgcccattgtgtcaagagaagtgttccaaaaggcacaggccttgctggaaaagaaatcggcaaagaatgttacacatatagctcatatattgtctcttaagatttgctgtggaaggtgtggaacttcatatatcaggcgagtttcgctgaatggatttgctacctgggtatgtcgaaagcacgatcgaaaagccgtagattgctcgaacgggagaataccagagacggagatctacgctgccttcgtccgaatgtacaacaagctcaaggaaaatgccgacattatcctggctcccgctttgaagcaattggacgatctggagactgccatgcagcgggagaaccctgctatgctggaaatcaaccgagctatcgcccaggttgccgagcagagccataacatcagcaaactgcaaaccgcagggttgctggatgcagatgcctgtgctgccaagctgagttccatccagacaaagctcacccagcttcggagagaacgccgccgcctgctggagcatgacgatattgaggacgctatcagcaggctgcatcggacggcggacaccataaaatccgggccggaacagctggatacatttgatgagagtttgttcgaagaactggtcgaacggatcattgcagagtcgcagacctgcatccgattccggctgtggggtggcgtggagctggcggagaaagttaggagggcaaaacgatgagcaagcggaaactgctttatggataccagatccaaaatggggagctgacggtggtagaagcagaggcttctgtggtggctcgtgtagcttccctttatctggagggcctgtcctatcagaaactggccgacctggtgaatcaggaacacattttgttcagcaaagaggtaccagtatgggataagcacaaagtaaagcgtctcttggagaaccctcgctacatagggcagaacggctacccaggtattctggacacggagacatttcaatgcgttcaaagccgcatccaggagaaaacagcgaaacagaccccaaaagcggaacgccagatcctcaagctggcggatcgcctacactgtgcctcctgcggctccacgctgtaccgaatgggtggcaagaaccacaggaaagacacgttgtacttgaagtgtgctcactgcggcatcagcatcaccatacaggacgagatcctgttggaggaagttatacaccaaatggaagaatgggataggccggagcagacttcctatcagccttctggagaggtcattcgcctgaccaatgcgatcaaccggggactggagcaccctgacgatctccaggaagtcatctccctgatcttacaaggggctgcagcgaggtatgcctgctgccctaacacacaggaacatacaaaccgcccgctggatgtgtgctgggaccacatccggctggcggtttctcatatcaacatatcggaagaaaatacggtgaaagtcaccttccaacaggtccaccgggaaaggacagagcatggaacagacagcacagaggcaggtacggatcataccggcaacgaaaaatgttaacgctccgctgaagggggcacagaaacaccagagggtggcagcctactgccgggtatccactgacagcgaggagcagatcaccagctacgaggcacagaaagcttactacacccagaaaatcgaggagaatccagactgggagctggccggcatctttgctgacaagggactttcggggaccagcatgaaaaagcgggaaaacttcaataagatgatcgccgcctgcaagcggggcaagatcgacaccatcctgaccaaatccctctcccgcttcgcccggaacacagtggactgcctggaaacggtgcggatgctgaaagcccacggcatcggcgtcatctttgaaaaagagaacatcaataccctcaccgagtccagcgagttcctcatcaccctgttcagcggtttcgcccaggcagaaagtgagtccctcagcaaaaatatcatctggggcaaagaggagagcaaaaaggcaggtaaggtgcccttccagtataagaaactgcttggttaccggaaagggttagacggaaagccggagatcgaaccgcaggaggcagagacagtgcggcgcatctatcggaggtacctggatggatgtagcctgtcccagatccagcaggagctggaggcggaccgtgtccccactgctcaggctgttcagcggtggtcgtatcaggtgatccgcaacatcctcaccaacgagcgttacattggggacgccatgctgggcaaaacctttatcaccgactgcatcagcaaacgggtgaagaagaacaacggagagcggggccagagctatgtggagaacaaccaccccgccatcatccccagggagctgttctaccgggtacaggaggagatgacccgacgggccagcaagcggaaggtgatgcagaaaactggcaagacggagctgggcaaatactcggccaaatacgccctctccgagctgctggtgtgcggggagtgtgggaccccctacaagcgggtgacctgggccaggaacggaaaaaagcggatcgtttggcggtgcatctcccgactggaatttggaacgaaatactgccataactcccccacactggacgaagaaaaactgcatcaggccatccaggaggccatcaacgagtttgcccaggctggaacggaagtgaaggaggatatgctgacattcactgcaatggcctggggaggcgatgccattgatggagtcagtctcatcgacctgcgtcagaaactaaaggacatcaccgcccaacaagcactgctgctggatcaggtgctggaacacatggatgacgagatcctcaatgctcagctcaaggcaatgatggacgaaaaacaggcccttcaggaacagatcgcggcagcggagcagagccagacccacaatgcagcccaggaatcccggatggcggaactgcgggagtggatggcgaaactggaggtcaaccagcagtacagcgatgaacaagtacgcatggcagtggaacggatcacagtggtggacgctgagaccatccgaatccgctttcggtatccaggggcggaactggagaaaaaactgtgatataattaggaaaaggagacaaatagaatggaactttacatcacaggagatacccacggagactttagccgttttcggcctgagagcttttatgagcaagagagactgacaaaagaagatgtcatcctggtcgccggggacttcggcggcgtgtggtacggcgacagccgggatgacgcaggactgaacttcctggactcccggccattcaccacggccttcgtgtccggcaaccatgaaaactatgacgccttggctgcctacccccaggcggagtggtacggcggcagggtgcgaacgatccgaccttcggtgctgatgctggagcgtgggcaggtgttcgacctggggggcaggacattcttcactatgggcggtgccagtagccacgacatccaggacggcatcctggagccggacgcgccggacttcctgcggctgttccagcagctcaacgcccagggctcagctttccgggtcaaccaccgctcctggtggcgggaggagctgcccagcgaggcggagtacgcccaggccagggccagcctggaccaggctgggtggacggtggactacatcctcacccactgcgctcccaccagcatccagaacgacctgctggggccgctgtccaagccagatgccctcacagactttctggaggagatcggccagcggtgccagttcaagtatcacttcttcggacattatcatggaaacaagatcatccgaaaaaaatatgtgttactgtacgagcagatcatacggctgaaatgaaaaagcatcggggatgggtacgcttgacgggcacccatccccgatcttttttcttgggaaaggagacagcctcgatgacaagacgggggttcagattgcgtcgctaaaaatgcgaaaaaaacaaaaagaaaaacgccgatcccggaaagctttgcggcacagggctttgcgggtgcatcttttttatcaacacatgacaaagtagacaaaacctgcgtataactatcgttatacgcaggttttgtcttttgttgtataaatcatataaaaatcaatcctgattattgggcgtaattacatatcgatgagaaaagcaagcagatttgaggaactagatgacttctcaaacctgcttttattgatatttaagaaagtgaggcagcttatgaaacttccgtatggctatgttttgattgatggagaaatcacagtgcaagaagaaaaggcggatgtggtccgcagcatcttcggtgcttatctcgccggagccagcctgggcaagatcgtggatctgctcgctcaaagagagatagtctctccgacgggaaaagccaagtggacaagagcggctgtggataagcttctggcaaacaaaaagtatatccccgtggttgggattgaggtatacatggacgctcagtttgagagggctcggcgctgtaacatagactacgaaaaagctgggcattctagaaagacaattagatatcagacccctccctttgtagcctgatgagactatacatagcccgtccttcctgctatactggtcaaaaggagggtgaggcatgaacgagaatgaacttcacgaacggtacatacgcctggcgtttcaatacgaatccgccatcgatgcccttctggccagaggcttggtcgatgaggaagcggccgacgcagccaaagagagattctacgatacgctgaatgaggaaaagctgcggaccactcaaaaggtcagggactatcacgagaccatcagcctgtatatgagaatgcttgcccacgatggaatggtctcgctgacagaactggcacggcagtattctgatgaatctccgggatatgtgatccaaagctggatgcgcagccggaatacattggagtttctccgccagtgggaactggagcagaatgcggagttcgatgaccaggtctgcgcggaactgatccgtcaagggcataccacttcgctgaccattacgccgactttgtgggtccgaaggactcatgctgtgggactccatgttaaacagggcaaaggtggaggcgtgcgcgcttacccggaaattgcagcggatttccggctgtggctcgatccgaaggagcggttggaaatcatcagtaaaaaactatactaatataaatatatctgtacagttcaaaggagtacactcaagaaaaaattcagtatttgtaactcggaagacctaaatggccccacccaatttgaacaggttcagactaggttgagagatttttacgagctgtgttatcagagctttgtaaacgggagaaaatcagggtacaaaacgtgtaaatagcggagtttgaaccttgccagcacggtgcaggatcatacgactatcctgtgttatttgacggaggcagaaggagttcctcttcagctgatcctctcggcttggtctacagactcagttccaggccacaaatagggattgtttttcacagaataaacagatataattttcatatacaaattccgactgtttcttcaagaatttctttttatcattttgaagtggagtgctatatgtctcttcgagctgatcagcgtgattataaaaacgccttcaagaagcattatcatgcatattccaactggcagggcaccggcagcaacctgagccgacggctcattttggcatactgcgtggaatgcggactgaaatatgaagtcatgaagcaggagtgcttgattcaaacgacagatgcacagggtgaagttaaaacagcacttggccagcatgatttgcgcaaattattgaaatgcttaaagaaagcaggaatgtataaatttccggccataaaaacgagatgtggggattcagttcacccagaagaataccaccaaatgtgcagatattgcattccaccagatgagcaatacatatccgctgtctcgaaatttgatcatacactcgaggaaattgcccaatggatcggggagggtatatagcatgaagttctatacttggaaggatgtcgaacggtattttttgctgcatcgcgcctcttgggagagcgcgattgccgccgttgatgtataccccacggatattacggtatatgcaaagccggatgcctgtgatcaagtggaagaaatcctccgggccatgtttcgatccaattatgatgtttcagagcacaaaatcaagttggatattggagatcgggaactccccgtggagattcaagaggatgatgggggttccaaaggaggaaaaatattaccgctattttccaatgtcctgtatcagtcgtcatcttatccggagcagacgccggtaaatctgtctcatccagtcattgcctttcactcctataagggtggcgttgggcggacgctgtctctgctggcatttgccaaggcgtggtcagatgtgatggaaaatcggagccctaaccgcttgttgattgtagatgcggatattgaggcccccggtatgacctggctccagcaagacacgatgaaggatacgttcagttacctggatctgctgaccctgattcaggacaacagggatatagacgaaatcgtcaatctggcttgctccaaactaaaacgctccacgatcaccatcgaaaccacctccagaaagatcgagcatatcttcctccccacctatcgctatgaggaacagctggttgatttgtacgccactccggagagcatcgcaaacagcaagggtaaagaatatatgcttgctgaagtcctctcaaggatctgtgtgcagatgggtctatgcgccgctctggtggatctccgtgccggaatcagtgaatattcgtctacacttctgttggatcccagggtaaaaaaatattttgttagctccacctctacccagtcaatcaaaggaacccaattcctgttgaggtacctgctcaagggtctcaacattacggcggacgctgtgttgcctgaaatttttctgaatatgatcccggacacactgtccagggaggaaaaaaatgatatctttgcagaactatttcagtgctatgaaacggaggaagaagtcaacgagctccctcggttcaccagcaacgtggtcacggagctgccctttgccagcgagttgattcatctgacctccttacagcagattttccagagcctgaccgggcgagggctctacctgaagctgaaggagctgattcagcagaattataaagatgcggagcagtcagtaacttcggtcatcacgaaggagagtcgtgaggaaacactgaccaaaatcaatcggatggccagcgcacaactaacagccgaaagcaatgcggatttcgatattctgatgaccacctcgctgaaatacctctcccggacgtacaacgacgtgatccccacaactgtggtgatgggcgcaaaggggtcgggaaagactttcctgtatcgaaaaatgtgcgatgccatggagtggactgccttttgcaaaagcattggggagccgattgatacctctgccaccgggctctttttaccagtaattgcttccagaaatataggtcagctcacaaaaatattgcagaaatgtatagataacgtaaatgaaaaaatctccgggtgtaaggttggaaaagggattttttcagataattctattaaaattgagcgagaaaagaaccagatcacagattggctatctttttgggagcacctgctcgccagctccgttgatccgcagttcactactttgcaagaggtcaaccaggtgctggaagtaaagaaccagaaaattatttttcttattgacggtctggaggatatcctgacccatatttccatggatgaaaatgagcaatccgcaatcagggccctgtgccaagacgtcgttgcacagatgattgcaaaatatccccatcttggtatcattgtctttatacggcgggatatggcgctttccgccgttgacgtaaacttcaagcaatttcaccaagccaatggacaggcagagttgaagtggtcttctaatgaagcactacgactggtggtatggttggtatccaaagcagatcctaaattttatgaggatatacacgaaatcgaccaggcatcgcaaaacgtaatcgaggatgcactcgaaaaattgtgggggaaaaaactcggaaagacatcgtcaaacgaggcgtattcttccagatggattttggcggcgctgtcagattttaacggacaactacaagcaagagacatcattcgatttttgaagtatgcatctgagcctcctactaaaaaaaccaattatgaagatcgtattatgatgccacctgaaatcagaacggcggtttccacgtgctccacagaaaaggtagaagaagtggaacaagaatatacgacgctcaaaccgatcctggaaaaactgaagaagctgccgctagaacacaaagtgctgccgctgttgcctgaatatgcgggcttgagtagcgaagacgaactgtatatgattcgggagggatacctgaagcgagacggagacaaattctacttgcccgagatcatccgtcatgcattgggattcaagtatgagaaaggcgctcgcccgaaggtcttggctcttacgttaaaatcatgatgcatcccatcgttcacgcagaagataatttgcgcctgaaatctatacagcgcaagaacatctggggcctctattccttcaacctctacttgcacaatgttgggctgcatagtccctgaattcatctctttgcgcctgcatcttttttgtcaacacatgacaaaaaaaataaccacaccttttggtgtggttatttttttatggataccgtgaggacttcacatactcggcagaagtgaattccgcctgcgccaaggttttggctttcggccaaaacacttgtacggcgcaaaagcgccgccggccagaaggctgcttcagcgaaatgctgaatctttttcgtatgcatatgccaagttaaaagctacattttggtcttgtactgcagggctgaaatgtagcttatttttttataaaacctccataatattggcatttacccaatgttatggaggttttgttatgttcaaataaaaagtagatgttcaactagctgctgggaaaaagtcgtcgtgcatagaacaacatacattaacaatacatttttctattgaagagtgcatgatatctgaaatagagaaaaaagagtgcttcgtatacctaactagtgtaaatcaagggtttcccaatcttttgtatcggcaatacaaaagactggaatttattgtgccagatctagagtctagaatagaacgcaacaaatctttaaaataatttattgtctgtaggaacatgcagttacgcaaaaatttgcagttatgcaaggacggtactggccggctatgtcttctagagtagtagagaagcgggattagacatgtgtttctgaacgtttgcgggtaccaaagcagtactaaattatttggcatgtgaattgcaatatgaaagagcaaaaggaaccagaaaacaatagaaatgataaggaggttaaaacattgaattttaaagagcttcaagagagagctaagggaagaaacttcgaccagatcactgtggtgagccgagacatattccaagagctggccaatctaagcttggtatttcccgttgcccctgggaaggtacgcaccgagacggaacagaaccatcctggattgacagtgggaaaacaggaaattacctatacacagatgtgcaccacaatatattaccagaatacctccttacaggtggtgcagccggtggagggagacaccatctaccagcggtatctggaccggtttggcgagggtatctgttgtgtgcgggagcgaattccaggccagatgtgggataccactttagccaagcttgagtccaagggaatcaacattgctcaacggatggaatcgcccgtctgcaaggcagcctgggtggacctcactgataccctgggcattctctttgaaatcattaccggggagagtgagacgcctgacccgaattatgtggtgcccatgcggattgcgcagatcaatattaccactccggatgtacgtaaaaccatcgaaaccattactgatttgctggagatcggcccctgggaggtggggtgccaaaataacaaaactgtagtggatcccggttttcgggtagatggaaggctgcagaatgtggacttctccttcctggtagccattctggtgtgcggcaacattgagtgggaagctatccagccggtaaaggggcccttggtttactttgattttctgaaggagcacggaattggctatcaccacatcctccgggagattccagaaaagcagtgggagagcacccttcaggactatgagagggcaggagtggaactgtcctgccagggaaaggtggggccggtaagctggtgttatatgaataccaaggataaactgggcttcttcatggaactgcgcacggattccgcaatgaccaaactgcctgatggctatctgcaatatttttacccggaacagacccgggactgagccaggatatattgtcactgcttcaaggaggaggacgaacatgtccaagtttgatatttacctgaataccgaaaagccagccgttgtggaaaagcttattgacgtttacccctttgccggtgtgtgctgcaatccccagatggtggcacggctgggacggacggactttgccaacattgtaaaggagctacgggcggctaccggtagccgcaagctcttcatccaaaccccctccaatgactatgacgggatcatgcgggatgcggaagcgattctgaagatcgcaggggaacccacaatcattaagatcccatccactacgggcggcatccgggcgatgcagaagctctctgcggatgtggatatctgtgctacacaggtcatgtctaccctccagggtatgtgtgcattgcagtccggtgtgaaatacatctccgtgttttactgcttcatgctcatgggcggagctgacgaccacggcctgtatggcggagtggatgccaaggcggtgtttgccgccctgaacaagtttatccaggtttccggcagcccggcccgtatcatggcctgtgcccccagaactccggacgaactgagctatctcatgagcacgggcgctacttccgttgcgctggatccggaggattttgagaattgctttaatgcccgcctgtttataaatttgaatcaggatgtgcggcgctcttgggaagcggtgttcggcaacgtgggcgccgacgagctgattgattaagaaaaggggagaaacaacatggaatttaagaaaaatgtactggatcgctttcgactggacggtaagacagctgtaattacgggtgcggcgggcaacatcggctatcacacggccttggcgtttgctcaggcgggcgccaatgtagccatcgtggatttgccccagtgcctggagcgctccaagcaggtcgcggaggaatttgccggcctctatgggggaaaggcggcggcctacggctgcgatttggtggatgccaaggcggtggcagagatgtttgacgccatcgagaaggaactgggcagcgtggatgtggttcacaacaatgcgggtgtgggcggggcgcttgtccccgatctggaggcctgggactccgagcataacatggatcatctggagcactggaaacaggtgctcaatatcaacctggtgagccagtacattgtggcgaccacggcggccagggtgatggtgcgggagggccatggaggcagcatcatcaacacggcctccctgacaggacacatagtgaatcaggctccccttggacatacccaagacgactcctcttacggtgtgtccaaggcgggggtgctctatttcaccaagcattttgcctcccaggtgatccagtatggcatccgggtcaattcggtttctccgggctattgctacagccccgggctccacgctggaatgtcccaggagatgctggagtgctaccagaatacccagcccattatgcgcatggcccaggtggaggagctccagggagcggtgctctacctggccagcgatgcgtctacttacaccgtcggacaggacatcctgatcgacgggggacatgccaactggtaattggaaggagaacgttctatgggaatatttaatctgcatggccgtgtggcggtggtcaccggtggtacggcaggactgggcagaggaatggccatcgcactggcccggcagggcgcggatctggctattctggccagaagaccggataagctgactgagacagccagggaaatcgagagcctgggggggcggtgcctcccggttgtgtgcgatatctcggacgaggcctcggttcagaatgcggtagaaactgtggtaaaccactacaaaaaagtggacattttggtgaacaatgctggtaatggaggaccttccatcccaaccgtcgatatgccgcaggagatttttgacaaagtggtaaatctggatttgtgctccctgttccgggtaatgaaggcatttggcaaggtgatggtggaggctggctatggacgtatcattaatattgcctccgctatgggaatggtaggaaacttgggagtgcctctggcgggctatcaggccgccaagggcggagtgatcaacttaaccagggccgccgccgccgagtgggccacccagggggtgacggtaaacaatatctgccctggcatgttcccttctgagtctaacggtgctgatttgatggaagagtcccaggcatttatcaagcgaatgactcccatgcagcgggccggcacgccaacggatctgaacaccgtaggcgacatggatgccgcagtggtgttcctggccagcgaggagtcccggtatattactggtatcaccctgccctgcgacggcgggtggacttgcgtgtagttgaagacaggcaatcaaaacaagagccagacatcttgttttgaaatgagcgggaaaaggcatggaacgatcagcgccccctgttgcaggtagacctatctgcaacggggggcgctgatatgtaagtagagcaaaattgcaatgcagaaaaaaggggataacaaaaggctgaggagtgcgaatacagcatgctcgagcttgtatacaacaaaagacggcccttaccggaacatgtcccttgccggtgttcttggagcggtgatttcacttacggacgagataatacgcagtcagggcttacaacgacagtagaacagcaggctaagcacaccgctgaggatcacggccagaccggacaaggcaatggacacatggaaaccacagaactggatagagatcccccacaggagagtgccgagcccaacccccaagtcgcctgccatcaacatggtactgttggcggtaccgcggtgattttgggggacattgtctaccgccagaagggtaagaatggggaaggaaaagccctgagccatgccgaagccgacgccgcccaggtagaaggtcgcctgactgggtgccagtgcgatcagagcgatgagggctccgctgagcaccatggcgatggacagcagagttcggtggcccaaggccctgagcagccggccggaggccaggttgctgacggtcatggacagggccgcgacgaccataaagaagctgggattggcatagccctggaggacggcgtaggtgaagataaaaatgttgcagcaggacacccccagcataacgaagaactcaataacggcagggcgcgccgcggcgggatacaaaaacttccgcaggccgtggagcgggctgacctcctggggttcccggacaacaggcggcttgccttcctcataccggcacagaaaggccagtattgcgcccagcacgccgaaggcaaaggaaaagtaaaaaatacggtcataggtgccgccgctgcctaaaatttcgatgagccagccggccacagcaatcgccagagcggtagaaacccaaaagatgcctacccccaggctgcttttctcctgaggggttacgtctatagtggcagtggacgaacccgcctgcccaatggaaaaacccgccccatgaagtccacggaagaggagcatcaggggggcaaaggggaggagcaggaagagcagggaggagatgcccatcagcagagggcccaggatcatgatgactctgcggccgaaccgatccatcagatagcctccggtagtacgggccagaataccaaatagggcgaagggcaagccgagcagaccggcgaaggaggtagagaagccacggctggcgaaaaaaagcgggatgccagaacacatcaggttctgaattagcatcagacacagcatgctgaaccagataagaataaaatatcggttaaacagtttctcttgcatcgaaaaggctctccctatgtggtaaatgtgtcagtatggaggaaacggggagcggcatagccgctccccgtttccattgctgccggaagaggcgattattccccgtagaccttgtcgggatcctgatagccggtgcgctcaccccaggccaccatgtcttcccgaatctcatcccagctccggatgggggactggagcagctcatcatgctcattggtggcatagcgatagtgatgagccatagacatgtccttttcgtcggtctgcttctcaccatagtctctggcagcgatgcgggtcatggtggagtactgctcgctgaccgtgtggagcttcagatcgttgaccagcaggcgctccagaggccgcttgcacagctgggactggatggtgcgggtctcacgggggagagtcttcagcattctggcaatctcccaggcgcggtcaataaccttgcccttgggcaccagctcgttgacccagccccagtccagggcctgctgggcagtccactggcggcaggtatacatcagatagttggcgcgcttcgtacccaggaagtgctgcatcagcataaacatgccgtcaccggccaccaggccgaaaaacaggtggtcgtcatcaaacttggcgtcctcggaggccagggtgatatcgcacagcagggcggaatcccagtggaaaccgggaccgggaatggcgccgatggtggggatgtcgatgtcgaagatcatgttcttgatcaggttggtgtcgtcgatgtactgatggtcaaagcgctctttggcgtaggtgctccagccgtgaggatccttgtccatcatccagttgtcgcccttgtgagtccaaatcagaatttcgttcttgcgatccagggagataatgcggctgagctgactcatggcgcgatgattggcgccgctccagcacatggggtggtcattggtcttcatggtgacctgaagaatgccgtcctcccggtacagatcaaagtgatccttgaaccactccctgtattcttccagttcggggagcttgacgtaatcagccataatgtctttcattgtttgtttcctcctgttcgtttttgtttgtgttcaaagctttacgcatttgcggcgtttacggcgtggtgaatcttgctggcaacggaacggcgttcaaaatagatggttgcaaagagcacaagcatcagcaggatgccctggatagcactggacagagtggagtccaccccgcagagcgtcagaccgttttcaatcatgacaatggtaaaggagccgatgagcagcttataaatccgggcgctgaagccgccggacacgctgacaccacccaggaaaatagccatctggatgcgcatctccataaactggcagagggagttggtagagccgcctacgttgacaatctgcatgatgccgaaaagcgcagccatgaagcctgagatgataaaggccgtcatacggatgcgtttgacattgatgccagtggcaatcacggtgcgctcgttctcaccgatagccctgcagtagtaaccaatcttggtgtactcaaatacataatagaagatgacgaccagcaccgccacgatggccagcttgacggggaaggtgttgaacgcgatgagcacggtgggggcgtaaatcaggttggaggccaggaaatagttcagcagaccccgcaggccgatgagcatagccaaagtcatcataaaggagggcatcttgcaccgggagttccacaggccgttgagcgcgcccaccagcatgccggtgccgatggccacggggaaaatggcccaggtgccaaggtgggaggcagccatggcgcccagagtggcagagagggcggcattggcgccgacggatagatccgtgctgcccatggcggtgacaaagagcacgccggtaccgccgatgataacgggaaaagcctggctcacaatgttggaaatattctggggagtgaccagggtgccgcgggtggcgatgaggaatacgcagaacaggatgaggaaggacagaatgggaataagcgtattgatgctgaatttctttttcatgtcatcacctcaataatggtctcttcagacagctctgcgctgcgtgggaggagcttgcagatttcgccgtccttcatgacggcgatggtgtcggccatgccaaggacttccgaaagttcatcggtgatcagcaggattgccattcccttttccttggcctcccgcagacactggtagatgtatgccttgacgccgatgtccacgccgcgggtggggcagtccacaatgagaacgtccagatccttgatgagccagcggcccaaattgaccttctgcttgttgccgccgctgagggctctcatcagctgatccacgccggtggatttaacggaaaattgctcccgcgccttggaggatgcctgatacagcttctttgggctgaggaaaccaaagcgccctttcagggtctcgaccgagggcagacagaaattgttttgaatggaggcgcccatcatcagcgcctcaccgtcgcgatccttgggcacataggccaccctgttttgaagggcctggtaagggttgccgatggaaacattgtgagtggggagggatacctcgccgctgtccaccgggagcaggccgtatgccgcctgaccgacctcacggatgccggagtcgctcagaccacagagcccaaaaatctcacccttgtgcaggtcaaaggatacgtgcttgagatggtcggtgcagacatcctgcagcgacagggccacttggtcttcgaactggggagtggtgtcgctccggtaatagtcgccttcgattttccggcccaccatacggatcttcagatcctccagggggatgtcctggctgcgttcggtggcaagcagttcgccgtctcttaggatagagacgctgtcggtgatcttcagcatctcctccagatcatgggagatcagaataatggaacggcccatctccttaaacttccggatgagttcatagagaacggtgcggttgtcgtgggagagggactgagtcaattcatccaaaatgaggatctggggatcggaggccagggcgcgggccagttccaccattttgcgcgattccacgttcatatcgccggacagccgctggaagggaatggggggaagtccccactggctcagggcctgattggcagcctcataaaccttcctgttgttgataattccgaagcgggaaaagcgcttggtattgccgaggaagacgttgattccggcgggaaggttggggacgagccccagctcctgcacgacaatggctacgccgctggaggtggcatccaatggagagcggggcttatagggcgttccgtttagaaacatttcgccggagtcgctgggctgaatgccggcaatctgggtgagcagggtggacttgccggagccattttctccggccagaccgcgtacttcgcccggccgaagctgaaagtcgatgttcttgttggcgtaggtggccccaaaccacttgttcaggcccttgacctccaggatcagattggaatcactcattttacgacccccttcacattgcgctgagctgtgatgccgaaaacgacgacgatcacacccaggaggaactcctggaaggttcccgatggaacgcccataagagtgagaatgttgaagatcatagcgataagaaatgtactgatcggaataccgatggcaatgttgatatgcttttgaagcgcctgggccagcaggacggcggccagcggctgaaatacggtgctcaggctgctcaaaccggtctgagccaccacataaccggcgtagctctccttcatgacgcctgcaaagccgaagaagaagccggccatcagtccgcccagcataagcgcgcgccgggtattgatgcccatcatctgagctacatccgcattgccgcccaccgcccgggcattgagaccgatggaggtcttgttataggtcacgtaagcgatgataaagccgattacaagcatgatatagatggctgggctgcggccgagcacccgcatctcatcggccagtccctctacccgcaggccctgagatacccgtacctgtgagtaatagccggcgatggtctcgtagaccatggtcatgccaaggcctgcaatccagggaggaatctttgtgacctggaagagcgtcatattgacggccaggcagagcacgccgaccagtacagcggcaatgaacatggggacatagccgagcgcattgcccacaatggcggaggctgtggcagccagaacaatgatggcgcccgccgacaggtcggtgatgccgcaggcaaacagatagctgaagccccaggcgacaaaggccgggacggtggctgcggaaagtataatcgtgaagttctggaaggtcagaaacttcccgtccaccaccacgttcagtaccacaagaagcgcaagggccgcgataacgatgatgatgggcagcggcttgatccggctctcgttccgggctcgggttaaggtattattcatagacagtccctccatttggcctccggatgatacgtccatgtcgtccggaagtcacagtgttaatgctggttatctcagctgatccgctcggaaatcagttcgtcaacattgcccacaaaatcgtagaagctctggtagtccacatccggattattccgatagagcagcgtatcaaaatcggctttcgtcagaagaccgccttccgccattaaattgatgaagccctgggcgttatccttggtcagcattaccaggttcatattgtcaaacagaggggcttggccgttttcatcgaggatggcatgtccgtccagacgattgatcagtagggcggcagccagagagccggcgatccactgtccgccgtttagggcggttacatcgccgttcagaatactctgggcagtttcgggactcatgtcgctgccataaagcttgtagtcagcttcagggcgggaggacatggcgctgatggtggcggacagatagtctccgccagtgcagtagatcatgtctgcatcgggataggcggtcataaagtcattagccttttggacgccttcagaggggtcagcagagtgggccacgtaaacaacctcaccgcctccagcctcaaaagtatcggtaaatccggcgatacgttggtcatggacgtagtcgcccagcgcagcggcggaaatgatagccgtctggttgccgtcagccaaacccagttcgcccatggctgcaccggcggcatattcctgggatatcacagcaccggtataatacgcattctcctgtatggcaggccaatcggcatcggcggggatattggcatggaacacgaaaggaacttcaaagttctgacatagttgggcgacggttgggaagatcgtttggctcatgcccaaaaagagcacgccatctgcgcccgaggtgagttggttctgaagatcggtgacgaccttatccaccttaaactcgttgttggccaagtcgatggacaaatctccggcagaggtctccaggggagtcagagcctcaaaaatgatgtccaaaggataggcgcctacgccccatgtgttggcggcaatgacatggccccctttaccggtagaggaggactctgcaggtggggcggcggtctgctgacagccgctgagcaatgtcagggcgaaggcaggaaccaaggcgagagacaaagcgcttttccagtgattcatgttcattctccttttccttttttgacggctgcttgctgccggttgatggacacttgatggaataagtggcaggtgggaaacccggcacattcggaataccgaccgctgtgtgcttgcggtcatggatatttgcaagaagcataccaaattgagagagcaggggagaagaggtagggaaaacccgccaacttctaagaaaaatttaatgaagatcctgtacgaaatggacagtgataaagagcagtagagggccggagtgtttgcaacgccgcaagactttgcacaaatgcaaggggagagcagctgcgctccaggagggggacagtgcgaaacgcggagcttttcggcttgcattcccgcaaaaatttgcagccatgcaagcgtcgggcatcgcagctttcaggctggtttgagaggctaaactgactggaattgccgggattgcaggaggaaaaggaaacatatcagtttattttttgcttggcatgggatttgcttaacaagagagcagcaaaaaccgcaggagcgggaccgctccattccatgtcatacagtaccatggttggatataagaaaggaagactggaaatgaaagcattgagaaagttgggtaaaggagccgagtcagtacagctgtgcgaggtggaaaagcccattccgggcccgaacgacctgctggtgaaggtaatggctgccggtatctgcggtacggatctgcacattctggccgaggagtacagtcatagtgtgcctgttaccctgggccacgaatataccggcgtagtggagcaggtgggcagcggggtcaccgatttccaggtgggggatcaggtgatctcggtgtccattgcctattcctgcggaacgtgtcactattgccgcaagggcgatccggttcactgcacacagaaggcctctatcggtgtcaatgtggatggcgccatggcggaatatatggtaattccggcagactcggcgatgaaagtacctgaacagtataagggcagcgacatcctggcgctcagcgagcccattgcctgctgtatccgggcggtgctggagaagtcggagatccacgccggagatgtggcggtggtgtccgggccgggcattatcggtttgctgtgcgtccagctggccaggctccggggtgcgcgggtgattctgagcggcaccaaggccgaccgggaacggctggaactggccaagagcctgggagcggagtgggtgtgcgacaacgccgatgatctggcggcgctcctggcccgggagacagcctacggccccgatgtgtggattgaatgctccggcgccggcccggccctgagccaggggatcagcctggtgcgcaaacagggggcctttatccaggtgggcctctatggcaagccggtacccatggacatggatatggtggtgcgcaaggagctgaaggtcaccgccggctttgcccaggcgagatcctcctgggagatcctcctgaagctgctggagggtaacagcctgatgctggagcctctggtgagcacccggctgccgctggccgactggaaggagggctttgcccagttccgggacaaaaaggggatcaagattttcctggttccctgacagccgtgcgggcagccgcgataaacaaaaggaggatatttatgacaccctatccccatctgtttaccccaattaagatcggggggcagctgatcaaaaaccgcatcttctccgcccccaccggcctcatgagctataccgcccggggccatctcacgactgagaatatggcctactatgagctgaaagccaagggcggatgcggtgtggtcaccttgggggagagcattgtccatgcggccaccggccagtcccacgaccggcagatctgtctggatgacccacatgtgcttccctctctgaccaacactgcccgggccatcacacgttatggagcggtagccaacattgagctgtcccacggcggtaagtacgccggcctggccagcatcggcggtcataaaaaagagcgccgccccgcttatggccccagccacgatatattgccttccggggaagaggttctggagatgccccagaggctgatctatgagatcctggatgcctatggcgccgcagccgatgtcgccaagcgggcggggtttggcatggtaatggtgcatgccggccacggctggctcttcaaccagttcctctcgccgttggaaaaccgccggaaggacgagttcggcggcagcctggagaaccgggcgcggttcctcctgatggccctggatcgggtgcgccaggcggtaggccccgggttccccatacaaatccgcatgaacggtgatgactttacggaaggggggctgcacctggaggactacaaggagttggcccggatggtggagagcagggtggatctgttcaatatctcctgcggcagccatgagcggcaggaactctttgtacgaacccatccctcggcgttcctggatcacggctgcaacgtatatttggcggcggccatcaaacaggtggtgtccaagccggtatcctgcgtgggtggcctgggcgacccggagcagtgtgaggagatcatcgcctccggtcaggccgatatcgtggagctgggacgggcgctgctggcggatcccttcctcccgaaaaaggcctacgcgggccagaaggaggacatcaccccctgtctgcgctgctttgtttgcttgggggagagcgtaatcaacggtacaaaccgctgttcggtgaatccggtgattggagccgagctggaggaaaaatattatgtggccccgcccctgagaaagaaaaaggttctggtggtgggcggcggccccgccggcatggaagcggcaatcacggcggcccggcgcggacatgaggtgctgctgtacgagaagacggatgcgcttgggggtgcgctgaaattcgccgaagccgtacccttcaagcaggatctgtatcgctttacccagtgccttatccgaagggtggaaagcagcggcgtgaaggttaccctgaatcaaagggtggacagggcgctggcagagaaggttcggccggatgtccttatcattgccgccggcgcccagccggtgattcccgccattccggggattgcgtcggataaggtggtgtcggtggcccaggccgaggcgaacccggacgctctgggagaacgggtggtgattctgggaggcggtttagtgggttgcgaaaccggtattcacctgggcatgaaggggaaacaggtcaccatcgtagagatgcgggatacgctggcagccgatgtgaatatgttccacggcatggcgctgggacaggagctgaacaagtatgtcaccgccgtcacgggaggaaccggcagagccgtgacggatgagggactgatttacactgaccgggaggggcaggagcacctgctgcccgctgacgcggtgctgtgcgccgtgggaatgagagcgcgtaccggtgtaatggaagagctgtggaacgtggtggatgagcaatacgttatcggagactgcgtcaagcccgctcaggtgacacaggcgatatccgatgcgtactacctggccaagagcctgtaagcgtgcaaatcggcaaaaaattgcggatgtgcaatgcgtgtggggaggaagtgcgaggctaatggcctgatctgagcgcaaaagcgggattattatgccggattccatgcgtttcctgcacaaaaaccgtaagtgcactacttggcgcgcggtttgcagtctatatgaagcgattcgggccagagacaagaagcgtcctcggaaccacaaataataaggagcgtaaattatggatcaggttattatcacagctgccctcactggcgcagtcaccccaaaggccaagaatgcgcacatccccattacgccggaagaaattgccgcggatgcctacgcctgctggaaagcgggcgcagccatggttcatctgcacatgcgggccgacgacggcctgggtgccatggacaaggagaaattccgggagaccatccggcttatccgcagccaccaggactgtgatgtcattatcaactgcacctcctccggcgcttctgccgagcatcccgccacggatgaagagcggatggcccatcaccaggagctggagggcatcgagatgggctcctatgacgccggtaccttcaactggatgcccggcggggtatttatgaatagcccgcagtttctcgagaagctgggcgacctgtatctagagcgcggcatcaagccggaggttgagatcttcgatgccggtatgctggggatcgccgattactttgcaaaacagggccacctgtctaccccctgccactatcagctttgcctgggcgtgctgggcggtatgcctgccacggtggaaaatctggtatatctggtgcgccatctgccggagaacgccacctggtcggcctttggcgtggggaagagccacctgcccatcctgtatgcggccctggccctgggcggacatatccgggtggggctcgaggacaatgtatacctcagcaagggagtgcccgccaccaatgtccaactggtggaacgggccgttcaagcggtgcgcaccttcggaaagcagcccgctacccccgctcaggccagagaaatcctgggcctgaagccgttgaaataacagaaggagaagatcacatgaaagttgttcgattggcagacgcctttgagtatccggttactggccattttgatatgcgggccctccggctgcacaacaaggaaaccagcaatacggtggactataccctgggcctgtcccacttcctgcccggcggcgggacggagtacgtggagaccggggtggagctgatctatttcatcctggagggtgagatgacggtgcgcacaaaggacgagaccatcgtacttaaaaaatacgattccatccacttcaatgtgggagatggaaaagagatccgcaatgagaccaacctccccgcctccatgctggtgattgccggtatgcccggccggggctgagccggatgattccggcatgacacttaggaagaagggaattctgtgaacaaagagcttgccaagcgattctactcggacatgtataagatccggcggttcgagcaggaggtatttgagttttataagaccggacagatggccggcctggcccacctgtatatcggcgaggaggctgtggccgccggcgcctgcgccgccattgaggcgcgggactacatcgcctctacccaccgtgggcacggccatctggtggcccggggggccgacatgggccgcatgatggcagagatcctgggaaaggaaacgggttattccaagggcaagggcggttccatgcacatcatggccatggatttgggcattctgggcgccaacggcattgtgggcggcgggattccaatggccaccggcgccggttattcggccaagtaccgcggtaccgaccaggtaaccctgtgcttcttcggtgacggcgccgccaacgagggcaccttccatgagtccatcaatatggctgccgcgtgggatctgccggtggtgtacgtcattgagaacaacctttacggcatcacggtggacagccgccgggtcaccaaagagcacgacttggccaagcgggcaatcggctatggcatccccggctataccatcgacggcaacgatgtagaaacggtctacaagacgatgcagaaggccgtcaagcacgcccgggagggtaaggggccctcgattgtggagtgcaagacctatcgccaccacggccacaacggcagcgatcccggtacctaccgtccgccggaggaggtggaggcctggaaagccagggatcctctgatcctgttccgggataagggctaccttacagagaaggagcgcaaggagatcgaggataaggtggaacaggaggttcaggcggcctgcaagtttgccgctgaaagcccctatcctgaggcgtccgagctgatggacgatatcttctgcgactgagagggaagaaaagatgagaaagatttattatcgtgacgccgtgcgggaggccctggacgaggaaatggcccgggatcccatggtgatgatgatcggcgaggacatcggcgtgggtgacggcacttggcgctgctccaagggactgtatgagaagtacggtgatctgcggatgaaggattcccccatcagcgagtccggcattgttggcatgggcatcggcatggcccttacgggcatgaggcccatcgtggagattatgttctcggactttatgctggtggctatggatcagattgtcaatcagatggccaaggtgtgctacatgtccggcggacagaaaaatgtcccgatggtcatccgaaccaccatcggcgccggccgggccgccgccgcccagcactcccagaatctgaacgcggtcatcgcccacttccccggctccaagatcgtcatcccgtccgatgcctataccgccaagggcctgctgaaatccgccatccgggacaataatcccgtgattgtggtggagcaccgcaagcactacagcgtggagtttgatatgcccgacgacggggatgaaaatctcctgcttcccatcggcaaatccgttgtggtgcatgagggcagcgatgtcaccgtggtggccaactccttccaggtgggacagtgtgtcaaggtggccaagcacctggaaaagaagaagggggtcagcgtagaggtcgttgacctgcgtactttggttccgctggacaaagagacaatcattaaatcggtaaagaagaccgggcgtctgctcattgtggacgagggctacaccagcttcggcgtggccgccgagatctgtgccgcgattcaggatgaggtgttctacgatctggatgcgcccatccagcgcctgtgtgcgcctgacgtgtccatccccttcagccccgccctggaaaaactcgtggtgcccaatgaaaacaccatcctggcggctgtagagaagctgctgtaagaaggggggaggcaaaatggcaaaagtagtggtcatgcccaagctgggctacacccaggatgagggcactatcgcggagtggcacaagcaggtgggggatcctgtcgccatcggcgaccccttctttgacgtgcacaccgacaagtcggtgatcaccgtggaagcaagctgcgccggtactctgctgaagatcgccctggaacccggcaataccgtgccggtgcttactccggtggccgtggtgggcgagcccggcgaggacgccgacgccatcctggccagccatgtgaccgccgtggtggcggacgcccaggtggaggccgactttgatgacgatgaggatgatgagcctgccgagaaggccgccgcccccgcagagatgggagagctgaagctcaccccccgggccaaaaagtacatgaaggacaatggcatcgccgctgccgatgtgtcctccattcagggaaccggattccagggggggattaccgagcgggatatcaaagccagccccctggcccgcaagctggccgagaaaaccggcgtcgatctgagtaccgtacagggtaccggcgccggagagaagattatgaagaaggacgtggagcgggccgccgcagcggcagcttcttccggctccgatgaactgcagatcgcctccgtggttccctacaagggggtgcgcaagatcatcggcgacaagctggcccattccaagtttaccgcgccgcacctctacttcaccgacgcggtggacaccaccaatcttaccgccttccgcaagcagctcaatgagaacagcgaggtgcgcatcgccgtttccgatttgctgatcatggcggcctgcaaggcgctgaagaagttccccggaatcaacgtgacgctgaaagaggatcagatcgtcacctacaagtccatcaatataggtaccgccgtggccggagacaacggccttgtggtacctgtggtaaagaatgtacagaataagagcctcaccgatgtggccgccgaatccaaggatctggtggcgcgggccaaggaggggcgcctgaagcctgaggagtacagcaacggcaccttctccatctccaatctgggcatgttcggcatcggaaactttacggccattattaacgcgccggaagccgccatcctctctgtcagctcggtgcgcaaaacgccggtggtgattaccgacgaaaacggggaggataccatcgccatccggcccatgatgaatattcagctctctgtggatcaccggctcatcgacggccttctggcctcccagtttgtggagtacatgaagcagcttctggaaaacccggtacagattctgatgtaagtcctgccgccatggggcgggtggagaaactccgtcggtgatcagaaaatcccaataagcgtcagccgcctttgcggcggctccatatttaaaacgctcgccacaacaatgttaggaggttattaattatgaaagacctgtttcgtttggatggtaaggtagcagtcgtgattggcggtgccggcggtatcggccagggaattgctgaggcgatggcgttctacggcgctgaagtcgtgattgccagccgcaagatggaatcccttgtgcgggcgaaaagtgagatcaaggaaaaagtggggaaggatgtggccatctacacggtggatgccaccaatgaggacagcatcattgccctggtcaacaccgtggtaagcaatcacaagaaggcggatattctggtcaacgcccagggctataacaagaagttcagcctgttcgacttccccatggatgtaatggccgatatgatgaacgtcaacgtaatcggcgtcgccatggcctgtaagcacttcggtaaggtcatgaaggaaaacggctacggccgcatcatcaacctctcctccgtccggggcgtccgggccttcagcggcggcggcggcaacatgggctactgtacctccaagggcgccgtggatatgctgacccgcaccctggccgccgagctgggccccgaggtcaccgtcaacgccatcggccccaccctcacggttacgcccatgatggcggaggtcatcaaggagcacccggaaaccctgaatctgggtaacggtaagcctctggagagaatcggcaaggtggaagactgcatgggccctgcggtgttcctggcctccgaggccggcgcctttgtcacgggacagatcctctatcccgacggcggcctcaccgcgatcggctgacggaggggaagcggatatggtctccattttattcaaaccgacgctgcatcagtttgcaacctgccgggaattcgtggaggacttcaaactcagctcccaggatctgatcctgaccgatcagtacatttaccagccctattttgggcagatgggactgggctgccagatcctctttcaagaacagtacggtgccggggagcctagcgacgtgatggtggacgccattttggccgccgcggccaaaaccgactgcaagcggattgtggccatcggcggcggaaccgtgattgatatcgccaaggtgttggcggtcgccggcagtgagggagtggatgccctgtatgacaaggcccctgacctggaaaagaagcgcgagctggttattgtgccgactacctgcggtacgggcagcgaggtgaccaacatttcgattatggcccgtacccgcatgggaaccaagctgggactggtgagtcctgccatgtatgccgatcaggcggtgctcattcccgaattgctggagggcctgccctttggagtgtttgccaccagctccattgatgccctggtgcatgccgtggagtcttccctgtcccccaaagccaccccttacaccaagctgttcgggtacaaagccattgagatgctcatccggggctatcagcggattgccatggatgggcaggagagccgaatcggcctgctggaggactttctgcttgcctccaactatgccggactggccttcggaaccgccggctgcgccgcggttcacgccaccagttatccgttgggcggcaaatatcacgtgccgcatggcgagagcaactatgcgatgtttaccggggtgctgaaaaactacatggaactcaggcaggatggggagattgcggtgctgaaccgctatctggctgatttgctgggctgcggggtgcccgtggtctacgacaggctggaagaactgctgaatcagattctgcccaagaagcctctgcacgcgtacggcatgacccgggaagatatcgatgagtttgcccacagcgtgatcaccagccagggccgcctgatggcaaacaatttcgtccccctggacgaggagcgggtacggaaaatctatagggagctctactgagcgtgccgggcccgtacaccgataccgggatgagagaaggatcaaactatggactatcaatatgacatcgcagttatcggcgccggcccgggagggtatgagactgccatcaaagcggcgcagatggggaaaaagacctgcattatcgagtccacctatcttggaggtacctgcctgaacgtgggctgcatccccaccaagactctgatcaaaacggccaatgtgctggataccgtaaagcatgccgccgacttcgccgtggaaggcgtggatctctccgcactgaaggtggatatggcaaagctgcagaagcgcaggcagaaggtggtttctaccctggtgggcggtgtcagaggcctgctccgcggaaacaaggtggacattctggagggaacggccagctttgcggacacgcatactctgacagtgggagataaacaggtgtccgctgagtatatcatcgtcgccaccggctccagcgtattcatgcccccctttatcgccgtggagggggagaaccgactgctcaccagcacggaggcgctggagctggatgaagtacccgactccgttgccgtcatcggcggaggggttatcggagtggagtttgctttcctgctgagtcggttgggcagcaaggtcaccgtgctggagctgatggatcatatcctgcccatggtggatccggaggtctccgccctggcgcagaaacgtctggagaagggaggggtaaccttccgcctgggggccaaggtcagcagagtggaaaacaaccgggtgtactatgagtacaacggtgcccaggaacagctcgaggccggcgcggtgcttatggcggtgggccgcacccccaataccgagggactgaacgcacagggcattggcttggaatttgaccggaatgccatcaagaccgacctctgcctgcgtaccaacgtgcccaatatctacgccatcggcgatgtcaacggcaaggccatgctggcccacacagcctctcacgagggcatggtggcagtggcaaatatctgcggccgccatgaggagatgcattatgaccgcatcccatcctgtatctatctggaacccgagattgcctgcatcggcctcacggagccccaggcccgggagaactatggcgacaacctgaaaattggacgcttcagcatgatggcgaacgggaaaagcctggtggaaggggacaccgacggcctgtttaaggtcatagtggccggcgataccggagagattctgggggttcatctgtatggccagcacgttaccgatatgatcggggaggtctccgccgccatgaccgccgaggccaccgccgaggagctcataggttcaatccatccccatcccaccgtcaacgaggctctgggagaggcgtttatggccgcttggaacggtaaggccatcaattccctgtaggcgatgaaaatcttatgtatgggtgacagcttcaccttcggctacggggtatccgctgcccggcggtggacggccctgtgcggacagatgctcgggatggagctgatgaactgtgccgtcagcggcaatacgactggcggaatgctggccagactggaataccagatggatcgggtgaaaccgggaatggtactgctgatggggggattcaatgatatcctgctcagcggcagtgacgccgccgcccgaagcaatctgggggccatgggccatattacggcaggacggggcgccattcctgtgttcggaacaccgcccctgccctgcccgcccattcgggtgaagtggaacggtctggccgatctggagcaggtcggtgagcaggccgcagtttaccaggactggatccgccggatgtgcggggtatttggctacccgttgctggatctccaccagaagctgatccgggtggccgcccgggagggacggcctctgagcgactactttttggacggcctgcacatgaatgaggagggcaaccgggccattgcggaagcggcggctccggctctgcgcaaaatcatggagcggtgaggcggccaatcaacaggcgcccgtatttcccacctgacggggcgggaaatatgggtgttttgttattacatggaggatacaatgaacttgaaacgaagtcgtgggctgaccctgctgatgagctgcctgatcaatctgtgcattggatcagcttattcgtggagcgtatttgccgggccgctggccgagcggcttaccgctctcggcggagctgcctacagcgccagcgacctgggcatcgtctttacggtgtataacatccccggtcccttctgcatgaccgccggaggctggcttaaccgccgcattgaggtgcgccggctgatccagatgggaagcgtgctgtttgtggcggggctgctgttgtgcagcagggcaaccactctgggcggcctggtcgtgggctttggactgctggtgggggttggcgtggggacggtgtacggctgtacggtgaataattctgtcaagctgttccctgacaagcgggggctggccggagggctgaccaccggcgtatacggcctgagctccgtgctggtgccgccagtggccaacgtcatgattcggaactggggggtcagtgccgcattccaaattattgccgtctgctttgcagtggtgctgctgctggcgtctgcatttgtggagcaggggccggaggaggcgggacaaatgctccctggaggcggccgggacatgagctggcgggagatgctttgtcagaaaaaattttatggtatgtgcgccatgctcctgtgcggcggactcagcggcatgatggtaatctcctctgcctccgacatggctcaggtggaggccggcttttcccccgcggctgcggccctgatggtttcggtgctttccctgttcaatgccggcggccgcgcttcggcgggtattctctccgacaagctggggcgcatcggcacgctttccctggtattcccaatctcggttgccgcgctgtgcgccctgtttttctttggacaggactcaatggcggtatttgcggtgtccatcgccctggtgggggcctgctttggggccctgatggggattttccccggctttacggccgatgagttcggccagagaaacaacacggtaaactatggcatcctcttcttcgggtttgcgctgtccggcatgctcggcccacaggtggcctcttgggtgatgagcggaaccggctcctaccgcagcgcgttcctcattgcggcggtggtggccctggccggttttgcactcacctttctccaccggcggctggccgcccgcgcttaaatggccccttgcggccacaacggctgcaagaatatcagtaccgttgtatgaacgcgcacggttgtccggctgtgccaaaaaaacgtcctgccgcagagttgaagcactgcggcaggacgttttattttccctgtagcgtaagtccgtgctggcgcaatttgcgggacacggtggagggatcaatattcaaaatctggctggcctccttcagattgcgggcgtaccgcagagcattctccagatactttttctcataagcggtaatggcgtcgttgaggctctgatcggggtcatattccacataggcattctggttgctcagatcgaaggtgccatagatgtagctgttgtccacatggccgttgggggcgcagcatacgaccagatattccatgacgttgcgcagctcccggatattgcccggccaggagtagttttccaataactcgatgttctccggggagagcaccacatttttgtgatattgcttattgaactccgaaacaaaatgctggctgagccgggcaacatccccttcccgctcccgcaggggtggtacctgaatgggaatcacgtggagacggtagtacagatcgctgcggaaggtgccctcccgcacctttttcttcagatcgcagttggtggaggcgatataacggatatccagcttgatggggcggattccccctacccgggtgatttcgttgttctggatggcccgaaggagcttggcctgcatgtccatgggcatctcgccgatctcgtccagaagcagggtgccgttgttggcggcctcaaagaggccctgcttgccggaagcattggccccggagaaggaaccgcgttcatagccaaagagttccgactcaaacaggctggccggaatggaggcacagttgactttgataaagggcttttccgcccgggaactggtgcggtagatggcatcggcaatcagttccttgcccacgccggactctccggtgatgaggacggtggcggtggtctgtcgtacattctcaatgagatcatatacccgctggatagcggggctttcccctaccatctgaggggtgacgatgccgctgctgttcggcaccatttgcacatggcctgcggccccctgaagattgttgaccgcctccacaaagtggacaaagttgtcccgcagctccttaaaggtggatacgccccggttgcaggccaccacgtactggatctcgcctgcatcgtcaaagatgggcacgccggtgacgaatcccagactatccggccggccgaacatgctggagagcttcattacctttttcctgctccgaattacctcggggacggtgggatcggtaaaataagtgccggtctccaacagttcggtgatccgcttgccaaggatctgctcaggggcgatacccgtgtggcggatataggcgtcattcacatagagaaccacctcgtccttgtcggctaccagaatattatcgtccagctcgtccataacgtgctgataatccaccacgctgtgggctacctcgtggacagaggcttcaatttcggtcagctcatccaacaaagcctgccgctcggggggagcggcggattcacgcagcctggtgatcaatgcgtgaatcctgtcttccgcatggagcatgattgatctgtgcagcatgatattacctccgaattgtcgcgcatgacggttctgtttcatgatagcaagttccatttgatttttcaagtgcgcaggggaatcttgcgactttgcaaaatcatgcatatctgcaaggcgccggcgggagaaattggggagggagcacaataaatcaaggcttccaacggcgcagagatttggcacgtcacttgcactctgccctgatgaataccaggtgaaaggaacggtagggactatgcagctgcgttcattggattgttttgcaaccatatgtgcgggaattggaaagaagcggatggccgtagtcatggcggagaatgagcattctcttctggccgctatgcgggcccatcagcagggcctgattcaggcggtgctgatcggtgatgagaagaagatccgggcgttgatggaggagcatcaactgagcacggagggtgtgcgctttcaccaggccgatgaaccggagaaggccgtgacgctggccacccggctggtactggagggagaagtggactacctgatgaagggaggactggagacgcgcaccatgatgaaggcgttcatcgcccgggaaaatggaatgcgtaccgggcggctcatgtctcaggtggcctttgtggaaaaccccttctaccacaagctgctcgccctcaccgattccgctcttaacccaaagcccgatctggcccagaaaaagcagattctggagaatgccgtggaggtattccacagcatgggggtggagtgccccaaggtggccgtgctggcggcggcggagacccttaatcccaaacttcaggagagcacagacgcccaggcactgaaggagatgtatcagcggggagagattaccggctgtatcgtggagggcccaatttccattgacttgtccattgagcctgagtcggccaaaatcaagggctacgacagcccggtggcgggggatgccgacctgcttatctgccccgatctggtgtcgggcaacatgatgggcaagatgatgcttttcatgggcgcgcgcagcgccaatgtggtagtaggggccagagcgccggtgattctgtgctcccgctcggctaccgaggaggataaatttcagtccattctgctgggggcgattgccagccagaagctgtgacacggaaaggagagcttacatatggaacaggagatcaagctgctcatcatcaatccaggttccacctcgaccaagatttcgatttttgagaacggcgtggagcggtataaaaagagcctgtcccacccggcctctgaggtggcgcggtacgccagagccgccgaccaggcccccttccgccagaaggcggtggaggaatttttggccgagattgactatgatctgtccggcctgaccgcgattgtggcccggggcggctccctgccgcccattcacacgggggcctatgtggtcaacgatgagatgatcgatgtgctgcaaaaccggcccatcggacaacatgcctccaccaccgctgcgattatcgcactggatatggccaaacggctccatattccggcctacatctatgacggcaataccgctgacgagatggagccggtttcccggatttccggctgccccctggtgccgcggctgagcatgggccatatcctcaacaccaaggcggtgggccgcatgtacgcacagcggctgggccggaagtatgaggaactgaaccttatcatggttcatttgggcgggggcattagcatcggcctccacaagaggggggttattgccgacatcatgaccgatgaggagggcaccttctcgcctgagcgcgccggcggactgcccagcatcggctgggccagggtatgctgctccggggagtacacctttgagaagctcagcgccatggttcggggcaaaggcggcctcaccgcatatctgggaaccaatgacgtgcgggaggtggaggcgaaggtgagggacggcgacaagaaggccgcactcatctatgaggccatgatttatcagacggccaaatgcatcggcggcctggcggcggcggcggacggagagatcgacggagttgtcctcaccggaggcattgccaattcggagctgctggtggaaaagctgcgccggaaggtgcgcttcattgctccggtggcggtgatccccggggaatttgagatggaggctctggccgctggaattacccgcgtgctcaagggcgaggagaaggcccgggtgtaccgggaacacgaggaggaaggagcatgaagcgggaagcggtaattgtctctgcggtgcgcacccccgtagggcggtgccggggagccctggcagcggtaggcgcccccgagctgggcgcgctggttatcgccgaggcggttcgccgggcggggcttcagggagaagaggtggaggaggttatcttcggcaacctgggcaacaacgacagcgccaatctggcgcgggtggttacactccaggccggcctgccctttacggtgcccgccatcaccattgaccggcagtgctcctccggcctcaacgccattgccatcggtgcgctgatgattgaagccggagaggccgatattttggtggcagggggaacggaaagtgactccaaccgcccccacctgatggagaaggccagggtggcctatcaggtggcgcctccgcagtggctggttcgcagaactgcccctggggcgctcaatgtcagtatgggtactaccgccgaaaatctgggcagaaagtaccacatcacccgggaggagtgcgatgccttcgccctggagagccaccgaaaggcggccgccgcgcaggcggcaggccggtttgacgcgcagatgattccggtgacggtacccggaaagcgcggtaagaccaccgtggtggacagggatgaatgcgtccggccggagagcaccatggagactctgggcagactgcccaccgcctttgagcctgatggggtatgcaccgccggcaacagctctccgatgagcgacggcgccggcgcagtggtgcttatggatcgggagacggcggagaaaaagggcctggagcccctggcggtgttccgggggtttgcggttaccggctgtgaccccagcatcatggggatcggcccggtggaggccatccggaaggtgctgcgcaagaccggcctcaccctggaggagatggatctcatcgagctgaacgaggcgtttgccacacaatccatcgcctgcatccgggagcttggactggatatggacaaggtgaatgtcaacggcggcgcgctggcgctgggacatccgctggcaggtaccggcgccattctgacggcaaagctgctgtatgagctgaaacggcgccgggcgcgctacggactggtggccttctgcatggcaggggggcaaggcggcgccgcggtatttgagcggatctgatggaaaggatgaatgatatggaaaacaaggcgaagatctccgtgttcggcgccggcaaaatgggaaccggcattgcgcttcagtttgcggtgaccggtttccccgtgaagctgctggcctttgatgtcagggagcagcagacctccgccggggtcattgaggataacctgaagctgttggcggaaaacggcctggtggatgccgaccggtgtgacgaaatccggaagcgcattgatattgtgctggactttgacgaggctgcccgtgaggcggacttcgccatcgagtgcgtgctggagaacatggagctcaagcagaactattttgcgcgcctggatcaggcgtgcaagcctggggcggtgctgtgcaccaacacatctgccatgagcgtcacggagatcgcctccaagtccgtccacagagagcggattttgggcactcacttctggaacccgcccttcctcatcccattggtagaggtggtgcgtaccgccgatgtgtccgaccatgcggtggatgcggtgtgtgacgtgcttcgcgaggcgggcaaaaagcccatcgtagtaaaaaaagacgtgcccggcttcattgccaaccggatgcagaacgccctggggcgtgaggctgtgagcatcattgccaacggcattgcagaccccaaggacgtggacgatgccgtcaaatacagcttcggaatgcgcctgggtaccatcggccccattgagcagattgacgccatcggcgccgatctgtgtctgagtatttcctcttatctgtatagctacctggaggactcccacgaaccctcgccccttctgaaggagaaggtggagcggggcgagctgggattcaagaccggcggcgtgggcatgcagacgtggacggcggaggaaatgaaggcctataacgatgggcttatcacaaatctcatcaaagtgggtaaagcgctggagcgcttttaagcagaggagaaagtgaggtaacgtacgatgacacaacataaggacctggagctgtttgcaaaaaacatccgcatccaggtgctgaaggccctgggcgaactgggcttcggccatctgggcggcgccatgtctgccgcagatgtgctgggtgtactctatggcggcgtaatgaacgtggatccgaagaaccctcagtgggaggatcgggactactttgtcatgtccaaggggcacgccggccccgccctgtacgccgcgctggcgctgaaaggctacttcccagtcgagcagttgctgaccatcaataccaacggaaccaagcttcccagccatcccgaccgcaacagcacgacaggcgtagatatgagcaccggctccctgggccagggtatgtccaccgccatcggcatcgcccatggcaataaaatgctggggaaggacaactatacctacctgctgctgggcgacggcgagagccaggagggacaggtttgggagggcgccctgtacgccccgcagcacaagctgtcccacctgattgcgttcctggactacaatcatcagcagctggacggctataccaaggatatctgcgatttgggggatatgcgccagaaattccaggacttcggctggtacgccctggaggtggacgggcatgacgtcgacgccatctatgatgccatcgccctggccaagcatcagcaggagaagcccactatgatcatcctccagacccaaaagggcaagggctgcttcttcgcggaggggatcaagtataaccaccacatgagattcagcaaggagcagtgtgaggaggccattgcacggctggagaaggaggggggctgaaatgtcgtacaggatctgtgagacgcttgaaacagagaagcaggccatgcgggatgtgtactgccaaacgatgattgatctggcaaaccagaacgacaggattgtagtcatggacgccgatctaatgaactctgtgggtactgtgccatttggggaggcccatcccgagcggacggtgaactgcggcattcaggaggccaacatgatcggcgtggctgcgggcatgtccgccgtgggcatggtgccctattgccacacattcggctgcttcgccacccgtcgttgcttagaccagatttttgtgtctgccgcctttgccaaagccaacatccgcatcatcggcagcgatcccggtatcactgcggccatgaatggcgccacccacatgccctttgaggacatgggctccctgagggatatccctggagtgaccattatcgagcccactgactccatcatgctggacaatgtgattcgccaactggagagggccaacggcgtatattatgtccgcctgtcccggaagaacgcggtgcaaatttaccagcctggctccacctttgaaattgggaaggcggctgagctgcgccccggtactgatgtgacccttatggccaccggcgtgtgcgtggccgaggcgctgaaggcggccgatcagctggcccgggagggaatcagcgcggctgtggtcaatgtgttcaccctcaagccgattgaccgggatgcggtggagcactacgcccgctctaccggcgccattgtcacggccgaaaaccacagcatttacaacggtctgggcagcgcggtggccgaagttgtggcggagacctgccctgtgccgctggagcgggtaggagttttggaccggtttggccaggtgggcacggtggactacctgcgggaaatctaccagctggacgccaagaccatttacgaaaaggcgcggaaagcgatcgtgcgaaaaaatcagtaatcaaaatttgtaggaggtaattgatatgaaactcaccaattccggattccagaggggatataatcccatcgttgtggagggcgacgcctccgacatgaacatggacttcggcgagttgctgatggaaaagggcgataccgtcagctacaacgagccgaaagagtgcatttacgtcctggtgacgggcaaggttaccttccgctgggcggacaaggaggagactgtggagcgcaaatcctgcttccatgaggatcccatcctgctccatgtgccccagaataccgctgtggagctgatgtgccagtctgacaaggccgaagtctccatccagcgcaccacaaatcccaagcattttgaacccaagctgatgaagggcgaggatctgctgtgcggctctgaactccggggcgccggcctgatgaacgaggcatccacccgtatcgtgcgcaccttcctggatcgctccaactgtccggagacaaacttcttcatcggcgaggtggtgagctaccccggcaagtggtccagcttccccccccatacccacgtggagcctgagatctacttctataagttcctgcccgaaaatggctacggctatgccgaggtgggagacaccgtctataaagttcaccacaatgacgccacctgcatggcccacggcgtgactcacagccaggccactgcccccgggtatgcggaatactatatctgggccatccgtctgcgcgacaatgatcccatggttaccacggttgtacctgaacacgcctgggtggccgaaaaggacgccaagtatttcccggagatctgagcgcggaggaaattccggcaatgttattggggcactgtttgcacaggtgcaaaaaattgcacgaatgcaagcttccttctgcccaaaagccgcccgcgggcaggacgcgggcagagggagactgcctgggacgtaacgggacacaaggcctttggtgtgccggcccctgaacgccggaggctggcatgccggttgcaattgacatgaggcacatgcggcatgtaccataaaattgaggataagagacgtcttatccaccccaagccatgcgcatataaaaacgaatgaaaagagggaaacacatgaaacgacttcttgcattggttctcagcgcagcaatgttcttttcactggccgccggctgcacgcccgcagatcagaccgacgacggccagaccagtcccacggctgacgcgggcggcgaaggtggttataccattgccaccaacaacttcggcgtgggcgcctatcctctggatatgatggtggccaacgagcagtccgcggcggacgccactggcatgaccctgaccgttaccaacaacgagtttaccgccgacaaggttataacccagctgcaaaatcagctggccgccagccccgacggggtggccttcctgggtatctccgagacgctcttccctgtggcggcgcagtattgcaagaacgccaaaacgccctatgttttctatgcctgctctcccaccgatgaggatatggaaaagattgagcaggatgagtactatgtgggcatggtcatttacagccccaagaacgagggttcgcggctggccgagctggcgctggctgatggctgcaagaccgcggtgatctccgccggcgcttccggcgactatgcccatgaccgccgcatcatcggatttactgagacctttgaggccggcggcggtgagatcctgtttgtctcccactccgccgatccctccgaggccgtacagaagaccaatgactacatgaccgcctatggcgacacggactgtatctatgccaccggtgaggattacatcacccctgccgccgacgtcatcaagtcccgcggcattaccgattgcaagatctacggctccaacatcagcccctctgtgtgccagctcattatggatggccaggtggaagcctgcacgggcggtgagtttgtctgtggcagtctggcggtgaccctgctgatcaattatctggacggcaacccgatcaaggacgccgacggcaccgcgccctactttgataacctaacccagttcatggtgaccgccgagaacgctgaggacttttatgagttcctcagcgatgagaacctggccacccacaccatctccgacgaggagtatcggaacctgctggttcgcaacaatcccgacgtggactatgactacttctacgacttcctgaccaactatgaggagaacgtttacgcaaaagtggaggcaaatgccgcacagtaagagcgctgtctcctgagcgggctggccgggcccttccagctctggccagccttatcccagaggcggcttgccgcaaacatggtggtgcagagcggccttctggagtgatggcatgtggagcgcggttaacataatgtgagactgccgcaagctatatgagtataaaaccggatgaaaagagggaaacacatgaaacgaatccttgctttggttctcggcctggcaatgctttccgcgctggcctccggctgcgcccccacaggggagtctggcggtggacagagcagccccgctgtcaataccgacagcaatacctcttataccatcgccaccaacaacttcggcgcgggtgtctatccgcttgatacaaatgcggcctatgagcagaacgcggcggatgccctcggtgtgactttgaatgtaaccaacaatgagtttaccgctgacaagtcgatcacccagctccagaaccaactggcctctgctcctgacggggtggcatttctgggcatctccgagacgcttttcccggtagctgcccagtattgcaaaaatgcggagacaccgtatgtgttctttgcgtgtgcgcccaaggatgaggatgtggctgcctttgagcaggacgagtactatgtgggaacggtggtctacagtccccagggcgaaggggccggcattgcggagctggcgctggccgacggctgtaagactgcggtgatctccgccggcgcttccggcgactacgcccacgaccgccgtatcatcggctttaccgaggcgtttgaggctggcggcggagaggtgctgtttgtctctcactccgcggatccctctgaaggagtgcagaagacaaatgatctcttgaccgcctatcccgatgtggactgcgtatatgcgtgcggcaatgactacgtggcgccggccgcggatgttgtcaagtcccgcggccttgaggggtgtaagatttacggcgctgatatcagtccaaatatctgccagcttattatggatggtgaggtagaggcatgcagcggaggcgtgtttgcaagctgcggagtggcgattaccctcttggtcaattacctggatggaaacgtaatcaaggattctgagggcaaggccccctactttgacagcctggagctgttcacagtgacttctgacaatgcggaggacttctacaagttcctgagtgacgaggcgctttccacccacaccatctccgacgaggaatatcagaacctgctggttcgcaataatgccgaggtaaattacgactactatgtggactttatggcaaattacgctgaaaacgtgtatgccaaggtagaggccaacgcgaacagagcgtaaatacagcagactggccgggggggagaaggaccaacccggccagccctgcatgttcaaaatggagcgtgagatatgagcttgtcaatgaaatttccgggagcctattttcaaggaaaagacgcgctggaggagttcgcggagcatacgatgtgctacggacgatccttcctgtttgttggcagcaaatccgccctgagggtatcaaaggaaaagctggcgcacagcttctcggggactgatgcccagatacagtttgagctcacctccggggtgccctgcgcctcggagatacagcgggtgacaaagctggcggcggacagcggagcccaggtgctgtgcgccatcggcggcggtggagtgatggacattgtgcgttccgccgcgatggacttgggacgggctatggtcatgattcccacggcagcggcctccgacgcgccctgtacctttgtcagcgtgctttactccgagaacggccaggagattgtgggggatcgtatcttccacaagtgcccggatctggtctatgtcgataccaccattgtggcccaggctccggtgcgtctgctggtgtccggcatgggagacgccctggcgacctggtacgagatggagagctgcgcgggcagcgggcatgaaatgtccaacacggcagtggccctgtgccggatctgccgggagctgatcctggaaaatgggataatggcccggctggcggccgaaaaccatattgtgatccctgcgctggagcgggtgatcgaggccaactgcttcctctccggcatcggcggagtcaatacgggctgctccggagcgcatgggtttggcgactatctgtcctctctgccgggcgggcacgactatatgcacggcgagcgggtgatggtgggcctggtgattcagctgatcctggaggggtatcaggagcaggagatccggcgtgtgatccgtttcgggagaaaggtgggtctgccggtttctgtggctgagttgttcgaggagccgatagaagagctggcgcaccggatcggtcaggatacatataacgaccattttgtgtgccacatgaattgtgaccacagcgcccaggccattgagggcgcggtgcgcatggcggtcgctctggcaaaagaaatggaacaggaggagctgcatcttgagcgctgaaatcaaaaatattacccagatcggcatcgtgacaggagatctgtatgctatggtagatcgctaccagaaactttatgggatcggcccctgggagatccgggacggaaaaaaaggtttcaaggacgaggctgaggatctgatggtatatggaaagcgccaggacttcaaggtgtctcttgcgctgtgcatggcgggaaacgtgcagctggagctgattcaaccgctggatgagtacagcgactacgccagacacctgaaggagcacggcgagggacatattcaccatatctccatccttacagacaaccaggcgttccgcgagactatggcagagcggggaattgccagtgtgatgaagggacatgtggccggagtggagacgtttgagtactttgacaccggacgagagctgggcgtcaaggtcgagattcacgatctggagagctgacggaggttcggaaggtcatgtattacctggaaagcgccagcatggatcccgcctggaacctggccctggagcaatttgtctttgaccagctgggccccagagaggactgcttcatgctgtggcagaacgaccggacgattgtggtgggcaaataccagaatgttctggaggagatcaacagtacctatgtaaaggagcacggtattaccgtggttcggcggctgtcgggaggcggtgcggtatatcatgaccggggcaatctgaactttacttttgtggccagagattgtcagggcggaatgatcgacttctcgtccttttgccggccggtggtcgacgccctgcgggagatgggggtgccggctcagatcaatggccgaaacgacatgactatcggggacaaaaagttttccggaaacgcccaatatctgcggcagggccgggtcatgcatcacggtaccctgatgttcgactccgatctggaggcggtgggccaggcactggctgttcggcccgacaaaattcagtccaagggactgaaatcggtgcgcagccgggtcaccaatatcaagccctatgtaaatgatccccaaatgacggtggaggatttctgggcggccctgcgggaacgaatgttccggtgcttttccatgcgaaagtatcagctctcaccgcaggagctggaacaggtggaggaactgcggaagcggatttatagccagtgggagtggaactacggccattcaccggcttgtagcatccggaaggagcggcgggtggaggggtgtggaacccttcagattcatatggatgtggagaaggggaacattacccggcttgccttcaggggggattacttcgcccggaaggacagcgacgcactggcggagtaccttcagggaactccgctggaggaaggcgctcttcggcaggcattgaaagactggccggtggaggattattttgtgcgtatggacctggatacctttgtgtctgctatgctgcaataaagcattgcggaagcggaagcctgagtttgcagagactggatagagatggtgaaagcacccatgagagcatatgacctgaccaaggaacagtggaaacgggtaaagccacttctgcctccccccagggctgatggacgggggcgtccccgtaagaatgaccgcactatgctgaacggcatgctctgggtggtgcaaaacggtgctcattggcggatgctgccccgaaaatatgggccgtggcaatctgtatacgccagatttgccaagtggcgcagggatggcaccctggtagcggtgttgcttgcactgtcaggtgagaaaacgataaaggaagctggtacatcccgcagctaggataagctctggctgcacatcacgtttctggcaatattgctttctactacaatattaagaggtaagagggaaccctgtcgctgcggcggggttccctcttgttattggtagggaggaggagagaggggcattttgtaatcataggccagggtaccgcgcacctacagtctcccaatcaaagcacctgacccaggcgaaaaagtaatacgccgggcaatatctcgtccaccgggggctgagggagaaaccacataccggtagccctaagtatcggactgtaggcgttggcgtgacaaagctctggattagcttcacatcgatgttgcatcgtgaagtctgaggaaaacgggcacatttacctgacccttgggtcccttgaagctctgttataaaattggtagaacagctttacatccttatccttcccaccgaagtcattatcttctttgcatatgcggctcccggttcctcacggcgttaaacctaatgagcctgaactcctacttcatcatctccatctatggtggctaccatgacttatagcctatgtatccttcaaatcagaaacctattttgatttccctgatatatttaagcggaccggccagagagagttcggccccggcccatctgcgcgcttcttatggtcgcggccctcatcataagctgtttccagagggacaagacctatttcggacggtacaactactcaattggcggcaatgaggggttactcgtctagctggagtcaataccaggaaggtacgtatgctcagttccgtcactactgaactgtttgtggcggtggttgccaatgcctatgataactaccagaggcaacccgtcttgaatagaaataaccttccttatgggccgttacgccccttcatactttggggctcagcttttgcgtttttgcaaatatttgcaggggcgcaaggctccaacggctgccgtctgagaaacgggctggcctgttgcttctgagagagcgccgtttacgtggcaaacccgctgaaagatcccaaattcaataaatctttatgtaataggtaatttttagccaaaaggagatgcagtaaattccaatggctatatgggcatggtttcggaggctcaatgaaatatttggcacagcgcttgcacgggttattcgggcaggacagactggctaccagtttgcggcggaacggttggcattggaacctggagaatccggggcgcttgtgtaaccatttattgcgggcacttggagagctgctgatatccgaaaccataaactttgaaacttgttgctatgagggggaagaattcatgagtgaattgagaggagcctgcatcatcgggcagtcgggaggccccactgcggtcatcaatgccagcgcgctcggggtgatccgcacggccctggacacggactgcatcacccgggtgctgggggcggccaacggaatccagggcgtcctggaggaccggctgtacgatatggggcaggaggatgccggggagctggagctgctgcggtacaccccgtcctccgcgctgggctcctgccgctacaagctggctgagcccagccaggatgacaccgactaccgccgtattctcgagattttccgcaagtatgatgtgcgctatttcttctacaacggcggcaacgactccatggacacatgcaacaaaatctccaagtacatgcagtccgtgggctatgcgtgccgcgtcatcggcgtgcccaagaccattgacaatgacctcaacggcaccgaccactgcccgggcttcggctccgcagcccgatacatcgctaccacctgcatggaggtccaacgggacacccatgtgtacgacaacggaaccattaccgttctggagatcatgggacgccacgccggctggctggccggctcggctgctctggctgcctgggtgggctacggcccggatctcatctaccttcccgaggtggattttgacatggaacgctttctggcggatgtccaccaggtctatcaggcgaagaacaagtgcctgatcgcggtctctgagggaatccaccgggcggacggcgccttcatcgccgaaggagtttccgccgccgccaacgacggcttcggccacacccagcttggggggctggcggcgctgctggccgaccttctccggcagcgggagccctccgccaaggtgcggggcatcgagttgtccctcccccagcgctgcggcgcccacagcgcgtcccagaccgacatcgacgaggcgtttctggcgggcaaggcggccgtggaggctgcggtcgccgggtattccgacaagatggtggccttccggtgtacccgggagggaggctaccgctgcgagactgtgctggaacccctggatattgtggccaacgcggaaaagacggttccccgcgcctggatcaacgccgatgggaacggcctggagcagcccttcatcgactacgtgctccccctgattcagggcgtccctcgggccccgcaggaacactccctcccccgctatgcacggctgaaaaaggtgctggtctctgatttgcaggacgcgtgcaggcagagctgattgtaccagattacctactgatacccgaagccagcttggcgctgatatcttcattcattggcctaatttgaaggggttcaatgtctatgaagagatatatgcgggtgttttataactattgataacatattaaacagcggaagaaccggcaagcgccagactgtttacgcaaagactttgggtaagttgcgtaagaaatatgaaatttcagaacgacggcaaggggtacagcacatcacgagcgttcgcggcattgtgaaacccgcttttcagatgtcctacgaggaggatatcctgatcaggagcaccttcaactgtaagatgtccgacgtggcgcagaacgactccaccaagcggattgccctgtcaccgaagcagcagaagctatagaaggacttcattcagtaatgactgcaccaacatggacaatgacagtatggacttgaaaagactgcgatacctcatgaggtactcggctgccgtagatggcatggatgaagacatccatgccatctacggcagcgtcaataccgctatggacaagtggttgccgtcggagcagtggcaacgggcggaaaagctccacttggcctgaagtggcaggtttctgtaatcagataaaaatagccgatatggtgaaatatttgacggaattaaaagttgtaaaaacaaatatatcccgataagagcccaaaacataatgaacgagggtcgaattttggaaccgtattctggacttcttcaaaagtcggtccctgtttgcctttttaaaattgcagggaatttgtcgttatggacgatagtaaaaacttggacaatcagattcgtgcataaccccaaatggcatagaggacgaaagccagaggccgaaccttgctctatatagagaaccctgtaccgaatgatatagttcgcaggcggaaacctcaatatattatattattggatggtgtgttaagtttaagtctaccaaatgtctaccaaaagcagcccggaaccgttgcggttccgggcctttttgcgcttggcatgcccggcgtgtctaccagatgtctaccgacgtcactttttgccgctcttttgtgccatttagaactgcatgtgggggggaatccctcctttttcatggcttgcaaggggcgtcatacgcccctgggcttcaaaattcagaaggaggaaatccaaatgagaaacctcaagcgggctctcagcctggctctggcggcgatcatgctggttggcatgatggttgtctccgcctccgctgcgagctacaacgatctcaccgataaggatcagatcgtgaacaaggacgccgtttccatgctggtgacgctgggcgtcatcgaaggaaagcccgacggctcctatgcccccaccgagggcgtggaccgcgcccagatggcgaagatgatctccgtcatcatgaatcagggcgtggataacggcgccctgtatgagaacagcccctccggcctgactgacatcagcagccactgggccaagggccacatcaactactgctacaccaccggcatcattgccggccgcggcaacggcaagtttgaccccgacgcgggcgtgaccggctccgaggccgccaagatgctgctggtggccgctggctacgatcccgctatcgagggcctgaccggcaccgactgggagatcaacaccaacgccctggcctccaagctgggcatcttccgcaacttcaagggctccgtggccgagcctctgagccgcgacaacgccgctctgctcatctacaacgccctggacgtggagatgatcgagagctacaccaacaacggctacgccatggcgtactccgatgcccgcaccatcctgtcctccatgtacggcgtgtacaaggtggagggcgttgtggtgggcaacaagtgggctgagctggacaagaccgactccgactccgctctgaaggatggcaagaccgtgctggacaacgtggttctgtactcctccaccacctccaacaccaccaaggacgagggcgtggcccagtccggtaagattgccttcaatgtggacacccccgttgacttcctgggcaagaccgtgaccatgtacatcgagaagaccaccatcctgtccgattccaaggtgctgggcgtgtccaccaaggacgacgtgaacgtgatcaacgccaccgctgccactcagagcaccgtgaaggattacctgaagggcaccggcgtggccgtcaccaagggcaccgagttctacgtgaactacggctactgcaagaccgaagaggatgcccacaacctgatcaacgactacagctatgccgccaacaacagcgacaagttcaacctgaacggtgtggacgttgagatcatcgacaacaacaacgatggcgacgccgagtacgtgctgttcacccgcgagactctgtccgaggtgcgcacctacagcgagaagaacgagacaatctccttctatgcgcccggttatgacaagaacaacgagctggccaacaagaccgtcactgagacggaggactttgaggacgtagtgttcaacgacgaggtgaccaccgacgacctgatcctctacgtgcagtacggcggccgcacctacatctccgcccccgaggttgtcaccggcaagatgacccgcgtggaccgcgacaaggccgacgagctctttatcaccgtggatggtgaagagtaccgccagtcctacattctggacgccgcctccctggtggacgtggatctgacccgttttgacattgccgacgccaagaacgagcccggctttgacaacagctacgactttgtcctggactccaacggctatgtgatcgccatccgccccgctgaggaagtggtgaccaactacgccctggtggtggactccgcctggaccctgaacgccctggaccgctccggccaggtcaagatcctcatgaccgacggcaccgtcaagacctacagcatcaactggaagaactccgccaaggcaatggaggatatcaataccgttgaaaccactaatgatgtcaagggcaagcccaacgacgagaagctggagacctacctgggcacccgcgatgtcaacaagcctaacgctggtggatacaacaaaactggtgtggccaccggctccattatcacctacaccctgtccgacgacgatgtgctgaccatcaagcatgtcctccagggcaacaccctcaagggcaatgacagcgagatcgactccagcgtgaacaccagcagcaccgccggcgtggctgacaacggtactgtcattcggatgaacaccagtgttgatcagagcctccagtacaccgctcccaacggctacaccggcggccgcggctccattacggtgaaggctggcgctgaggatgccaagacctacgccgtggacaagaacaccgtcgctttctactactggacaaacgccaaaggtgagaccgaatacggcgtggccaccggctgggaccatatgagcgacgtggccaataacaccgaggttcaggtctaccccactctggacaagacctcctacaagacctatgaggctaccgacctggccgacgtgatcctcttcgaggctgaggccaaggccaccagcgccaactacatgctggttctgtccgccaacgccatcggcaaggatctgctggagctgaacgttgtctttgaggacggcaccgtccaggccatcgaggtggacgacgacggcggccacgactgggacgacgaggccagctacatgaaggcctacacctacgccgagaatgccgacggcacctatgacatcggcgacgacgtagagaacgccggtaccgccaagctgctgaagaacggcactgtggacagcagcctgaagggctacatcgccctgtccggcaaggccaacgtgtgggatgtcaccgacgtggacaccgccgaggacaagaccgccctgggcaccttcccctacaataccaaggtgaacgccgtcattgtcgaggatgacaacgccatccgcaccgcctggatctgggaggtcgaggaagacgacaacgacatcgacgacaacaaccccatcgccaccgaggttaccaagattgatgcagataacttcaagatctatctgaatgcctttgtcggcgctgataaccgtgtggctgtgatcacccgcgccatggagaaggccggctacaccgacgtgacctttgcatctgctgcgaacaacgagtacactgtgaccgcccaggtgaagtccagcagcggcatcagcacgagcttgaccttcaccactgtcacccgctggttcagtgattctgctatcggtgcggagaacgttgataactacaacaatgcggctgacctgcccgacaactccgctctgattggtgacgggagcgatttggctaccatcactggcggctcggttggcacggatattaccgctggcgacaacatgatgtttacctacaccaccaagggcaccggcaacgtggtgctgaccatcagcgaccgcagcggcgtggtgtaccgtgaaactcacggcaccgctggctctcccagcgcctccgttgccgccgggcagcactacttctacatcagcctggacaacggtagcctaaacaccagcagcaccagcaataaggttgacactgccaacgacaagtgcacctttgctggcaagctggccgacggcaactatgtgtggagcgttaccgagaacggtaccaccgtagcctccggctccttcacgctggaccgcggcgtctaatccggacggccgtcttccggcaaaaacaactgagaagcccccggacccaattgggtccgggggctctctgctataccagggccagatagcggtagctctcccccgccttgttggtgacggggagaaagtcgttgtcgctgaggcccacctcgtagtggtcgtagtgcacctgaaagccggtctccgtcagaatcagcatattgccgggccggttgttataagcgtagacatagggcgcgcccggccaggccagcagggcctcccgatcccggcagaagagcaggaccgcccggggggcacaccccagcgcaaccgcccggttctgcgtcccgtccccggtgtaccgccccagacgcagctccggcttgcgcccatccagtcccgccagcgcctcgtccagcctctgaaaatctccgttgaagtcggtgcggaggaagctgtcctccggctcccactggtgcaggtgatagtgctgtgtataatttgccattctgattacctcctctggagataaaagcacccccgcgcacggcgtaccgccggacgcgggggccttgtcctgccgaacggcctgcgggcgggtatgggcacccgcccctacgtccaagtgccgcaagatagccctccggaagcggaaccccggaagtaggggcggcccttgtggccgcccgcgggcggggacaagccccgcctctacggagcattttggctaggcggtgcctgccgcagcagacctctgtaggggccgatgcccacgtcggcccgcacctccgggccaccggccagttccgggcgggtgtgggcacccgcccatacgtccaagtgccgcaagacagcccgctggagacagaaccccggaagtaggggcggcccctgtggccgcccgcgggcggggacaagccccgcccctacggagcattttggccgggcggtgcctgccgcagcagacctttgtaggggccgacgcccacgtcggcccgcccctccgggccaccggccagctccgggcgggtgtgggcacctgtccctacgcccaagcgccgcaagatagccctccggaagcggaaccacggaaatgtaggggcggcccttgtggccgcccgcgggcggggacaagccccgcccctacggagcattttggccgggcgatgcctgccgcagcagacctctgtaggggccgatgcccacatcggcccgcacctccgggccaccggccagctccgggcgggtgtgggcacccgcccctacaggcttcaagcaccgcagaatagcccgccggagacggaaccccggaaaggcagtggcggcccttgtggccgcccacagccggggcaggggaagcgcgatccagattgaagaagcagggggaagtgtgttatgattcagaaaacagatttttaccggccgcagccgccactgggagggacgcagatgctgcaaaacccattttatctcttttttaccgcctgcctggggctttttttctgggccggataccggcggatctttgctgaggtaccgtaccggcattccctgtggagctttctcggggaggagtgtgccccggggcagcgccgcgccatcgtgcgcgcccttctggcggggctccccggcgacagcggcgccatggcctggatactgacaatggcggcgctctgcctgggaggggcgggagccctgttctggtatctggtgttctccctgctctggctgcacccgctgggggcgctggccgggctgtggcgctactaccagcctggctgcggcgggcgggtcgagctgtccgccctgctggagggaatactgtgccgcaaaagggcccgcgcaaggccgggactgggccgtctgctccgctggcttcagacactggcgctgtgcggcatgctgcctctgctgttccggatattggccagtccttccgccccggcgagaggcgcggggctcctgccctggctggtggttctgctggccctgtggctgctctgccggcttgtgggggagcggggcgagacggtgctctccctgctctttctgctcctgctggcggcggccctgctcggcaatctgcccaacctgatccccgccgtcaagctggtgctgctggatgcctttgaccggagccgcttcctgttctccctgtccggggcggggctggcggccgccctccaggccgggggagcggcaggctgcggcggggcgctgctccgcaccctgtctgcccgggaggaggggccatcctttgcccatccggcccaggccgccttctacgaggagctgcgcgggctgctgcagcttacggtgcagttggcgctggggctcctgtttctgtgcgcccggctggtccctgaggacaaccgctggccacagacctgcctgtgggctttcctgtgcctgtttggcctgctctggctgggccgtgcggtgcgcgccttggcccggccggagggacggcggtgtggcctgctctgcctcggcctggtgggggcggcggcggtgtgggacatctggaaggggacggcgctgcttcccggcctgtccggtggggccgccgggctggcctcactcgccctcgcggggctgctgctgttcgacagcaactggtacttcctgctgctggagcactaccgggatgtccatatctggcatgttacgccccatcccgacctgatgcagaccgaaatggaacgcaaaaatatgtgatttttcacataaactgtcgatattctcaagacaattttgatttataatattctgtaacacattaaagcactgtattctctatcaggccgggacagaccggggaggcattgtctgttcagaaaggagtttgtatgctcaagtatgtgctgaaacgaattatatccgcattggtcaccatcttttttatcatcacgatcacattctttctgatgaaagcgatccccggcaacccctttgccgcggagaagatgcccaatcccgaaattgaggcggccatgatggccaagtacggcctggaccagccgctgtggaagcagtacatcatctatctgggcaacttcctccggggggatttcggcgtctcctacaccaaggccggcctgactgtcaacaaggtcatagccgacggcttccccttttcgctgaccatcggcatctacgcctccctggtggtggtgttcgccggaatcctgttcggctcggtgtgcgcgctgcgccagaacaagctgattgaccggtttttcatggtgctgtccaccctgggctccaccatacccagctttgtgctggccacgggtttcctgtttcttttcagcaaaaccctgggtcttgtgcccgccttcggtgtggacgaggtggcgggctatatcggcccggtgctggtcattggggcattcccactgtccttcatcacccggctgacccgcaccagcttggtggaggtgcagcagcaggactacatccgcactgcccggagcaagggtatctccgaattcaaggtaatctacaagcacgccctgcgcaatgccctgctgccggtggtgacttacatcgggcccatggtggcctccattgtcaccggctcctttgtcattgagaccgtattcggcatccccggcgtgggccagttgttcaccgacagcattgtaaaccgcgactatccgctgatcatgggcattacggtgttctttgccgtactgctggtcctggccgtgctgatcgtggatctcgtttacgtcctaatcgaccccagaatcaagctggattgaggaggcgcgcatgagtatgaaggaaacggaccgccgctggctgccggcggagcgggacgccctggcctccgaggccatcgggggccccagcctgacctactggcaggactgctggcaccggctgtgccggaacaagaccgcgctcctgtccatggtggtggtggtgattgtggtgctctccgccatttttgtgcccatgttctggccgtattcctacgaggaacaggacctgcggtacgccaacatcccgccggagctggaaatctacgatctgggcggtaacagcttcgtctatgtcaccagcgactacaagtgtattgacaccgacggctccggccacctgcttggggcctccaccctggtcaaggatgacaaagccgggcggacctacctatatgagatcaacggaaaggatttgctggtggactacggcgtgtacttccgggccaaatcggagtttatcacccaggaggctgcccacggcgacggcagtcccgtcaccgtggcggaggtggagtacctgagggagtactacggggaggacgcccccgagacggtgagcctgcgggaggccgagcacatcctggaggacaagatcgaccgcttccgtgtgttctacgacggagcgcagatcacccccgccaaaaccgtcctgaacaagacctatatctggggcaccgactccctgggccgcgacctgttcatccgcgtggtgtacggcgcccgggtctccctgctggtgggcgtggtggccgccctggtcaacctgatcgtgggcgtactctacggcggcattgccggctacttcggcggcgctgtggacaacatcatgatgcggattgtggacaccatcagctccatccccatgatgctctatgtcattctcatcatggtggtgctgggctcgggcctgcactcaatcattctggccatgggcctgacctactgggtgggtatggtgcgcatcgtccgctcccaggtgctcactatgcgggagcaggagtttgtctccgccgccgtcctgctgggtgtgcccacccggaagatcctggtgcgccaccttattcccaacgccatgggccccatcatggtggccctgaccatgcagatacccagcgccatgttcaccgaggcgtttctgagcttcatcggactgggcgtctccaagccccaggcctcttggggcgcgctggccaacgccgcgctgcccagcctttacaccagcccttatcagctcttctaccccgccctcatcatgagtatcaccatcctggcgctcaacctgttcagcgacggactgcgggactctctggacccgcggctgagaaagtgagtttgcgatatgtcaagacgtttactttcggttcgaaatctaaagacctcctttttcacccacgtaggcgaggtaaaggcggtgcgcggcatcagctttgatgtgaaccagggcgaggtgctgggcattgtgggagagagcggcagcggcaagagcgtcaccagcctgtccatcatgggcctgcttcagcaccccggccgggtggtggacggagagatcttcttccaggaccaggacatcctctcctacggaaagcgccggatgcgccgggtgcgcggcaaggagattgctatgatctttcaggaccccatgacctccctcaatccggtgtatactgtgggcaaccagatcatggagatgctccaggagcatgaggacatcggcaagggtgaggccaaacggcgggccattgagatgctgcgtatggtgggcatcccatcccccgagaagcgaattcacaactacccccacgagttctccggcggcatgcgccagcgggccatgatcgccattgctctggcgtgcagccccaagctgctcatcgccgacgagcccaccaccgccctggatgtgaccatccaggcccagatcctcaacctgatcaagcgcctgaaccgggagctggacatgaccacgatcctgattacccacgacctgggcgtggtggccaccctgtgcgacaaggtggtggtgatgtacggcgggctgattatggaggacggcacggtggaggagatcttctaccacccgaagcacccatataccatgggtctgattgactccatcccccgtgtcacgggcggggagaagcagcggcttaagcccattcccggtaccccgcccaacctgattcacccgccgaagggctgtcccttcagcacccggtgcccctactgcatgaatgtgtgtatggaggagatgcccccctatttccaggaggacggccaccggacgatgtgctggctcctccacgaggaggcccccgtcaatccggagtatgttcagcggaaggaggcgatgcggcgtgccgacggataagctcctggagctggagggcctgaccaaatacttttataagcccatgggcctgctgggccgcagaaaacaagtagtgcagtccgtggatcatgtcagcctccatatcctgcgccacgagacctttggcctggtgggcgagtcgggctgcggcaagagcaccctgggacgcaccatcacccggctctatgagcccaccgagggaaaaatcctctacgacgggacggatatcagccatctgaccggcccccaactgctcccctaccgcaagcgtatccaaatgatctttcaggatccctatgcctccctggactcccgtatgacggtcatggacatcatccgggaggcgctggatcttcactccgaactcaccaccaaggagcagaggagccagcgggtctatgaactgctggaccacgtgggcctgatgcgggagcacgccaaccgctacccccacgagttctccggcggccagcgccagcgcatcggcatcgcccgcgccctggcggtcaatcccgagttcatcgtctgcgacgagcccatctccgccctggacgtgtccattcaggcccaggtggtcaatatgctggaggatctccagcgggagttcgggctgacgtacctgtttatcgcccacgacctgtccatggtgcgccatatctccaaccgcatcggcgtcatgtacctgggcaagctggtggaggtgggggacagcgaggaaatctaccagaaccatctccacccctataccgaggccctgctctcctccgtgcccctccccgacccggagctggcgcacaggagcgagcccatcatgctgcagggggacatccccagccccatcgatcccccttccggctgccggttccgcacccgctgcccttacgccacgcagttgtgcgccgagcaggagccgccgctgaccgaggtgggaagcaaccatgcggttgcctgccatagagtgacccccgcaagggggaatgaggaaaaaggaggcatattatgaaagcgaagcatctcgtttccatgctgctggccggttccatgatcctggggctgacggcctgcgcgcccaccaccaactccggcggcgggaacgacagcccgcagcccaccggaacggactccggctccggcggtgcatcctcggagtacctggtttacaacgtgggcgaggaacccaagacctgggacccccagcttaacacctccagcatgggcggccatgtcattctgaacctctacgacggcctggtgcgcgacacccgggacggcgtccagatggcatccgccgagcgctacgagctctcggccaacgccgacggcgttgaggacaccgtgtacaccttctatctgcgggacggcctgacctggtccgacggcgagccggtcaccgcctacgactacgagtacgcctggaagcgggcctgctccccggagatggcctccccctacgccttcctgatgaccgactacatcaagggcgcttatgagtacttcagcggcgaaggcagccgggacgaagtggcggtcaaggccctggacgacaagaccctccaggtggagctgaagcagcccaccgcatacttcctgaacctggtgtcctggtttacttacatgccctgccgcgaggatatgtcctctaccggcgagggctgggaaaaggatcccgccaaatgcgtctccaacggcgcgttcatgctggaggagtacaaggtgggctcccacattctgctgaagaagaatcccaacttctggaacgccgataatgtgaatctggccggcgtgcgcatcctcttcatctccgacgccaccacctccctccagggctatgaggccggcgaaatcaacgtcacctccatcctgcccggcgcggagattccccgcctgctggccgaggatcccaacttctccagcgagcccgccctgggcaacagctacttccagttcaacatggacgccgacgtggtgaacgacctcaatgtgcgcaaggccctgtccctggccattgaccggagcaccatcaccgaccagatcctgcgtgacggctctgtacccgcctccgccttcgtggcgcctcccttcaagctgtccaccggcgagagtatgcgggcgctggatgagaacggaaacgtggtggaggagtacgaaatcgacccctactccgccaaggtggaggaggctcaggcctatctggctgaggccggctacccaggcggggcgggcttccccgagctgaacgtcctttactacgacagcggcaacaactccctgattgtggaggcggtgcagcagatgtggcaggaaaacctgggcatcaaggttaacctgcaggtgcaggagtacgcggtgttcaccaacaccatcaactccggcgactggagcattgccttcaccggctggagcgccgactacaacgaccccatgaccatgctctccctcttcaccgccgagggcatgaacgatgtccgctggcgctacaagccctactccggcgtgcccggggataccattctcaacccggaaaacgaggcctatgacaacgccgtgaagatggcggccaagacctccggggaggagcgcgacgcctacctgaaggaggctgaggatgtcctcatggagaatatggtcatctgcccgatctactataccacctatacccaggtcattgaccacggcaaggtttccggccccggccgcaccccggtcggccagtgggacttccagtactatacggtgatcggctgagccgaggcgcccctcatgccacctgccgcgcatggggggcgccctttctttccggcatcctctaccagctgccccgggaatatggtataatagcaaagtattacgggattggtattatgctcctgagcaattggggagagaggtgtgtgcggcatgtggatcagcgttttggaggacgaggccgttctcaacaatctgattaccaaatatctgcagaaggagggctactccgtccgcagctacctgcggggggaggatgctgtgcaggggctggacaagcccaccgacctgtgggtgatcgacattatgctcccggacatcgacggcttcaccgtctttcgggaggtacagcggaagaatcccaacagctatgtgatcttcatttctgcccgcaaccaggatatcgaccgcctggccgggctggagctgggcggggacgattacatctccaaaccctttctggtgcgggagctggtcatcaaggttcagcggctgctgaaggggggacggcccaaaacagcggaggtccaggtggggccgtacacggtccatctggaaaagcacctggtttactgcggcagcgagagtatcagcctcacggtgaaggagtacgacctgctgctctatctggcggctaaccgggggcacgtcctgaagcggggcgacatcctggacgccgtgtggggctataccttttatggctccgaccgggtggtagacgacacgatccgccgcctgcgcaagaagctgcccggcatcgaaatcagtacgctctatggcctgggctactgcctgacgggggagagacatgaatcgctttgcgactagatactggctgcaggaccggcccctgagcgtccagctctgggcctgcctctcactggcggagggactcactttggccgctatcctgctgtacgtcctccttctgctccggccggaggagcccggacagtggtataggctggccgccctgttccccctgctgctcattgcaaacctgttcaccgccaagctggcggcccggcgcattaccgagcccctggagcggctggcagggaatctcgagcgcatcaagggcaaaaactggagtgagccggtcttgcaggtggcccgccgggacgagatcgggacgctcgtcaacaccctgtcacagattcagcgcaatgtggtggagctcaacgaggacgaggagtttttctaccagagtgtgtcccatgggctcaagacccccattatggtcatccagaactgctgcgccgcctatcaggacggcatctacggctccgaggccatcgacatcatcatgaaggagagcctggcggtggaggcagggatcaggaagctgctctatgtctcctccttcgatcacatgctgggcaaacagagcgacttccggccggtggagctccggggactgatggaggagtgccgcaggcggtttcggggcaacgagcggggtatccggctggaggtggacgtcccggccggcctcacggtgtcggggaatgaggctgcgctccagaccgtctttgacaatctggtggaaaacggcctgcgctatgcggccagctacatccgcatggagttgaccggggaggaggagggcggctacctcctgaccgtggagaacgacggcgcgcccatcccgcagccgactctgaacgtcctgtttcaaaagttctacaagggggcggacggcaacttcggcctgggcctctacatcgcaaaaaagattgtgcagtttcacaagggggacatctgggcctccaactgggccgacggagtgcgctttcagctcctgctgcgcagggaagaccgcatggccggtcggcgttagaaaggaacgatagggtcatgaacaaggcttttttatatgagatgctccgcaccgagtcggtgagcggcggggagatcccccttcagaaaaaggtggccgcctacatgcgggagcagggagcggaggtggagaccgatctggcgggggatgtgatttcctccatcaacagcgcatcccccttccgggtgctcctgtgcggacatatcgacgagatcggcttccgggtgacccacatcaccgacgacggctacctccaggtgggcaaggccggcggcatccgtctggcactggctcagggtaagcgggtgacggtgctggggcggaagcggctcaccggtgttatgggcctgctgctgcgcaacggcgaggtgcgcaccgacatcgagctgaccgatctctacatcgactgtggcttcaccagccgggcggaggccctggagctggtcgcccccggggatttcgtcacctactcctatgccgtggacgagctggagaacgactgcatcgccggccgggggctggacaaccgcctgggcgcctataccgtgctccacgctctgctgcgggcccgggagaagggggcgaaggtgggcgtctttgcggccaccaccaccggagaggagaccaccatgcggggcgccttccatgcagcaggccgggtgcggcccacgctggctgtcgcggtggatgtgatccacacctctgatttctccggtatgcccccccagcgcttcggccgtatcaagctgggcggcggccccgccctggccaagggctcggtgtgcagcgcgcctctcaaccgggcgctggaggaggccgccgggcggttgggaatccccctgcagtatgccgtcaccccaggcgttatgggcaccgatgcggataagctcaaccagacgggtgcgggcctgcccgtgaccaccctttttattcccctgcgctacatgcactcccccagtgaggtgggctctctggccgatgtggagcagacggtggaggtgctggccgagtttctggcagccctggatgagcactttgatcccgacccgttccgggactaaatgcggagaggagaaacaccatgctgctgctgaccaatggaaccatcgccaccatggacccggcccgcccaatggcggaggccgccgtagtggacggcgcatacttcgcctatgtgggcggccgggcggacgccgaggacttcgcccgccgcttttccaggggagcctgggagactctggatctccagagccgctttgtaatgcccggcttcaatgactcccacctgcacttcatccactatgtcaaaacaaagctgtccgtcaacctcttcggctgtacctctctggcggaggtgcaggagcgcctgcgccgggggctggccgggctggaggccggctccggccgctggcttctgggcgaggggtggaaccaggagcagttcaccggcgagcggcgctttcccacccgccgggagctggaccaggtgagtacggagtaccccatcctgatcctgcgctcctgcttccacgtgggggcgctcaattccagggctctggagctgctgcacatcaaccgggacacggtggggcactacggcgcctttgccgaggtggacgagaccggagcgcccaacggcgtagtgaaggagaacgtattggacgacatcaaggccgccatcccctccgtgggcctgaggcccctgctggagcaggtagttcagtcccagcacgacctgctggcggagggcctgaccagcatacagagcgacgattttaagtatgcgccggacgaggagccctatgccctcatggacggcctgcgggagctggccgagcggggggcgctgaagctgcgctttgccgagcaggccctgctcaccgagccggagaccctggaggagtttttcacccggggcggggcctgcttcggcggcggcgaccgcttccgcatctccacggtgaagctcctggccgacggctccctgggggcgcggacggccttcctgcgggagccctattccgacgccccggacacctgcggcctgcccatctacccggagcaggcacagttggaccggctggtggtcaccgcccaccggcacaatatggccgttgccatccacgccatcggagacggagcggctgagatggtgctcaacgctttccagcgggcccgcgcggagctgccctggctgcacccccgtcacggcatggtgcactgtcagatcctgtcggaggggcagctccgccgcatggcggagctggatgtgaccgcctttgtccagccggtgttcatcaacggcgacatgcacatcgcccccggacgactgggcggaaaacgcctggcccactcctacgcctggggcgacatggagcggctgggcctccacatggctttcggcaccgactgcccggtggagtgctttcaccccctggagggggtctactgcgccgtcacccggcgggacttcaccggaaacggccccttcctgccggagcaggcccttacgccctaccaggcgctgtacgcttataccgcaggcggcgcttacgcctccggtgaggagcgcatcaaggggcgcatacgctccggcctgctggccgacttcctcctggtggaccgcaacctgctgacctgcccgccggaggaactgctctccgctcgggtgctgcgcacctatgtgggcggggcgtgcgtcttccgcgatccatccttctgaggcaaaacagggcccgcaattccgctggaattgcgggcccttgcagttagggctcagtggctgcccggctctggtatttggactttgcccttctgttccggggaggaggagcggagccggaaaaggccaatggcgcgcgcattccttacagatgcgcgcgccattggcggggaagggattcaggcaggcgggccggggcagcggtacaggcggcagggacggccgcctgtgtcgtagttgacggcgctggccgcctccccccgctctaccaggtaattgacataccgccgcaccgtcaccactgaaaggccggtctggcgggagagggcttcgctgggcaggccctggggcggtgccgcccgcaggcaggtgcgcacaagctccagggtgctctcctggaggcccttgggcggctggtgctccgccgggagggcgggggaaaagagccggtccagcgcgctctgctccaccgcgtccccggccaccgcatcccggtggcggcagaaggtatccagcgcctgctgaaaccgctcataggtaaaaggcttcaccagatagtccaccacccccagcttgagcagggtgtccacagtgggggcgtcgttggcggcggtgaccatgatagcgtcgataccaaccccctggccccggagggcgtggagcagctccagcccggtgaagaggggcatatagacatccagcaccgccagatcggcggggttctgctccagccaggccagggcggctcggccgtcctgaaaggactgcaccacctggaagcgggcatcccgctccacaaaggtgcggttcaggagggagaccatggggtcgtcctccacaatgacaacgcggtacattcagggttcctccttgggggccgggaggggttcccggcggaagctgagaaaaaatgaggtgcctacgccggtttccgactccacccggatgtcgccgtggtaagcctccactacctcccgtaccagcgccagcccagtcccccggctgcggcccttggaggaggctccgcgctcgaagagggtgcgccgcagggcggaggggatgccggggccggtgtcctccacgcagagaaacaggttatccgccccctcacggatgctgacggagacttccttggtcctacggcgggtctgattcaggccctcaatggcgttttcaatcagattgcccagtatggtcacccaggcgtcgggggagagccaggaggttccggcactcaggacgctctcccgatccagcgtgagccggatacccagctcgttggccctgctggtcttgcccaccagcagggcggccaccgagggctccttaatctggttcatgatgcggctcaccgcctcctgctgggtacgggtggtatccatgatgtactgctgggcccgctccggctcgccgatctgcagcaggcccaggatgacgtggagcttgttcatgaattcgtgggtataggcccgcatggcatccaccatgtgccgcacgccggtgaggtcgtcggccagccgggccacctcagtccggttgcggaagatgcccaccgcccctgccagagcgccgttttcatacaggggcaggcggtcagccagcacccgcacgtccttgagggacttcatgctcacgttgtactccggccgcccggtgcgcagaatgcggtccagggtggaagaggggtagacggagtggagggggcggcccatggcggcctccggcgccagggagagcatctgggctgcggcggcgttgagaaagatgatacgcccttcccggtcgatggccagaatcccctcctccagggcctccagaatgtcctcccgctggtggaaacgccgggcgaaggcgtctggttcgtagcccatcagggaacgcttgatgcgccgggacagccgcagggccagcagggcccccactgccgccgccagcgcgccgatggccgccaggcgcagggcggtggtcagcgccacatgggtcaggctgcgcaggtagagccccacggccataaagccgattaccgccccggattcgtcccggatgggggcgtaggccgagtggtcggagcccattggaccgctgtcatcaaaggtatagggctccgcccctgccagggcgcgggtctgggcggagccggtgtagcggctgccgataaagctgcggtctggcgcatagcggagtacgctttccgtgtctcccaccagaatcagatcgatatccgaggtgcgggcggtggccgcgtccagaaagtcggccagctcgtctgcgggcacctcccccagcagggcctccctcacgaggggcacctgggagagaatggatgcggagttaagcaaattctggtccagggtcttccgctcggtccgcagggtgatgtagagggtgccggccagggaaagggccaccgagacggtgacgataatcaggctcagccacatgagctgggcgcggatggaacgcccggtctggttggacatggacaatgcgcctcctttttcccggttgggatcagtataagataaattcagccacgctgtcaaacgaaagcgcagcacggacatattcgaaagtttttttactttcaaaagggttcccaaagccgcccggctggtagtatgatagcccacgcgaaaacgaggtgatgcgagttgtgagtttggatgcattcaaggaatccctggtggaggagctgggaaacaaggtggcctttaccgtcccggtgctgggcggcgtcccagtggcggagtcggtggtagtgacctggattgtgatggcggccctgatcgcgctggccctggcgctgacccgtcggctcagcgtggaccgccccggcaaggtccagtgcgcgctggagtgggcggtggagttcctcaacggcttcgtcaagaccaacataggcgcccactggcggcccttcgccccctggctggggacggtggccctctacatcggcctgagcaacctcatcggggtctttggcctgacaccccccacgaaggacatcagcgtgacggcagccctggccctcatgagtatgtttctcatctacggcgcccagttccgctacaacggcctggcgggcggcctgaagaagttcgccgagcccatgccgctgctcatccccatcaacctgatggaggtagccatccggcccctggcgctgtgtatgcgcctgttcggcaacattctgggcgccttcatcatcatggagatgctcaagctgctggtgccggtggtgctgccggcggtgttcagcctctacttcgacctgtttgacgggctcattcagaccgtcgtctttgtgttcctcaccaccctgtttaccggtgagggcatcaaggaggaagactaaatcaatcgattttaggaggaaatcattatgacactgggaattattgctgcgggtattgcggttttcaccggcatcggcgcgggtatcggcattggcttcgccaccggtaaggccagcgaggccatcgcccgccagccggaggccgccggaaagatcaacagcgccctgctgctgggctgcgccctggccgaaggcaccgccatcttcggcttcatcaccgcgctgctcgtgatcttcatgggttaagggggcgtccccaatgctggacttccaagtttccaccatcgtctttaccgtcatcaatctgctggtgctctattttatcctgcgcaagctcctgttcggccgggtcaacgccgtgctggagcagcgggcggcccgggtgaaggagaccattgactccgccgaggccagcaagtgccaggcggaggagctgcgcgcggagtatgaggacaagcttaccgacgcccggcaggaggcggccaagctggtggccgacgcccagaaccgcgcccagcgggcctatgaggccaaaatggcggacgccgagaccgacgccaagcggctgcggagcgaggcggaggcgcagatcgcctccgagcgggacgccatgctgcgcggggcgcggaacgaggtggcctccctggccctgctggccgccgccaaggtggcccagcggcccacagaggacggcgaccgggcgctggtggactccttcctggcggaagtgggtgagcaggcatgagcgagctcgcccgccgctatgcccaggccctgtggcaggtctctcccgacggggaggccctggagcgcacggcccgggccctgatggaggagcccgccctttgggaggcgctctgctcccccgccgtccaggccggagaaaaggggcgggtactggcccggctgcccgggctggaggagggcggcccactgccgcatttttaccgcctcctggcggagaagggccgcatggccctgctgcctgagattgtggaggcgtttcacgggctggagctggcccggcggggcggcgcccggtgcgtgctgacctgtgtgcacccgctggaggcggaggagctggagaagctccgggcggccctgtgccgtctccaccacaagaaggagatcgtctttgacgtgcgcaccgacccggccctgctgggcggctttaccctggatatcgagggcgtgcgctatgacaagagcgtccgcggggcgctgggccggatgggccgccaactggaagagaggcgaatggcatgagagcaaaaccggaagagattgtctccgtcctgcgggaggagattcagaattatgacacccgggttcgccgggatgagatcggcaccgtcctggaggtgggcgacggcattgccaccgtctacggcctggatcaggcggtgtacggcgagctggtggagctggacaccggggtgaagggcatggtcatgaacctggcccgggacagcgtgggcgtggtgctgctgggcagcgaggccggcgtccgggagggcaccgtggtgcgccgcaccgggcgggccgccgacgtccccgtgggcgacggcctgatcggccgggtggtggacgtgctgggccagcccattgacggcctcggccccatcgagaccaccgagacccgccccattgagcacgaggccagcggcgtggtcagccgcgagccggtcaacgtacccctccagaccggcatcctggccatcgacgccatggtgcccatcggccggggacagcgcgagctgatcattggggaccgccagaccggcaagaccgccatcgcggtggacaccatcctgaaccagaagggacaggacgtcatctgcatctacgtagccatcggccagaaggcatccaccgtggcccgcattcaggacaccctgaagaagcacggggccatggactactccatcatcgtgtcctccactgccagcgaatccgcccccctccagtacatcgccccctactccggagcggccatgggcgagtatttcatgggcaaggggaaggacgtgctcatcgtctatgacgatttgagcaagcacgcggtggcctaccgcaccctgtccctgctgctcaagcgctcccccggacgggaggcctaccccggcgacgtgttctacctccactcccgcctgctggagcgggcctgccgcctgacgaaggagtacggcggcggctccatgaccgccctgcccatcatcgagacccaggccggagacgtgtcggcctacatccccaccaatgttatctccatcaccgacggccagatctacttggaaaccgacctgttcttcgccggacagcggcccgccgtcaacgtgggcctgtccgtgtcccgcgtgggcggcgcagcccagacccgggccatcaagaagaccgccggcaccctgcgcatcgacctggcccggttccgggagctggaggtcttcacccagttcgcctccgatctggacccagctacccagcaggccctggaccacggccgccggctgctggagctgctcaagcagcccctctaccaccccatgccggtaagccgccaggccatcctcctgtatgtggccaccagcggcctggtggacgacgtgcctctggagcacgtgcgccccttcgtgcttggctttgccggcgagatggaggccgagcaccccgacgtggtggcggagattgagtctaccggcaccctgagcggcccggcagtggagtgcatccgggcggcgctggccgacgccaagaagcgggggagcgccacatggcaagcataaaggagatccgtacccacatcaagagcgtggagcagacgctgaagatcaccaacgccatgtatctcatctcttcctccagcctgcgcaaggcacgcaggcagctcaccgatgtggagccctatttcagcaagatcgaggccaccatctccgatatcctccaccactccccggagatcgaccaccgctttttcgataagcgccccggtatcccgcccgacaaacggaagacgggcttcatcgtcatcaccggcgacaaagggctggcgggggcctacaaccacaacattctcaagctggctgaggagaaaatgtccagggccgccaatcccagcctctttgtggtggggcaggtgggccgctcctacttcctggagcacggcatccccatcgacgtggagtttctctacacggcccaggaccccaacatgggccgggcccgggatatggccgagctgatgctggacctctatctggacggccagttggacgaggtgtatgtcctctttaccaaaatggtgagctccttccagctggagcccaccgcccacaagctgctgcccctggaccccgatgtgtttcctgaatatgagaagaaccgggacagctataaccgggacgtggtgtatgtgccctcggtgaaggcggtcatggaccggctggtgcccggctatgtaaagggagacctgttcggcgcactggtggagtcctattgctccgagcagaatgcccgcatgacggccatgaagtcgtccagcgacaacgcccgggctatgctccagcgtctgaacctgtccttcaaccgggcccgtcaggcggctatcacccaggaaatcacggaggttgtaggcggggcccaggcggccctgtaacatcccacggagaggggatatacagaacataccaacgcccgaaaggggattttgccattatgagtgagaagcaaggaaccattgtacaggtcatgggccccgtggtggacgtggcctttgacggcggcgctctgccggagctgaaggaggctctggaggtggagctggacggccgccgggaggtcatggaggtggcccagcatgtgggcggcgacacggtgcgctgcatcatgctctcccccagcgagggcctgggccgcggcatggccgtcaccgccaccggcgcgcccatctccgtccccgtgggcgagggcgtgctgggccgcatgttcaacgtcctgggcgacgccatcgacgagaaggggccggtgcagaccagcgagaagtggtcgattcaccgccagccccccgcgttcgagaaccagcgccccgtggtggacatcttcgagaccggtatcaaggtcatcgacctgctggccccctacgccaaaggcggaaagatcggcctgttcggcggcgccggcgtgggcaagacggtgctcatccaggagctgatccacaacatcgccaccgagcacggcggctactccatcttcaccggcgtgggggagcgcacccgcgagggcaacgacctctggcgggagatgaccgagtcgggggtcattgaaaagacggccctggtcttcggccagatgaacgagccgcccggagcccgcatgcgggtggccctgacgggcctgaccatggccgagtacttccgcgaccgggagaagcagaacgtactgctcttcatcgacaacatcttccgctacgtccaggcgggcagcgaggtctccgccctgatgggccggatgccctccgccgtgggctatcagcccaccctggccaacgaggtgggcgcccttcaggagcgcatcacctccaccaaggacggggccattacctccgtccaggccgtctacgtccccgccgacgacctgaccgaccccgctcccgccaccaccttcgcccacctggacgccaccaccgttctctcccgcaaaatcgtggagcagggtatctatcccgccgtggatcccctggagtccacctcccgtatcctggagcccgacgtggtgggcgagcggcactataagatcgcccgcggcacccaggagctgctccagcgctaccgggagcttcaggacatcatcgccatcctgggcatggaggagctgggggaggaggacaagcgcaccgtggagcgggcccgccgcatccagcagttcttctcccagcccttctcggtggccgagcagttcaccggcctggagggccgctacgtgaagctggaggacacgctgcgctccttcgaaaccatcctgggcggcgagctggacaagtatcccgaggccgccttcagcaacgtgggcaacgtggacgaggtcatcgccaaggccaagaaaatgggggcggtgtaaatggcggaggcttccaccttctacctggagatcatcaccccggagcggcagttctacatcggccccgccgaggccctggtctttcccgccgtggacggcgagatgggagtgtaccccggccacgagccggcggtcactgccgtggagccgggagagctgcgctacaaggtggacggcaaatgggagcccgccgccgtaggcgcgggcttcgtagagatcaagccggactatgtgatcctgctggtgggctttgccgagcacccggaggagatcgaccgcaagcgggccgaggccgcccgggagcgggccgaggaacgtctgcgtcagaagcagagcatccacgagtattaccactccaaggcggctctggcccgggccatggcccgcctcaagacccgcagagagtaatacagcctgccgaaaaagattgtatggcggaaggggcacgatttcccgcaaaattgtcacctcttccgccatgcgaagtgtcatttccgaggccctccttcggggaaggtttttcgacagcctgaagaataatagaaggcccgccggtactccggcgggccttctattactcttccagagcggccagcacctccgcctctgtggggatggaggagatgccgccggggcggagggtggacaggctggcggcggtgacggcgaagcgggcgatgccctccagcgcgccgggctccagctccgccggaggtgtgtccagggccagcagcttcgccacggcgctgcccccgaagatgtcccccgcgccggtggtgtccaccggccgcaccgccggggcgggcacccggcaggcccccctggcgttttccaggtaacagccctggggccccagtgtaatcatagccagagccacaccacactcctcccgcaggcggcgggccccctcctccggcgtacagccccagaggaaggacaactcctcgtcactgagtttgaccacgtcggcctgctccaggccccagagtgtttccgctctggcctgggcctcgctccgccacaggggcggacggtagtttgggtcaaaggtgacgagctttccctgcgccctggcgtaggccaccgcctgccgggtggcggagcgggctggctcgtcggtcaggctgagggcaccgaagtggaaggccctggactggtcgatgagggagagctccagctcgtcaaagcggagcacggtgtccgcgcccggcttgcgggcgaagctgaaggagcgctctccgtccacgagggtgacgaaggccagggtggtgaacacagtcgggtccacccggatgccccgggtctcaatgcccgcccgggccagggtgtccaccagcaggcggccgaaggcgtcgtcccccaccttgcccagaaaggcggcggaggccccatagcggcagagggcggccagaaaattgcccggcgccccgccggggtgggcggccagggtgggatagccctctccatcggtgctgagctgggtgaagtcgatcaacagctcccccattgcagttaggtcatacatttccataaccccctttggttaaaagtatagcacagccggggcggcgggaaaagcggcgaaatcgggagaacaggattgacagccccgccctttttctgctatactgagccaaacgagccgctgaagcggctttagaaaggctgaagcctttttccacacccatcccccggccgttgaaaccggtgaaccgaagttcaccatgtgcgcctgcgcgcacatggtgggctttttttgtgtccggggaagaaaaggagagagacccatgagcaagtatggaaaaagagcggtcggcctgcttttgacgggcgccctgtgcgccggcctgctggccggctgcggcggcgcgccggaggccgccgtcaccccgacggccccgttggagagcggctccgcctccggccgccgggtggagaccctccgcctggaggggggcaccgactggggcgtcccaaatccctatctgcaccagtcccgcggccccggcacggccaagatgcgcctggtgtacggcagcctgctggagaaggacgagaccggcgacgtgccctggctggcggagcgctggtccatggacggcaacgactacaccttcaccctctttgcagacgcccaattccaggacggcgcgcccctcaccaccgccgacgtggccttcaccctggactactatcaggagcaccccccggtgtccaactccctgggggtgggggacggctatctggtggaccactatacggtggtggatgagcagaccatcaccatcaccgtgaaggaggccaacgccgacaccctgtccaacctgggctccttcgtgatcctgcccaagcacatctgggagagcgtggacgatcccaactcctacaccggggagggctatctgacaggcagcggggcctatgcctgcaccgcctatgacggggccaccggcagctatgagttcactgccttcgacggctggtgcaacggggagcaggcggcggagaagatccagtttgtgccggtgagcgaccccctgctggcctttgagagcggggagatcgacatcacctccctgcccgccgacctgatggacacctatttgaacgacccgtccatcggcgtggtggagaaggccaacgacatgggctataagctgctcatcaactacgagcggtgccccgactttttggagctcgccctgcggcagggggtgtacgccgccatcgaccggcagagcgtggtggacagcgtgttccgcggcgcgggcacggtgggcagcgcgggctacgtcccccagggcagcctgtactataacgagaacgtggtgcagtacccctatgacccggaggcggcccacgccgtctttgcggggaagggctattccgtcacccttctgtgcggcgacgacggggacgacctggccatcgcggagatcatccgcaacggcctcaccgccgccggcatcgaggtggcggtggaggcccacgactcggccacccgggacgggcgcatcaacagcggcgactacgagttcgccctggtgggcaacggcggctggggcaacaatccccccacctacatgcgcaccctgttctccgacgagtccaagttctccggcaccaacccccactccatgggggccatcggctactccaacgccgagatgaccgcgctggccgagggccaggtatacgagaccgactttgacaaacgggtggagctgtttcaggagctggagctgctggtgagccgggagatccccatcatcgtcatcgccaaccagtcctcctactccatgtaccgcaaggatgtctatgacggctggatgaagacctacgcctaccagcaggcggagcagaaccgcctgtcctacatggcgcgctgaggtccgccccgccgggaaaggagaagcatgggaaaaaagctgctgatgctgctgggggcctttctggtcatctatctcctcaacttctccattccccggctgatgccgggcgacccctttgactacacctccggggccgccggggacgatgtggacgccgcctactcggaggagcagaaggagctgctgcgggcctactacggcctggacaagcccttttttccacagttgagggataccattgtggacaacctccacggggacttcggccagagtatccactataagcggcccgtggcggatattctgctggagcgcctgccctggagcctgtggatcatggggagcaccctggccctcagcctgctcctgggggtggctctggccctgctgtgcgtccgccggccctgggccgaccgggcgctctacccggccctctccgccctggcggaggtgccccccttcctcaccggcgtgctcctgctcttcctggtggcggcccgggcggcgtggattcccctctccggggcctatacccccttcgcccagtacgacagcctgtggcagcggctgggggacattctggtacacagcctgatgccggtgtgcgccctcaccctggtcacggtccccaagctcttttttaccgcccgggccagctttttcaccatcctgggcaggccctacctcaccaacgcccgtgccaagggcctgaccgcggggcgcatccgcaccgcctacatcctgcgcaacgccgccacccccatcgtggcccgctttttcctcagcgtggggggcgcggtggggggcaccattctggtggagaacgtcttcgcctaccccggcctgggcaccgtcctgcgggaggcggtgcagtaccgggactatcccatgctccagggggtgttcctcctgtccgccgtgctggtgctcctcagcctggcggcggcggacgtggtcaaccgccggctggacggagaggaggcggcaggggctgctgctgcgcttcctggggcagatgaaggatcccatgatcctggtgctgctggccgcggcggccctgtccctgtgggccagcggcggcgaggactggctggatgcggccatcatcctggtcatcgtggtggtgaacgcctgcatctccatctcccaggaggacagtgccgagaaggccctggaggccctgcggaagatgtcggcccccctggccaaggtggtgcgggacggggcgcttcagcggctggagaccgaccggctggtgcccggcgacatcatccatctggaggcgggggacctggtgcccgccgacgcccggattctggaggccgcctccctccaggccgatgagagcgccatgaccggcgagtccgtccccgtgtccaaggggctgctgtccgccctgccggaggacacccccctggcggagcggcacaatatggtactcgcgtccaccgtcatcacccgggggcgggcggtgtgcgtggtcactggcaccggcatggacaccgaggtgggccgcattgccgggctgctgctgggggagggagagggacagacccccctccagaagaagatggcggagatctccaagaccctgtccttcgtctgcctgtgcgtgtgcgcggtgatgttcggggtggggctgctccaggggcggcccatgctggacatgttcctcaccgccgtctccctggcggtggccgccatccccgaggggctgcccgccatcgtcaccattgtgctggccctgggggtggcccgcatggcccggcggcgggccatcgtcaagcgcctgcccgccgtggagaccctggggtgcgccggggtgatctgctcggacaagacaggcacgctcacccagaaccgcatgaccgtggtggacgtgtggacgccccggagcggcgaacgggccctggccttcaccatcggagccctgtgctccgatgccgccctggcctggaagggacgggagccggtgtccaccggcgatcccaccgagaccgcactggtggacgcggcggcccgggagggcctggataaaaatggactggagggggagtggccccggcggggagagctgccctttgactcggagcgcaagctcatgaccaccgtccaccagaggcccggcggcggctggcgggtgtgcgtcaagggggcccccgacgtgctcgcccgccggtgccggctggattccgccgccgcccggcggctggagagccggaacgaggccatggcgggaaaggccctgcgggtgctgggggtggcctacaaggatctggccatgctgccccgggagctgaacagcgccgctctggagcagggactcaccttcgtgggtctcatcggcatgatcgacccgcccaggccggaggtgcgcacagcggtggagcagtgctacgccgcgggcatcaagccggtcatgatcaccggcgaccacaagcttaccgccgtggccatcgcccgggagctaaacatctaccgtcccggggacctggccctgacgggggaggatctggactttctgccccaggaggtgctggagcaggaggtggagaagttctccgtctatgcccgggtgtcccccgagcacaagatgcgtatcgtcaaggcgtggcaggcccggggaaaggtggtggccatgaccggcgacggcgtcaacgacgcccccgccctcaaggtggcggacatcggctgcgccatgggggttaccggcaccgacgtggccaagggagccgccgatatgatcctcaccgacgacaacttcgccaccatcgtctccgccgtggagcagggccggggcatctacgccaacatcaagaaggccatccactacctgctctcctgcaacatcggagaaattctcaccatcttctgcgccacggtgttccacttccaccagatgcctctggtgccggtgcagcttctgtggctcaacctggtcaccgactccctgcccgccctggccctgggggtggagccggtggaggagggggtcatgtcccagccgccccgggacgcccacgcctccctctttgcccacggctttgccttccggctggcctggcagggggtgatggtggggctgctgaccctggcggcctatttcctgggggagtatgtgctctccgaccccggcgaggcccacgccgccgccaacaccatggccttcgccaccctcaccctgtgccagctcttccacgcctttgacgtgcgcagcgagcgctcgtccctctttcacatcggggtgttttccaatccggccatgaacaaggcgtttctcatcggccttaccatgcagttggccgtcctgtgcgtgccgcccctccaggtggtgttcagcaccgttcccatgagccctctggagtgggccgtggtgctggccctggccattacccccgtggtggtgtgcgagctggccaaggccgtgagccgcggccggacccgccgtccggcgcgggcggagaaggtggagccggcctgtgcccggcgctgagccgggacgaattaagaggcggaattccccccggccgcaggccggggggaattccgcctcttgtgctgtctgtaaacggatttatgcctgtgcctcctcaggcgcgcgctcctcctttacctcgcggatgaggatgaagggggtcagctcccgggactggcccgccgggttgtcccggatcaggcccttgagggtctcgtcgtccagggtgacggaggacgccttgcccagaatctccacgttcagatcgttggcgtccacaatcatggcctgcacgccggtggcggcctcgatctcgtcgcacaccttgccggggttctccgggatgcggatgccgaactcgccgtactcctggaactcgtggtcgtagaagccgtctaggccggacacctcctggcccaccatctcgtagaacacgccccgtttgccgaacagcttggccacgccggcgcagaacgcggcccagagtacgaacagggcgccccgctcgttaatggcgaactgcatcttgtaggggctgtccacgccgatgccggcggaggagtgggaggcgaagcgggacaggaaccgggccaggcggcccaccttcatgtccttcttgtagaccacccgcttctggcacaggccgatgatcttttcgctggaggagagcaggtcaccgggctgccacaggggcttgacgtactgctccaccaggtcgatatagctctcgcctacctggacgaaatgggtctggatggcgtggcgggcgtaggtctttccgcccacctctatggtaacgctctttccctcgtttgcgcggaattccatggcaaaaccttcttttgtgtttattgtccctcctattatagccagccgggggacaatgtgcaaccaaaagttttgctgtgaagcctcaaataccctcgttctgggggatttttggcaggctgtcgaagcccttctgtaggtcggcatcggtggggatggaatcgctcatctttccgctgaggtagttctcataggcggtcatatcaaagtacccggtaccggtgaggccgaaaaggatggtcttggcctcgcggctctccctgcaccgcagagcctcgtcgatggccccccggatagcgtgggcagattcaggggcggggaggatggtttcccgcttggcaaagagcaccgccgcctcaaaaacgcgggtctgctcataggccaccgcctccatatagccgtcgtggtagagcttggagaggatggggctcatgccatgatagcgcaggccgccggcgtggttggcggaggggatgaagccgcagccaagggtatacatccgggccaggggagtgacccggccggtgtcgcagaaatcgtaggcgtacttgccccgggtgagggaggggcaggaggctggttccaccgccacgatgcggggattccgtatcccccgcagcttgtcggccataaagggggcgatcagcccgcccaggttggagccgccgccggcgcagcccaccaccacgtcgggatattcccccagctgctccatggccagcttgctctccaggccgatgatggactggtggaggagcacctggttgagcacgctgcccagcacatagcgcttggcgccgccgctctggacggcggcctccaccgcctcggagatggcgcagcccaggcttcctgtagtctccgggtggtcgcgcaggatctggcggcccacctcagtcgtgggggagggagagggggtgatagaggcgtcgaatacattcatcaccgcctttcggaagggcttctgctcgtaggagcacttgaccataaacacgtcgcacgtcaggccgaagtaactgcacgcctcactgagggcggtgccccactggccggcgccggtctcagtggtgacgccggttaggccctgcatcttggcataataggcctgggccacggcggagttgagcttatgggaaccggaggtgttgttcccctcaaacttgtagtagatcctggccggggtatccagggccttctccagctcgtaagcccgaatcagcggggaagggcggtacatcttatagacgttttgaatgggttccggaatatccacataggcggtggcgccatccagctcctggcgggcaagctcctcgcagaagatgggggagaggtcgtccacacccaagggccggagggtaccggggtggagcagaggatcgggctgctcggccatggcggagcgcaggttgaaccacttctggggcatctggtcctcggtcagatacaggcggtgggggatcttgctcatgttgatacactccttttctgtgttgcaggggaaaaggctacaaaaaagcccttcgtccccaagattgtttctctgggacaaaggactgtagcttcagcctctgcggtgccacccggattgacgtataccagcgcatacgcccactcactttcaggggccgatcagcccatgctccccggataacgggtggagtccccgtcgcgctactgagcccaaaggctgttcgctgtgccctcaaaagtccattcatccgagcgttgcctgccgcgattccaccacccgcggctctctgagaggcattgataccggactactcctcttcgtcatcggtttaccgatttgatttgctacagtataacggcggcggcccggtttgtcaagctcttttttgtaaaagttgggccgggcccgccgggtgggtggattacagcaaattttaatctgagaacccttttttgacagggtgggatctgctacactgggaaaaaggccttgggaggtgccgaatatgaggtatgttaaagaatttgcggtcgtactggcgctcctgatgctggcgggctgcgccgggaagccggtacaagagtccccggtggcgacggatgagggcattccagcggggcagatctacctctacggggagatccacggaatcgccgccatcgaggagtacgaggcggagcggtggaaggagtgctacgaccgggggatgcggcacctgtttgtggagctctcgcactacacggcccagtggctcaacctgtggatggacgcggaggacgatgagattctggagcagctccaccaggattgggagagcacgctctcatccggcgccgagacgctggatttttaccgcaccatcaaggagcagtgccccgagacggtgttccacggcaccgacgtgggccaccagtacgacagcaccggggcccgttaccaagactatctggaggagcggggcctggcggacacggaggactaccgcctgaccctggaggccatccagcaggggaaaacctttgccgagcgtggctccgatatttaccgggaaaaccggatggcagagaacttcatccgggagtttgacgccctggatggggagagcgtcatgggcatctatggcgcggcccacaccgacccggatgccatggcggactccgcgggaaccgtcccctccatggccgctcagctggtagagcggtacggggactccctccacaccgaggacatctcctggattgcctgggagccccagcggacggataccctcaccgtggcggggaaggagtaccaggcgtcctacttcggggaggaggatatctccggctgggccggggactaccagtcccgggccttctggcggctggagggggcctatgaagacttcgaggactgtcccgagagcagcgatgtgctgccctgcaacgactatcccatgccgattgaggccgggcaggtgtttgtcctgggctacacccggaaggacggaacatcagagcggaagtactaccgctccgacggggaggtatggaacggcatggactgcaccacggaatttatcccggaataagctcataaaacggccgtggggccgccggatccggcggccccacggcccttctgcgcttaattcaggtgggaaaaattgtgccgctttttgcgggcatggtagtgggtgtggagcagctcgtgggagcgctgggacaggggcgcgccgaagaactcctcgtagatggtcttgatctccgggttctcatggcttttgcgcaggggcaggctccggtcgatctcatacagggcctggatgcgggcgtcccggacggcgttgttggtgccgatgggctgtccgccgccgccgatacagccgccggggcaggccatgatctcgatgaagatatagtcggcctcgccgcgctctacccggcggataagctcctcggcgttcttcagaccgttggccacggccaccttcaggggggtgccgtcgaggtcaatggtggcctccttgatggcgttgatgtcgccccgtacggcgtcaaactccagccggggcagggtcttgccggtgtagagctcgtaggcggtgcgcagggcggcctccataacgccgccggtagcgccgaagatggcgccggcgccggagccggtgcccaggggggagtcaaactcactctcgggcagcacggacaggtccaggcccacatagcggatgagcttggccagctcccgggtggtcaggacgtagtccacgtcctgatagccgtcccggcccagctcggggcggctggcctcgtacttcttggcggtgcaaggcatgacggacacgcttaccacatcgtggggatcccagcccatcttctgggcatagtaggtcttggccaccgcgccgaacatggcctgggggctcttggcggtggagaggtggtcgatgagctcggggtggtgcttctccaggtaggtgacccagccgggggagcaggaggtgatcatgggcagcttcccgccctcccggatgcgcttgagcagctcgctgccctcctccatgatggtgagatcggcggaaaagttggtgtcgaacaccttgtcaaagccaagcatccgcagggcagtgaccatcttgccggtgacgacggcgccggcctccatgccgaactcgtcccccaggcccacccggacggagggggccacctggacaatgacgtgcttggaggagtcctggatggcggcggtaacctcgttggtgtagtcggtctccacgatggcccccacggggcacaccagggagcactggccgcacagcacgcagtcggtctggtccatgggcaggtcaaaggcggtggtgaccttgaagccggcggagcggccggagtaggtcagggcggcgcagccctggacctcggcgcacaccttcacgcagcggccgcacttgacgcacttggcggggtcgcggacgatggaggggttgtcgatgcgcagcggctcgtcggaggagatgtcgggcagctccgggtggagccggttaaagcggcggcagagcgcctggagctcgcaggagccgttgcgggcgcaggaaaggcagttggtcttgtggtcggagaggatgaggtccagcacgccggtctgggcatcgtacaccttcttggagtcggtgatgacctccatgccctcccacaccacggtggagcaggccgccgtcagcttgcgggagcccaccacctccaccatgcacatccggcagtgggccttgatggtctgatccgggtggtagcacaggtgggggatatcgatgttgagcatcttggccgcctcaatgatgcgggtgcccgcaggcacctccagcggctgcttgttgattgtgatatgtaccatttcgctcatcggacggcgacctcctcttttacggcaaagacttctgggaagcgcttcatacagctcagcagggcagactgggccgtctcacccaggccgcacagggacgcgctggacataatgtcggcaaatttcttgagggtggcgatgtcctgggcggtgtgggtaccctcggccaccttgtccagcagcagggagatgtggcggttgccctcccggcagggggtacactggccgcagctctcgtgggagaagaactcctgggtcatgcgcagaaagccgatgacgctggtgcgttcatccaccaccagcaccgcgccggagccgatggcggtgagatccgcctgacgcatgcccttgtaggtgtagggggtgtccagttgggcgggggagcagatgcggcccgacgcgccgccaagctgcaccaggcgcagggggtagtcctcgttctccatgccgccggccagatcatagacgatctcccggatggtgatgccgaagggcacctcgaacacgccggggcgcttgacgttgccgcacaccgagatcatcttggtgcccgggcagtccggcgtgccctggctcttatagtagccctcgtcgtccagcagcaggggggccaccagggagagggactccacgttgttgacgcaggtgggcaggtggaacacgccgcactgcttgataaacgggggcttcatccggggccggccggcgtggccgccgatggactcggccagggcggagccctcgccgcagacataggcccccgcgccggagtagaggtggatgcggtagttcagcccggagcccaggatgtcctcccccaggtagcccgccgcttcgcactgggcgatggcggagagcagccggggccgcaggtgggagtactcctcccgcaggtagatgtatccgttgtccgcccccacggcccagccggcgatgatcatgccctccagcagttggaaggggtcgtgggtgagcagctcccggtccttgaaggtgcccggctcgccctcgtcagcgttgcacactacgcacttgtgggcgccgggtacctcccgggcctgccgccactttttacccatgtcgtaggccgcgccgccccggccctggacgccgttggcggccagcacgtcggcaatgtcgcagccctccatggtcagggccttgcgcagcgcccggaagccgccgatggattcatagcccttcaggctgtccgggtcgtacttcccgaaattccgggtgatgaaacaaaccgtcttgctcatgtccgttcccccttagttgagctgctggagcatatccaggatacgctcctcgctgtccagatggccgtataccacgccgttgacccgcacggcgggggacacgtcgcaggccccgaagcaggggacctgctcgatggaaaagcggccgtcataggtcacctggcccacctccagatttaaaaggcgcttgagccgctccagcagggtgtcgctgtccttcacccggcagggggcggaggagcacacctccagggtaaacttggccctgggcttgtcgtgaagggcggtatagaaggagatgacatcgtagacctgggtgggcttcacccccaggcgctccgccacatagtaggcggcggcctccgggatgtagtgccgctccaccgcggcctccacgtccagcaggatgcccaccagctgggtgggatcttcgccatgggcggcgagaatgccgtcgattttgtccgccagctcctggtccagggtgtcggcagtctgggtaaagggcttcataaggggctcctccttatcacataaaatgaaccctgtcctgcggaggacatgggataattaccagaaggaaagtggatagttcatctattgaactttgtagtttttataaagtatatcaacatccctggaaaattgcaactggttcgtttaaatttgtataaccgggcgaaaacgggccatcctaaaaaagttcgattcagcaaaatagacaacaggaggtgtgcgccatgggcttttttggtcggaagcgtgcccccagcgtaccccatccccggaaggagccccgctttgacgggccgctgaccttggaacggctggagcagatcttccaggactgcgtggacttcaccaagcgtccggtgtccctgggggagggcggcgcgtgcacgctcaccctgtgctacctcagcggcatggtgaagatggagcgggtcagcgactacgtgctccggccgctggcccaggacgaggcgctggcccgctgcgggactccccggcaggccatggaccgcatgaaggacggggccctctacaacctgagcgcggaggagcgtacccggctggacgcggcggtgtttgatttggtgaacggctgctgtctgctcctctttcccggggaatcctcggtgctctccctcaacgtgggcaccgaggaaaagcgatccatcagctctcccagcaacgagacggtgctcaagggctcccgggacgcctttgtggagagcctgcgcaccaataccagcatcgtccgccgccacctgaaggcccccgagctgcgtatccgtgagcaggtggtgggccgccagtcggtcacgtcggtggacatcctctatatagaggggctcaccaatccccacctggtggagcaggtggccgcccaactggcggacattgacatcgacgcggtgctggccacgggcaatattgaggagtatatcgtccccgccgcccgcaccgccttcccgctggtgcaatataccgagcggtccgaccgcttctgcgccgggctggccgaggggcgggtgggcatcctcatcgacggcctgcctctgggctacctggcccccggcgtgctgggggatttcctccaggcgccccaggacaagagcgagagctggctgctggcctccgccctcaccctgctgcgctacctgtgcatgctgggcaccctgcttctgcccgccctctatgtggccatggtcaccttccaccaggagatgattcccacccgcctggccctgtccatcattgccgccaagcaggacgtacccttccgctccgtctttgaggtcatcgtcctgctgctggcctttgagattctccaggaggcggggctccgcctgccccagtccatcgggcagaccgtgtctatcatcggcggcctggtggtgggcagcgcggcggtggaggccaagatcatctcccccgcggtgctcatcgtggtggccatcgcgggtatcgccgggtacaccatgccctctcaggaggtggcgggcgccctgcgcatctggcggttcctgctggccctgctggccagcgcggcgggcctgttcggcgtggtggccggcctgtcggcgctggtgatccatctggcgggcattgagagcttcggcgtgtcctacctgaccccctttgcctcgaatgccggggagcaggtggaggggcacgcggtgttccgccagcccctgccccaggtaaagcagcgcccggcggccctgaaaacccgaaaccggaggaatcagaaatgagacgcataacagccctgctgctggccggcctggccgccctgaccctcaccggctgccgccgtgggcccggcctgctgccctatgcccgggaaatcgaggacatggagctgatgcagaccctgggcgtggaccgggccggggaggggcaggtggaggtaaccgcctccagcggctcgggcgatccggcggagggggcggccaccgttgtgtccggccaggccggcaccatcagcgccgccgtgctggggatgcagggggagggctcctcctacctctacttcggccacgtgggccagctcctgctgggagaggagctggccaggcagggggtggagcccgccctggactatattctccgggatgtggagacccggctggacaccgccctctatctggtgcggggcggcacagcaggcaaggcgatcacagcagcgggggaggacggctccgccgctgaccggctggaggcgctggcggaggacgcgggtctgctggccggttccatgccccgcaccgtaaaggacgccctctcggatctctatgcccagggggccacctttctcccggcggtagaggcggacgaggctctcaccgccgccgggtatggcatattaaaaggggacagcctggccggctggtctgagggggacgccgccctgggggtcaacctggtactgggccaggtggacgccgatgtggtggagttgcccctggatggaggcggagtggcggccctgcgtgtggtgggggccaggacctccgtccgcccggtgatggacgggggcgcccttaccggcctgtccctcacctgtacgctggacgccaatatggcggaggggaatttggacctccgaacggaggaggtacacgcctccctcgaggcggccctggcccaggtggaggaggcgcgcatccggtccgcgctggaactggcacaggagctggacgcggactatttggggctgctccggcgggcggccctggcccggccctggcacaaggaggcgctggaaggggcctctctgggcgcgctggagctggagctgcacgtgacggccaagcttcagcgcagctatgacgccgcccggtgagggcggcagctcaaaggaaaggcggtatacccatgcctgacgaccgaatctccctgcgccagctcctggcgctcctcttcgctgccctcctggctccggccatcggcgtgctgccctcccagaccgccgccctggccggagaggcggggtggctgtccgccctggctgccctgccggtactgctggggctgtgctgggtgctctttgccctcctgcgcccggcaggggagggggcggggctggcccaggtcaccgagaccgtcctgggcagggggttgggcaagggggtacttcttctctatttattgtggggtctgcttctgctcagcgccaacgccaggcttttcgccctccgtttcctgtccaccagttaccggaacgcccccctgggtctgtttttgctgaccctgctggggctcaccctctggctggtgcgcaagccggtgcgggtgctggcacggaccggagaggtgttctacctggccctggccatcggcctgggcttctccctcatcctgggcgtactccaggtggagccccggcacatccttcccctgtggacggaggatcttccgggggtgctctccgccgccgttccggtgctgggcctgttcggttatgtggtctttgccgccttcctgggggggaatgtcacccggggagagggagaccgccgccgtgcgctatggtgggcggccgccttctgtctggtgcttaccgcccttcagcttgtctgcctgggcaacttcgggcccgggctgaccgctcgcatggacacgcccttttttatgatggtaaaggggatcggcatcgagggcaccttccaacgggtggagtcggtcatcatcgccctctgggtgttctctgatctagccctgctcaacctgctggcgggctcctgctccgtcctggcccagtccgtattctctttaaaggagcgcaagcacgccgtacttcctctgctcctgctggccctggcgggggcctggttcctctttcccgacgccttttccctggagtggtggatggagggcccggccaggattggcagcctgctcttcggcttcgtcattcctgttttgctcctgctggtaaaaaagctgcgcaggcaggtataagggtggcagatcttgtgcatgctatggattagaataccagtgatccggtccggtttgacagccgagaaaaaaacctgaaaaaaagagaaaaaggtgttgacaaagaggaggaaagctggtattctaactgagcgcctcacggagggcatgaaaaaacaggaaagcggacggaagagaccgggcggaagccggacggactttcggaagcgggctgaaaaaagtgcttgacaaatgagtgagggcgtggtaaactaaatgagttcgcgccgagaggtgggaacctgcttgaaaagaacaaaaagaacggctgtgaggctgaaaaacctcagaaaagtttgaaaaaagttcttgacaagcgaaagcgtgagtgctaaaataaatagcacgtcagcggaaaagctgacaggggcgtgtaccttgtaaattaaacaacgtgagagaaacacgaagcaccagaaaggacgagaagtccttctgagcaagcgcaagcttgatgaagaaggctcttgatttaatttctttgaagctatgaattaagcttcgataagatgatttgaggaacggagacgttctttagataccattttattgagagtttgatcctggctcaggatgaacgctggcggcgtgcttaacacatgcaagtcgaacggggtgctcatgacggaggattcgtccaacggattgagttacctagtggcggacgggtgagtaacgcgtgaggaacctgccttggagaggggaataacactccgaaaggagtgctaataccgcatgatgcagttgggtcgcatggctctgactgccaaagatttatcgctctgagatggcctcgcgtctgattagctagtaggcggggtaacggcccacctaggcgacgatcagtagccggactgagaggttgatcggccacattgggactgagacacggcccagactcctacgggaggcagcagtggggaatattgggcaatgggcgcaagcctgacccagcaacgccgcgtgaaggaagaaggctttcgggttgtaaacttcttttgtcagggacgaaacaaatgacggtacctgacgaataagccacggctaactacgtgccagcagccgcggtaatacgtaggtggcaagcgttatccggatttactgggtgtaaagggcgtgtaggcgggattgcaagtcagatgtgaaaactgggggctcaacctccagcctgcatttgaaactgtagttcttgagtgctggagaggcaatcggaattccgtgtgtagcggtgaaatgcgtagatatacggaggaacaccagtggcgaaggcggattgctggacagtaactgacgctgaggcgcgaaagcgtggggagcaaacaggattagataccctggtagtccacgccgtaaacgatggatactaggtgtggggggtctgaccccctccgtgccgcagttaacacaataagtatcccacctggggagtacgatcgcaaggttgaaactcaaaggaattgacgggggcccgcacaagcggtggagtatgtggtttaattcgaagcaacgcgaagaaccttaccagggcttgacatcccactaacgaagcagagatgcattaggtgcccttcggggaaagtggagacaggtggtgcatggttgtcgtcagctcgtgtcgtgagatgttgggttaagtcccgcaacgagcgcaacccttattgttagttgctacgcaagagcactctagcgagactgccgttgacaaaacggaggaaggtggggacgacgtcaaatcatcatgccccttatgtcctgggccacacacgtactacaatggtggttaacagagggaggcaataccgcgaggtggagcaaatccctaaaagccatcccagttcggattgcaggctgaaacccgcctgtatgaagttggaatcgctagtaatcgcggatcagcatgccgcggtgaatacgttcccgggccttgtacacaccgcccgtcacaccatgagagtcgggaacacccgaagtccgtagcctaaccgcaaggagggcgcggccgaaggtgggttcgataattggggtgaagtcgtaacaaggtagccgtatcggaaggtgcggctggatcacctcctttctaaggagacttcaacggaagtagttttctgttgtaacgtcctaaggtcagctttctggagcgaatggctttcacgttgtttaatttagagggtacactctcgggtacccgaacagagcccggcgaagcgggtctgttcgggagaggagacgcaagagagcgcagtgagggatggccgtgaggacgtcacgaacggagcggactttgcgtcgacgacgacgggcccatagctcagctggctagagcgcacgactgataatcgtgaggtcggtggttcgagtccacttgggcccaccaccaaaaccctgggggtttagttcagctggtagaacacctgctttgcaagcagggggtcaccggttcgagtccggtaacctccaccaatttaagaatggattttaacactcaagggattgagtgttaaaatctggccttaaaggctggaaggcggcaccttgaaaactgaacaatgtagatcgaaagtacaagagcaagcaacagagggcaaaacagcaatgttgtggaactaagatagaatggcgaaagccgttctagtaagggtaaaaacaatggagctaattgcaaaacttctgtgatgcctgcataattcatgattttgagaacagctcagagatgagactgttctacaaggtcaagctagaaagagcgcaaggggaatgccttggcatcaggagccgacgaaggacgtgacaagctgcgataagctgcggtgagctgcacataagctttgacccgcagatttccgaatggggaaacccggcagagcaatactctgtcagcgtgcgttgaatcaaataggcgtacgcggggaaccgcctgaactgaaacatctaagtagggcgaggaagagaaatcaaccgagattccgctagtagtggcgagcgaacgcggaagagggcaaaccggaggatttatcctccggggttgtggacagttttttagcaactggaactaggagaacggtatgggaaggccggccatagcgggtgatagccccgtatccgaaagggaaggttgtgcgactggatccagagtaccgccggacacgtgaaacccggtgggaagctggggggaccaccctccaaccctaaatactacctgatgaccgatagaggagcagtaccgtgagggaaaggtgaaaaggaccccgggaggggagtgaaagagaacctgaaaccttgtgcttacaagcactcaaagcccgttaaagggtgatgaggtaccttttgtagaatggtccggcgagttattgttactggcaagcttaaggcattcagtgccggaggcgcagggagaccgagtctgaatagggcgtatgaagtcagtggcaatagacccgaaaccgggtgacctatccatgggcaggttgaagtgggggtaaaaccccatggaggaccgaacgcacgcccgttgcaatggtcggcgatgacctgtggatagcggtgaaattccaatcgaactcggagatagctggttctccccgaaatagctttagggctagcgttggcttagattaccggaggtaaagcactgaatgggctaggggccgataaggttactgaaccctatcaaactctgaatgccggataattgatggccagcagtcagtctacgtgagataagtctcgtggacaaaagggaaacagcccagacccacagctaaggtcccaaagatacgctaagtggaaaacgatgtggagttgcgaaaacaaccaggatgttggcttagaagcagccactcattaaaagagtgcgtaatagctcactggtcgagtgactctgcgcggaaaatataacggggctaagcgtaacaccgaagcttgggctgcacagcaatgtgcggggtaggggagcgtcgaatatggggtgaagtcgcagcggaagcagcggtggactgtattcgagtgagaatgccggaatgagtagcgagaattatgtgggaatcataatggccgaaaatctaaggtttcctggggaaggttcgtccgcccagggtaagccgggagctaaggcgaggccgaaaggcgtagtcgatgcacatacggttgaaattccgtagccaccgaaccttaagtacactgacacatagagatagcgggacccgggcgttggttgacccgggcgtaagggaccgaactttagtagggaagtccgcgatgctctgtggcgagaaaaggtgtatggtatgctaaggtgcccgtaccgcaaaccgacacaggtagatgaggagagaatcctaaggccaacgggagaagggttgttaaggaactcggcaaaatgaccccgtaacttcgggataaggggagcctcctacgggaggccgcagcgaataggcccaagcgactgtttaccaaaaacacaggtctctgctaaatcgaaagatgacgtataggggctgacgcctgcccggtgctggaaggttaagaggagatgttagccgcaaggcgaagcattgaatcgaagccccagtaaacggcggccgtaactataacggtcctaaggtagcgaaattccttgtcaggtaagttctgacccgcacgaatggcgtaacgacttgggcgctgtctcaacagcccacccggcgaaattgttgtactggtgaagaagccagttacccgcaactagacggaaagaccccatggagctttactgtagcttaatactggaaatcggtaaatcatgtacaggataggtgggagacttggaagccagggcgtcagctttggtggagtcacccttgggataccacccttgatttgctggttttctaacctgcggccgtgaatccggtcgggggacactgttaggtgggcagtttgactggggcggtcgcctcctaaaaggtaacggaggcgctcaaaggttcgttcagcacggacggaaaccgtgcagtgagtgtaaacgcataaacgagcctaactgcgagaccgacgggtcgagcagtaacgaaagttggagttagtgatccggcggtatgcaagtggaagtgccgtcgctcaacggataaaagctaccctggggataacaggctgatctcccccaagcgtccacagcgacggggaggtttggcacctcgatgtcggctcgtcacatcctggggctgtattcggtcccaagggttcggctgttcgccgattaaagtggcacgcgagctgggttcagaacgtcgtgagacagttcggtccctatctgttgcgggcgtaagagatttgaagggagctgtccttagtacgagaggaccgggatggacgtacctctggtgcaccagttgtcctgccaagggcatagctgggtagctatgtacggacgagataaacgctgaaggcatctaagcgtgaaactccccctaagattagatctctcattcgaaagaagtaaggcacgacgtagactatgtcgttgataggccggaggtggaagcacggtaacgtgtgcagctgaccggtactaataagccgagggcttgaccttaacatggatgattgcaggcgcttgcgaagtgcggaagatttacattgttcggttttgagggtgcagcaccctggatggtggcgacaagcgcctttagctcagctggtagagcaactgactcttaatcagtgggtccccggttcgaatccgtgaaggcgcaccaatggcccgttggtcaagcggctaagacggcggcctctcacgccgcaaacgtgggttcgattcccgcacgggtcaccatcatttttctcttgacaaagaggaagaaaatgaatataatgacttatcgttgagaagaacggtaaggagaagaaagttgttagagtttcttttgcttacttttcttttcgaaggaaagtaagttggtgttgattgcggtgagggtccacccgttcccatcccgaacacggaagttaagctcacctgcgccgaaaatacttgtctggagacggaccgggaagataggtaacgccgacacaaaagaagggtctggcctgaccaggccggaccctttcatattcctccttagctcagtcggtagagcatgcggctgttaaccgcagggtcgttggttcgagtccaacagggggagccagaatgtggcttgccgccacagttgctgtgacggcaagcctactttttaaacgctgtggaacggtatgggcctttagctcagttggttagagcagccggctcataaccggccggtccacggttcgagcccgtgaaggcccaccatttaggggtatagctcagctggtagagcatcggtctccaaaaccgagtgccgagggttcgaatccttctgcccctgccatgacaaattacagcgaccgctgtcttttgatagaaagatggcgcggtagttcagttggttagaacgccggcctgtcacgccggaggtcgagggttcaagtcccttccgcgtcgccatttgctgctgtagctcagtaggtagagcacatccttggtaaggatgaggtctccggttcaaatccggatagcagctccaaaaacccccgaaaaccttggtttttgggggttttttgttgcaaaaagttgttttacggtgcgggtcaaaaatcctgacccacaccgtgacacacacgccgaaacggccggaaaggacaaaagagcaccggacgggaagatctgtcttcccgtccggtttttgcggctactcaaacggttatataacctgtcccaggacgctgcccatagtctgggcggcctcgtcctgcttctgccgcgtggcgtgggtgtaggtgcgcagggtgaacccggcatcgtagtgccccggcatggaggacacggttttgacgtccacgccgttctggagggctgtggtggcgaaggtgtgacggagatcatggaacctgatatgctccagtccggcgtccttcaggatcttcttatgtaggttgactaccgagtccgggtggtacatctcgctggtgaggggagaggggaacagatacgggctgtccgggtgcttctcgtgctcctgaatcagcagctccactgccgcttgggggatggacaccagccggacagagttctccgtcttgggccgggtcagttccagggaatcctctgggttgcgaacgtactgcctgctcaccgagatggttctgccttgggtgtctacatccacccaccgcagggctaccagttcccccttccgtaggccgctggccaattccagatagaacatgggcatgagccctcgcgcttgggcggcctccaggtaggcgtggatgtgctccggcggcaggatcttcatgtccagtttccggggcttgggcacaatacagtcctcgctggggtttcgggggatcagccgctcctttactgcccgatccagggcacagtggagcatcaggtggacgctgcgcacggtggtagtgctgagtcccttgtcctggttctttgtgatgtgtattctgccgccctccaataactctttgtagagcttctgtaggtgccgggtggtcagttccttcaacttgacgttcccgatacgggggatggtgtagctttcgatgatcagctcgtagcgattggctgtcgcggtgcggacgttgggcttggcgtagagctcataccaggtccgcagccaggtggccacggtgtagtcctcagagcgggctacatcgatacccttgacctcctccagtgccgccttgagcttttccttgacctccacctgggttttgcctaacacattccggatgactcgcttgccggtattggaatcatagccggcggtatagcgcccctcccagcggccgtccttgcgcttgcggatgttcccttccccgttggcccgtttctttgccatggtaatcgcctccttaccttctcgtggatagccataccaagcggccagagttatcaaactgttatcatttgcacttaaatattttggtcagtaacaccctccaatttgcgtttactcttcccacgcctaaaaacggcacacaggggcgatacggcgctcacaggggcctttctgcggccacctggcctgtctccaggagtagatagggggtgcgcccacagaggcaggcttccttctaaaggtctgcactccctctctttgtttatgcggcgcaggatttgagtgggcggctcctaaagaagccagtctccacatcgaattttagtgcggagactggggcttttatcagcccatctgccgtcccagctcgtggtcgtcggccttatggcccatagcaatcttctttctctgctccctggccagggtcttccggtcgccataccggcgcctcatagtggcgtccatcatttcctcctcggtacggccctccagcctggccagcagacggaggacatcttcggtcacgtcagcagccggcaaatcagaatgctgatcaccagggctgccgctgcggaactcaggatggtgcgggccgcccatttccggaaggtacgcatcagctcgtagccatcccctcggaattgcttggcctgctcggagagctgccttataaattcttcgcgccgattcccatcctgttcctgttgttctttcatttccgagactgtctcttgcagagatagacggaacctctgatgaagacggttggtctggctcaaccatcctgacagctgctgtgaagtagccagtggctccaggctttccttggtggccagcggctccatgtctgcccggatagtctcttggagcgccagggttttccgcaggacatcctccagccgctccacagtctggggagacatggtgtagaggacgtggggttgctggtctatcaaggtgggcggcccggcggacatcctctgcctctgcttcagcatgtccagcgcactgttgtgctgtatgctgccggattcggaattcatgctccatcttctcctttctgaatttttcctcgtgtagccggtcatcccggcacttcatcccggtgggggtggtgtaggtgatacacttccgggcgtcctcccagcgcacccggtaaccccgccgctccatttcccggatgaactcctcccggctgccggcacgctccatgaccgcctccacggtggtgatgagctggaacttccagctctctccccgcaccgcggcccgatactccccggtgcgtagccccttagtgcgccggttctgctgatacggtttgagggtggacaggccgtgctccaggcagagctggtcgctgaccgcccgcatctgctccagcgtcctaggcgtaaagtggagcttcttccctgtgtccgggtggacggagttgaccacgaagtgggagtgggggtgttccgcatccacatgggtggccaccagcacctcgcaaccggggaagaaccgctccgccagctccagggcgatctggtgggcttgtgccggagtcacgttttcctgcggagagaaggactggacatagtggtagaagaacgtgccgctggccttgctgtacagattcttggtggccatgaagctctgctgagccacctctgccccgcagttgatgccggagagatactcccgcccatctggatccaccgtctttttctcctgggagacgtaacggagcacccggcccatggcgccgacggtctgcttactctccttgataaagctgcacgtcgccatgggagatcaccccgcctttctctgtcagcagccggtttaccgcctcgtaggtcttgcccaatacctccatgcattcccgcaggtacaccgtctgcacccggccggtgtgggccagcaccgtcagctggttcaggttccggccccagccccgcagctccaccaggatgggcttgagctcacccaccacatagatgggttcctccagtgcggcccggagcagatacgcctgctggctcaggccggatctgcgtatcttcccttcgatctgccgccgttctgctttggtcactcggaaggcaaccacctggcttcttatcctctccgccatgaatttcacctccgtaaaagatctggtatggcgtgtccccatcgctgggaagcacaccataccagatcttttcgtggatagccagtgtaaccggccgctgttatcagattgttatcaattggccccgtggggtggcccccgacgggaaagtgggtgcgggcttctgcccgcaaaatgcgtttggcggccgcttgcggcaagccaaatgctctgcttgccccacccgagggtgggtaaatccgctcccccggccgtgcaagtaccaacggcacaggcgctctccgcactgcggggagatgtggaatttggggttatcctgcttcgcccctcgtccccgaagggcctccgaaactgggccgaacccggctctcaaaacctcggggaagggccctgcccctcccctcatcgaggcacacagggcttacagcgaggcacaggagccatctccggtgtgctcctgaacccagcggatgaactgctcctttggcacgaccatccggctgcctactttcagtaccgggaagcctggctcgtgcatcaactcgtatccgctggatggggacacacccagcacctgtgccaccatcttcgcattgaggaacagcggcagctcgcgatagctcctgtactcagatgctatcactgctccatccctccgttccgcaatgtcagctccgccacgtgcatccgctggttctgcagttccagatttccatctgagtgcggtagtgcgtgtcgaccacctcgtggaacggacagatggtatacatcagatgtccgttcatgggccgcccgtctcttgcacacatgatggtatacgccgtggtgataagcccgtgttcctccagcattgctacatatttgcgcacggtgttctcactcatgcctaccgctttcccgatgttccggtagctgggccagcactgatgggtcttccgattctccagatacttcagataacagtagactgccagctctccatgcgccagtcccagcagaaagatttcattagggagcgaaaagaaatgtgagagtttctgttggttgttccatccctggaaacgcaatgttcacctgttccctttcccggcggagcagtcactccgccgcaactgtcgtggagacttctctttgccgccgaccgtacggcaaactcatggttgactttttcttgcgcgagatgtagactcattaaataaaattatcttaattagactaagcatagcataacaaactttgtatccatcgtcgagtctaattgatgattatatataacgattagtctatccaaggtgacctaccatgccagactatgtattcaagacttatcttgccgacggcagagaacattttctctatggagagatgggggatagccgggcacagctcacaaaaaaagactttccgtttccggaaagcctgctgcgcttattgtatctggacatctgggcctatgacgggcagattaaacagtttgacaaactgctcatggaattgtaccgcaccagggaggagaaatgtgcccggcagcttcttccgctgctggacgagctggcggagagccacatttatttccagctgcttcgcctggactggcgggcgcggctccgggaagcccggaggcggaactacgagaatatccttgacctgctgccccacaaggagatcacccacatccccagcaacatacacgccatacagacccaggtgctgggcctgattcagaaggcgctggacacggacgcgcgtaagggttctttggagcagaagctggcggactactacgcccgggaggagcgggaaccgctgaaggtgttccacttccgcccccagctcatggattttgagcgggcggagggccagggctttgtggaggttctgcgccccaggagcatctatgacctcattgacttcagtgtgcgggagtgcatcaagcgggagattaaaatgtgggtgtgcaagaactgcggccattggtttgccattaccggaaggacgaatgccgagtactgcgaggtgacccgggacagcaagggccgtacctgcaaggagattggcgccatcgccctatggaacaaaaacaagagcgaggacgaggtcttcaagatttaccgcagagagtataaaaagcgctttgcctggatcaaggccaagcggatcgacccggcggtgttctacgagtggagcgccaaggcccgggagaagaaggacgcctgtgagcgaggggaacttaccctggaggagttccaggtgtggctgaagctgtcgtgagaaacaagggagcctgggccgacccaaacggtcaacccaggctgtattgattctaggcggcacaggggttgcgcatagccatactttgcatcgtcccaaaggaagtttacagttgcaaagtgttctgcaatattccatgagatggataaatagtaaccagcacggatgaagcaattgctccatccgcgctggccttttgtggagaaataggggagagaaccgttataccttgggaggcatgacttttgctgtgccagtaaccacctgcaccccgtcctggttggtacagacggtgtccagttctgcccggttgcgctccggattcagggaacggacggtgacggtggcggtgatggtatccccaatgcggacgggggagcggaaggagagttcctggcccaggtagatagtccccggccccggcagatgcattccgatgacagcggagatcagcccggccgacagcatcccatgggcaattcgcccgtggaactgggtttgccgggcgaaaggctcattaatgtgggcggggttgagatctccggtgacaccggcaaaggtgtagacgtcgtgctcggtgatggtcttggaaaaggaggccgtctggccggcctggagctgatccacagagtagctcatttcagaacaccttccgggtcagaccatagatctggcgggcttcatcgggagtggcaggttccagattgttcagacgcagggcctttacagcccgctccaccagttgggcattggatttggccagcacacccttgtccatgtagaggttgtcctccaggcccactcgcaggtgtccacccagggcgatggtggccatcatgatgggcaggtggccggaggagatgccgcaggccgcccaagtggagccctcgggcagaagattctttaggtacaccaggttctccacggtgttagtcatgccgccggcacagcctaggacgatctggtagtggcaaggtgccttgagcacgcccttcttcatatagtagatggtgttgtagatcataccggcgtcgaagatctcgatctccggcttgatattgctctcctggagggcatagcccagcttctccaggaaggaggggggattcatgaacacggtgcggttctgccagttgagggtgccggcgtcgtaggaggccagctcggggagcagttgctggaggggatagatgcgctcctcgtccccaaagtccacggagccggaggaggtaatgttgatgcacacgtcacagtccttgtaggcccggatgcggtccaccgtctccttatagaggttgaagtcggtggagggggtgccgtcggggttgcggacgtggacgtgaacgatggccgcgccggcctgccagcactcgtatgcctcccgggcgatgtcctccggggtgtagggtacggcggggttcatgtccttggtgggccaggagccgcacagggcagcggtgatgacacgtttgtttttcagatcagacatggttgatctcctttctgtcgggtgaaggtaatttcgggcggaatggtttcatagatcaacttgtgcaagcggcgtgccaactaaaaccgcgtcatgaggcgaaattgttaaaacgaaaacgaatgaaaagtcggattcgatttatcaaaaatcgaatccgacttaaatttgagaagaaatcagcggagaaaacgagccgctcgaacctacagatgaaatttttgtttgcggcgcatgatagacgcctgactggtgcccagggcctcagccgccttataggaatttccgtacttctgcagggcataggccacgtagttccggccgcactgatccagatactgctggagggagacgccggaggagatcatctgctcgtaccgggcggagacggcgggcgaatagacagaggcggagtcctctcctggacgctccggcaggggagaggcaggcgcgggatccaagaaggaggaaacatcaggaacggcaacctgccggcccaggctcatgaccaccgcccgctccacaaaattccgcagttcccgtacattgccgggccatggatattggatcatgagctggagtgtctgggggctgaactccttgtccttggcatacttgcggcagaagagcttcaggaagtgctgggccagcgggataatgtcctcccgccgctcccgcaggggcggcagccggatggggatcactgccaggcggtaatagagatccgcgcggaattttttctcctccaccaggtgatagagatcctcattggaggcggtaagcaggcggaagtccaccttcttggaccgggtggagcccagacgctggatagtcttggtctccagggcccggagaaccttgccctggaggttcaggggcatagagttgatctcgtccaggaagagggtgccgccgtcggccgcctcaaacaggccggccttgccgcccggggccgcgccggtgaaggcccccttttcatagccgaagagttccgcctccagcaggttttccggcagggaggcgcagttgatcaccaccaggggcttgccggaacgggggctggcgtcgtggatgtactgggccacaacctctttgccggtgcccgactccccggagatcagcaccgccgagtccacgacggccacggtggcagccgtggacagggccgcgcgcatggcggggctctcagcgatgacggcggagccctttaccggcggcgaagcccgcaggccgctgatggaggagacggactccgcctgggtggcctggtagtagagctggttcagcctgtccagggggcggactaccgccagaatgttccggattttgccggaatcgtcgaaaatcggggtggaaatgatcatctggcggatggtgtcccggccatagttttgggtgtccagcacgtcctgaaacatgaccacctggcgcttctcccggtagacgatatccgagacacagatgtcgatctgcccggtgttcaggaagtcgtggacattataatggagcagcacatccttgggcatgttcagggcctgaacataggcgctgttgacgaaaatatagttgcccctgtcgtctaacacatagacgccgtctggcaggttatccaggatgacctccagcaagtgaagctgatccatacggttcgttacaccccctatatcccgcagtaaagaggtacaataccagtataacagatggggcgccgattgtcacgaaggaagctgctttttccagcttggcacgcagtttgctgttacacagaaatgcaaaaatgataaggaggttttcccgaatgaaagttgcaattctgggttgcggagccatgggcaccgtgttgggcgcctacatgaccaagaacggatgtgacgtggagatgatcgacagctaccaggcccacgtggacgccctcaatgagaagggcgcccacattgtgggcaccgtggacttcactgtccccgtcaaggccgtcacccccgagcagatggagggcatctacgacattgttttcctcttcaccaagcagaccgccaatgacgtggtgctccccaacctgctgccccacctggggccggacagtacggtatgcaccctccagaacggcgtgcccgagccctatgtggccagctatgtgggggagtcccggactgtgggcggcaccgtcctgtggggagccacctttatggagcccggcgtctccgagctgacccaggacctgtcccgcaacgaccacctctttgagatcggagagatcgatggttccattggcccccgcattaagaaggtggccgaagtgctgggctacatgggccccaccgccgtgtctgacagcctgatggcctcccgctggggcaagctgatcaacaatgcctgcatgagcggcatgtccgccgcctgcggcaccacctttggcggcgtactggacaacgacgtggccagggcctgcctgagctatctgggccgggaggtcaagcagtgctgtgaggcggcgggctacaagctgccgatcctgctgcatgagcagtccccggagacgctgggtattgtcgaccaggccatgttcaacgctgaccaggagatgttcctcaccatgtactccgacatgcgcaccgccaaggccagcatgcttcaggacctggagaagggcaagcccactgaggtgcggatgatcaacggctacgtctgccagaccggcgacaagtacggcatcgaaaccccttttaacgacaaggtggtggagattgtcaccaagattgaaaagggcgagctgcccctgtccatggacaacgtgaacctcttcgaccgcaagctcttcgactacgagctctaccacgtgtgagcccagcgggcttctccgcgttatcttgacttgaccagaaagagagggtaatcttatgtcaatggtcggaatcattggcctgctgctggccatcgccatcctgatcttcggcgcctacaagggactgggcgccctgcccctgaccatgatcgccgccctggtggccatcgtattcaacggcatccccctgtgggaggggtttgccacccactacatggcgggttacaccagcgcctacatgagctacttcctcatgtttgcctgctccgctctatacgccaagctgatggacgagtctggctgcgccacagccattggctacaagttcatcgactggttcggccgcaagaacatcatgctggtcaccatcctcatcgtctccgtgctgacctacggcggcgtgagcctcttcgtggtagtgtacgccgtggccccaatcatgttcctgctgttcaaggaggccaacctgccccgccacctaaccatggcctgcctgatcgtgggctccgccacctacaccatgaccacactgcccggtaccccccagctgaccaacgtagtgcccactgagtacctgggcaccaccatgaccgccgccccggtgctcagcattatctgcaccgtggccatcttcgccccgtgcctgctctactgcacctgggctaagaacagggctgtggcccggggggaggtgtggtcctaccccgacaacgtggattccgccctgtttgagatcaaggaccgcagcctcctgcctcccgcttggaaggcattcctgcccattgtggtgctgctgctggtgatcatcgtgggcggccgcttcgtgtccaactccaccatgctggccacttgcgccatgctgctgggcgcagtcctcacctatgtgctcaatttccccaagtttaagggcaaggactggaaggccctgctgggcgacggcctgggcggcggtatctctggtatcggcggcctggcggccgtgctggccttcggcaccgtggtgcagaactccggtgccttccaggatatcgtggactgggtgctcaacctggacatgaacccctacgtccggggcgtgttcgccaccagcgtgttctccggcatcaccggctcctcctccggcggcctgcggctgatgtaccagtccctggcggacacctttatcagctccggctgcaatctggaaatcctccaccggctgacctccatcgccgccggcggcctggacaccctgccccactcccccggcctgttcctgatgttcagcgtcctggggctcaaccacaagaacgcctaccgccacgtgtttgcgtgcagcgtggcgattcccgtgatcgtggtggtggtggccaccgccatctgcgtgtttgccggtatttgattccaagcaagtacagacaacaagcctattttgacaggaggcagtcaccatggcagatcagaattggaaaatttccgcgctctacttcgggcagatgatcctgccccgcacctcgttcagcggcacgctggatcccgacctgaacatcgatataccgatattggcttcttgctgagaaatgggcgggaaaacgtcctggtggacaccggcatgcgggtagaatacttcgcacagatggccatcggcgatatgaagccaaagggcagcacggagatcctgctcgcctccctggcggaggaaggcttgaagccggaggatattgacaccgtcatctacacccatctgcactacgaccacgtcggcaacgcggatctgttcccagatgcagtgacctatgttcaaaaggcagagtacgacaatatgctgagcccctatccattcccaaaggcccggatggactatttccctgacaccccggaacgtctttctaaggtcaagcggttgcttttggtggacggcgacctgaagctggccaacggtctggagctctacctgacccccggccactccagaggcggacaaaccatcgtggtgcccacggagaagggccgctatgtcatcaccggcgacaactcggccacaaaatactgcctcttcgcggacatggataagatgaccctaatggacggcaccgtcatcaatatcacccctgaccacacgattcctcacctgacaggacgctttacgaccgaccgctttgccttctacgacagcgcgaggaagcagctggccctggcggagaagccggagcccgagtatttcctgctctctcacgatacagagacggcctatcgccgacacttcggttgagcaagggcgggtagtatcatgacggagaataaggcgccgcaggcgttggatgtgacagtcaaaaactacgagggtgtggcggatctctctcctgtggggacctttgtgttctgcatcctttgctttgccttttgggcggtggatctgggctttctgggggatggagccaccacggcgattggtttcctgggcctggcggtctttgtgccgtacctggtggccggggtggctctgagcaggaggggactgtgcctgggcgggaatacctacatactcttcggcgcggtgtttgggtcatgcggcggtttgttcaacacgtttgatgccgtgttcgcaagggccgggattccctttgactactctgtggtgggcatcgccttcaccctggcaggcctctatctggcgtgcatgctcccggcggtcaacctgccgcttggcaagctccccaccttatattgttttggccgggcagagcccttttattgattataccggcgcaattcctgagtagttggattggaacggtggctggacacatgattggacggagccagaagtttcccttttcttttgcgtcggcctatgctatattatcagcaaaagggcaggtgggagtgatggcggaagatgtattggcgctcaacggactctccattgagttgcttacacagctctcctatcggtctcaacttggcctgttactgaaacggacattgcggcattttgagcgagaggcactgatcgcggagttggtatccatgaccgaatggctggatgaacaaaccggaccctccgaaatcgcactggattaccgaatcaagagttatgcctccatcgtgggaaagtacgagcggtatttcaactcttcccgccatgtgagccaggtgtttaatgacgttctgggatttcgggctttctgtgatagctataacagtgtactggccctaactagtacatcattcagcgtggcagatttttccaggggcaaggcggtggatgacggttaccggggtgttcatctgtattttcaactggacaataatcactatcccattgaaatccaattcaacactctatacgatcggcagcttaacaactggctgcacgactatctctacaaaaagacatactccaatgaggtcggacagcagttgagagcccgctatgaaaacgggaaaatcagaaatcagtctgaatttgaggaggcgctgaacgatgtgctatctggtggctaaggatacagaaaagcggggctgttacgccctgaaaaccacccatggagagcggcttgtgaatttgaaacgggctctggagcaagaggtgggagtcaaaggtatccagctggtgaccattagccgtccaacggcctacggcgagtatgctccctatacatttgcaaaggacgagcaggagttcaagacgttggttcgggccatgggcacctgacccacacgaggaaaaaagcggacggaatcaacggaacagaaagtaccaaagaccgcatccttctggaacaaaaagaacccaaaagccctcaacctcaacgggttgagggcccccaattagttggtaaggatgagggctccggttcaaatccggatagcagctccacaaaaaccgctcttttcgcttgaaaagggcggctttatttttgggggagaaagaaccaccaactatactggtgggcttcccccgtatgctttagcaaaaagcagtgaaagtgacaagaaagtttcaaatagaagataatatgcccgtttacgggcggccgagcgcaagatgcaggctaaagatagcggtatgggccacttcaccctgtttttaccgcgtggtataggtgcgggtgcgcagggtaaacccggcgtcgtagtgtcccagaatggaaaaacctttttgacatccacgtcattttgcagggctgttgtagcaaaggtgggcctgaggtcgtggaacatgaggtgctctaggcccgtatttttaaaatttacttatagaggtttaccattctgtccgggtgcttttcgtgctcctggatgagcagttccacggcagcctgtgggatggacacctgcccgacggagttctccgttttggagcgggtcagctccagggagcagtcagggttacggacgtattgcctgcgcaccggaattgtccggccttggatgtccacatgtccaaccgcagggccgccagttcaccttttcgcagagcgttgtccaaatacaaatagaacatgtgcaggagtacccacaccctagcagcctccaagtcgtcccggatgtgctccagaggcaggattttcatgtgcagttttcgggcattagggacgatgcaggcactaacaataagctcgtaatagtttgaaatagcgtagcaaacgttaggctaggcgcaaagcttgtaccacgttcacagtccggtggccggctctcccgatgtccctgataatgacagccatccgccggcagaggtattttcttgcaattctaagtttggagtggtaaactgggcatgcacgcagcacagattggaaggaggatggagcatgaatcccgagagcgacttccggattgagagcacatatgacaggcaggcgtatcaggccatggcaaaggccacctggaagctgttccagaagcacaggatggaggtgatggcctatcccgccctgatcagcgtggctttggtgatcgccgttctgctggtatttaactggaatcatacggtcctgcccatacgcattttgggtattgcgtttattgttctgcagttcgcggtgatccccctgggcgcgcggcgcgctcaagccaagacgtgccggaaagcgatccgtgatgcggaaaaacggggcgaatatcccgcccgtgtggagtttttgttccaggacgaccatatccgtaccacagtggggaaggaagccacgtcggttcgctaccgggaggtcagccatttggccgctctgaaggactggcggttcctctatttcgggcagggggcgtatatcatccccgtctcggcgtttcgggatgcggcggagctggaccgcttcgatacgtttattaccgggaagtgcggcatgcccattgtaatactggagggggaagtacccaagagctgacggaacgcaagaaggggaggagacggatgcaggagtccgagcgtattttcattgctgaaaacgccacgctgctgcggggaagcgagcgggagctcaaccgacagctctttacgatcctgaacagcatctatgacggactttacattacggacggacaggccaacacgatcctgatcaaccgcgcctatgaggaggtctccggcctgcggcgggaggacgtgctgggcaaaagcatgcaggagattgtcgctaccggcatgattgaccgctccggctccctgggggtgctcaagacccgaaagccggtgacgctggagcagaccttccgcaccggcaaacaggcgctcatcaccagcaccccccactttgacagcagcggggaaatcaccatgatcatcacggtggtccgggatatgacggagatctacggcctgcagcggaagtatcaggagagcgaggagcgccgccgctccgaaatggagttcttgcagcgcaaccagaggtttgtctcccgcatggtggcggccgatccccgcacgctggaggtgctggcccgggcccagaaggtggccgccctggacacgacgatcctgctgctgggggagaccggcgtgggcaaggagcagttcgcgcggtacatctacgaaaactccgcccgcgcccggcagagcttcatcggcatcaactgcggcgccatcccggccagcctgatcgagagcgagctgttcggctatgagaagggggccttcaccggggccagcaaagagggaaagatgggcgtgtttgagagcgccgacaagggtaccgtctttctggacgaggtgggcgacctgccccttgagatgcaggtacatctcctccgcgtcctgcaggagatgcaggtaagaagagttggaggcgtacgctccatctcggtggatgtgcgcatcatcgccgccaccaaccggaacctgctggacatggtgcatgaaaagaccttccgggaggatctgtactaccggctcaatgtggtgcccatcgagatcccgcccctgcgggagcgcaagcgggacattcgcccgctggtggagagctttctcaaggacatgaacaagaagtaccgctatcagaagcggtttgccgacgcagccatggagattctatacagctacgtctggcccggcaacgtgcgggagctgaaaaacgtagtggagcaggcggtgatcctcagcgccggggacgagatccagccctccgagctgcccattgcctgccggtttgagggggagagccacggcggggacgagactgggcgtgtgaacctgaagctggaggtggcgcggttcgagtatgagtatatctgccgcgcctatgagaagtacggaacggtgcgggccgcggcggccagcctggggatggacagcgccacctttgtccgcaaacgccgcaagtttgaggagctgctgcaaaaatgaaacgggcgctgtaaaaatgcaccagcctacagaattgcggcaggtcaattggtttcagttagataagtttaaattaaccgatgatctcttgatgcagaaatgcagcaaacagggagagggatttctcgggggaaaagcccaatcaactgcgcggcagttgattgggccctttttttgaagttggcatgtgaaatgcataaaagaaggagtgtcacgaacagttggccaactgtcgcagcgagactgacaaaactcctgtttgggatgagaaagagggaacgtaaatggcaaacgaacaatttgtcagccgttaccgtaaatacggtgaagaacagccctactggaaggccggtattttcaagatccgcctcccctttgtccactacaaatggtcggttcccgagatggtgcaggccgtgttcatgtgtgcgacctgcctgggcgctatccccgtgctgcaagaggtcctgggcgtttcgtacggtgtagccctgtccatggtcatcattaacggcttcttctataacctgcatgtgttgctgggcgaccccgtggtgcccgggtggatcacccctgccattcccatcattaccgccttcctgaccgacggatatgagatgggccctgagcgtacccaggcgctgattgctatgcagttgatcctgggccttatcttcctggtgttcggcatcaccggcatcggcggcaagatggtacacttggtgccaaactccgtaaaggccggcgtactgatgggcggcggcttagcggccatcatcggcgagatgggagaaaccggccgtttctggacgtatcccatctctattaccgtgggtgtgctggtggcctacttctgcctgttcagtcccatatgggccaacctgcgccggaaatacaaggccattgatttaatcggcaagttcggtatgctgccggctatcatcatcggtgtcgttctgggccccattgtgaaggagatcgcggtgcctgctgttcagttgtggcccctcatcaagatcccagagttcggcaacatctggaaccagttgtctccctttgccatcggctggcccagcgcggcgacctggattgccgccatccccaccgccatcgtggtgtatatcattgcctttggcgacttcgtcacctcggaggagctgctccgctccgccgatgaggtccgccaggatgagaagattgacttcaacgccaaccgctccaacgtcatcagcggcatccggaacgtggccatggcgctgtgctgcccctacacccagacctgcggtcccctgtgggcggccgttactgccgctgtgtcccagcggtacaaggagggccccaaggccatggagtccatctactccggtgccggtaccttccgctggtgtacctttatttgcgtggccctgatccccatctcctccctgctacagcccgtgctgcctgtagccctgtccctgaccctgatcgtgcagggcttcatctgcacccaactggccatgaacatgtgccgcaccgacatcgagcggggtatctgcggcgtcatgggcgcggtgctggccatccagggtgccgcctggggactcgcagtgggtctgattctgttctttatgctttttgagggcaaaaagaaggcctccgagcaggtggccgtcggtgccgccgatgacaaggccaaccagtagttccattgagttctgagtattcaaaaacatagattgattgaatctgattgagaaaggaagtcctctattatggcactcatgaccggcgaacagtacatcgaaagcatccgtaagatccccatggaaatctacatgttcggcaagaaggtggagaatccggtcgacaatccgatcctgcggccctccctgaacagcgtgcgtatgacctatgacctggcccagatgcccgagtatcaggagctgatgaccgccatctcccccgagaccggcgagcgcatcaaccgcttcacccatatccaccgctccaccgaagatctgcgcaacaaggtgaagatgcagcgcctgctgggccagaagaccgccgcctgcttccagcgctgcgtgggcatggacgccttcaacgccgagtactccaccacctatgagatcgacaagaagtacggcaccagctatcatgagaacttcaagaagttcatgctctactgccaggagaacgacctgaccgtggacggcgccatgaccgacgtcaagggcgaccgctccaaggccccccacgcccaggacgaccccgacatgttcctgcatgtggtggagcgccggcccgacggcgtggtggtctgcggcgccaaggcccaccagaccggcatcatcaacagccacgaggtcatcgtgatgcccacccagtccatgggccccgacgacaaggactacgccatctccttcgccgttcccctggacaccaagggcctgttcatgatcatcggccgccagagctgcgacacccgcaagctggagggcagcgagatggacgtgggcaacagcgagttcggcggcgtggaggccctgaccgtgttcgaccacgtgttcgtgcccaacgaccgcatcttcatgaacggcgagacggagtacgccggcatgctggtggagcggttcgccggctatcaccgccagagctacggcggctgtaaggtgggcgtgggcgacgtgctcatcggcgccgccgccgtggccgccgactacaacggcgccaacaaggccagccacatcaaggataagctcatcgagatgacccacctgaacgagaccctgtactgctgcggcatcgcctgctccgccgagggcgcccccaccgagagcggcaactacatgatcgacctgctgctggccaacgtctgcaagcagaacgtgacccgcttcccctatgagatcgtccgtctggccgaggacatcgccggcggcctgatggtcaccgcccccggcgaggccgacttccgcgacgagaagctggggcccgtcatcgacaagtacctcaagggcgtgtccaccgtctccaccgagaaccgcctgcgcattctgcgcctcattgagaacctgtccctgggcaccgccgccgtcggctaccgcaccgagtccatgcacggcgccggctctccccaggcccagcgcatcatgatctcccgtcagggcaacctggcccacaagaaagagctggccaaggccatcgcccacatcaaggagtaagcaaaaaccatattcgaatcgcatctgtattcgaccggagggcggcggcaatccgccgccctccggctttctaaaaggaggcatccgccatgtatgaggacatcgaggccgtgctggacgagcacgtgcgcccgctcctgcgcacccacggcggtgagatggagattatcgaggtggaggacggcgtcgtccgcttcaagctcaagggcaagtgcgccggctgtccggcggccgacctgaccaccgaggagctgatccagaccgcgctgaccgagcacctcccgcacatcaagcgggcggtgctggtgcaggatatcagcccggagctgctggacgaggcccgctccatcctgaagatgcgccatggcggatagacggcagatcggcgtccgctactgcggcggctgtaatccccggtatgaccgggtggccttggtcaagcgcatcggcggctttttcccggaggcggagttcgtcaccgcccaggctggggtgaagtacccggcggtgctggtggtgtgcggctgcccctcccgctgtgccaacgtcagcgatctggcagtgcccgccgggcggctgatctacctcagcgggtgggaggagctgctgccggcgaaggagaagctggccgaggccctgaaggggcagcaggcgcggagcctgacccacgaggaggtgctggatatcctgccccaccgggagcccatgctgttcatcgacacagtgagccgcctggtgcccggggaggaggcggtggcctccttccgcgcccggccggagctgccctgcttcgcgggccacttccccggaacgccggtgctccccggcgtctacaccatcgaggccgccgcccaggcggcggacatcctgatgatgaccacggagcgctacgccggaacgctccccctgttcatgggggtgcgggaggccaccttccggcggaagattctgccgggggatacgctggaaatccacgtgtccctcctggaggagaaggcggagcgggccatcgccgcctgccgggggcaggtgtttgtggagggcgtgctggcggcggatctggagctgcggctggccttccggtagcacaacaaaaaggagacaatgcaatgacatacgcaatcaaggccccggcccgctacgcacagggcgcgggagagctggccaatctgggccgcagcgccaaaaagctgggggataagttccttgtgatctgctccgacaacagccgcgggcgcttcggggcccaggtggaggccagccttgccgagcaggagaaggaagcggtattcaccaccttccacggcgaggccaccaaggacgaggtcttttccaagatggacgagtgcagggcccagggctgcgatgtggtggtgggcatgggcggcggcaaggccctggacaccgccaaggccgtggcggaaaatctgggcctgccctgcgtcattatccccaccgtggcctccaacgacgcgccctgctccggcgtggccgtgctctacaacgacgccggggtggttatcaaggccgtgctcatgcgccgcaacccggatctggttctggtcgataccggcatcatcgccaacgcccccaggcggctctttgccgccggcctgggcgacgcgctgtccacctggtttgaggcccgggcctgcaagaacagcggcgcccgcaccatggcccggggcaacgtgtccaacaccgggctgatgatggcccgtctctgctacgacctgctgatggagaaggggcgggacgccctggccgcggtggagcggcacgaggtcacccccgcgctggaggacgtggtggaggccacaatctacctcagcggcctgggctttgagaacggcggcctagccgccgcccacgccgtcaacgacggctttgcccaggagccccaggcccacggcatgtaccacggcgagaaggtggccttcggcaccctggttcagttggtgctggagaaggccccccaggaggagctggagcaggtgctcgcgttcctgcgggacaccggcctgcccctgaccctggcccagctcggggtgaaggagatcgtgccagagaccctgaaaaaggtggcggaggccgccgtggtgcccactcagtccaccaagaacctgcgcgccgatatcaccgcccaggaggtctaccacgccatcctggaggccgaccgcatcggccgggactatctggcacgctgagcccaatcttaaaatccaaagaatagagggtgtgtatcgtatgaattggaaggaatattacaagcagcacctgatgagcgcggaggacgcggtcaaccacatccagtcgggcaaccgggtggtggtggcccacgcctgcggcgagccgtcctatctgctggatgtgatggtggccaacgccaaggcctacaagggtgtggagatcgtccacatggtggccatgggcaaggccgagtactgcaagcccgagtatgccggtaacttccgccacaacgccttctttgtgggcggcaccagccgggacgccatcgccgagggccggggcgacttcacccccagcttcttctttgaggtgccccgccagttcagctccactatgccggtggacgtggccatggtcatggtgacgcctcccgatgagaacggcatgtgctccctgggcgtgtcggtggactacaccctggaggccgtcaagcaggccaagctggtcatcgcccaggtgaacccccagatgccctggaccggcccctacagcctggtgtccgtcaaggatctggactgcatcgtggagcatgaggcccccatcattgagctcaagccccccaagatcggcgacattgagaaggccatcggtgagcactgcgcctccctggtgcccgacggggccaccctccagttgggcatcggcgccatccccgacgccgtgctcctcttcctcaagcacaagaaggacctgggcatccactccgagatgttctccgacggcgtggtggagctggccgaggccggcgtcatcaccaacgccaaaaagaccctccaccccggcaagtttgaggtggcgttcctcatgggcacccgccgcctttacgacttcgtggatcacaaccccgacgtggagctgcgccctgtggactatgttaacaacccctttgtcattgcccagaacgagaacatggtgtccatcaactcctgcgtacaggtggatctgatgggccaggtggcctccgagagcatcggccccaagcagatctccggcgtgggcggccaggtggacttcgtccgcggcgcttccgccagcaagggcggcgtgtccatcatggccatgccctccaccgtcaagggcaaaatctccaagatcgtgccgctgctggatgagggcgccgccgtcaccaccagccgcaacgacgtggactacatcgtcaccgagtacggcgtggccgcgctgaagggccagaccctacgccagcgcgcccgcaacctcatcgaaattgcccaccccgacttccgcgacgagctcaaggcggagtacgagaagcgcttccactgcaagtattaagcggcatggggcgggcctccggcccgccccatttggtgcttacgccgcgggatagaaaggaaacgagctatgacaaatctggagaagtatgaccgcctgttcctcaccgccttccgggtcaagccggaggagctgcccggcctcaagtaccggggcatccccctgtgggactcccttggccacatggatctgatgggggacatggaggagaccttcaaaatcagcatcggcaccgccgacgtgctggatttctcctcctatgagaagggcaaggagattctggccaagtacggcgtggagctctgagccgtgctgcgtctggagcggtggacggagccgctggcggagagcaactgctatctgctgggggaggcggggcgcgcggtggtcatcgaccccaacgatcccagggggccgctggagcggctggaggcgctggggtggacgccggaatggatcctcctgacccacgagcactgcgaccacatggccgggctggaggcgctgcgaaaccgctggcccggggtgcgggtggcggccaccaccgcgtgcagtgccggcctgggggacacccggctcaacatgacccggaggatggaggtctatctcgccttccggggcaagccgggggtgtcctatccgcccttcgtctgccggccggcggatgagacctatgagcacgcctgggagtgcgtatggcggggacaccggctccgcgccgtggccctgcccggacacacgccggggagcgcaggaattttcctggacggggacatctttttctccggggactacctgattccgggggaggaggtcatcctccgcctgcccggcgggagcgagacggactaccgcgccgtcacggagcccattctccgggggctgccccccggcctgcgcatctgccccggccacggggagccctatattctcacaggaaaggagtgaagccggtgtggagctgaacacgctgctgcaatacaagccctattccacggcccggacggagaagcgggcgctttacgccggactgctcaccgggctgacccagtttcaccgggagcgctgcccggagtacggccgcctgctggacgccctgggctgccccgcccacatggactgtacggtggagagcacccccatgctgccggtgtccctgttcaaggaactggagctgcggagcatcccggagggagaggtattcaagaccctcacctcctctggcaccaccgggcagcgggtgtccaggattttcctggacggggccacctccgcctgccagcagcaggccctctgccagatcatgtccgacttcctgggggagcggcggctgcccttcctggtgttggacagcaggcaggttctgcgtaaccgcgccatgttctccgcccggggggcgggcattctgggcttttctatcttcggcaccaggccctgctatgccctggacgagcacatggagctggatctggacggggtgcgggccttcctggaggagcaccagggggagaccatcttcctcttcggcttcaccttcatcatctggaagcacgtcgtccgcgccctggaggagcggggggagaggctggacatccccaacggcatcctggttcacggcggcggctggaagaagctggccggcgaggcggtgtcccccggggagttcaaggcccgggtggcggcggccaccggtgtggagcgggtaagcaactactacggcatggccgagcagaccggctgcatttacatggagtgcccccagggccacctccacgccagcctgtggtcggatatcgtggtgcggcgggggcgggactaccgcccctgtgagcctggggaggagggggtgctccaggtgctctccccgctgccccgctcctatcccggccactccctgctgaccgaggatctgggcgtgctgctgggggaggacgactgcccctgcgggcgcaagggcaagtatttcaaggtgacggggcgggtgccccgggccgaggtgagggggtgcagcgatacctatgagggataacgtcacgcttctggccggggcggagcaggtggacgccgcaccctggcccccctttgaccccagggcggtggacttcctggcggagctgtccgccgaggtgctccgcagcccggacacccggcggcaggaggcctccgccgccttcggcttctggtgccgccgggcccgcctggaggccctggccgcgcgccacgcctccccgctgccccggctgggccgggggctggccttccatctggcccccgccaatgtgcccgccctgtttgcctacaccctggccatcggcctgctggcggggaacgccaacgtggtgcgcctgtccagccggcgggtggagggggaggcccccctgctggcggccctccgccgggtgctggagcggccggagcacgccgccgtgcgggcccgcaccagcctgatcacctacgggcgggacgatgccgtcacggcggactactgcgcccgctgcgacgcccggatcgtgtggggcggcgacgccacggtggcggcggtgcgggccatgcccatgcccccccacgccgtggagctgtgcttccccgaccgctggtcgctggcggtgttcagccagcgggccttctccgccctcacgccggaggagcggggggcgctggcccaccggttttataatgacacctaccagatggatcagaacgcctgctccagcccccagttggtgctgtggctggaggacggaggagaccccgcctgccgcggccggtggtgggaggcggtggccgccgaggcggcggagcgctaccccttcggccccttccaggcggcccgcaagctggagcggctgtgcctctgcgccatgaccatggaggagcccgccgtcgccgccgtggagcgctatcagggcaacctgctctatgtggcccggctggcggggctgtccggaagcctgccctccctggccgggggcttcgggctgttctttgaggcggccctgcccagcctggaggcgctgccccccctgctcccgcccaaggcgcagaccctggtgtgcggcgggctggagccgtcggagacggccgccctgctggcccgggcgggggcgcggggcgtggatcgggtggtgccgctggggcaggccctggagatggatacggtctgggacgggagggatctgatcgccgccctgtcccgcatcattggataggaggagcacatggaactgtttgcgcgctgcgaccgggagacggagcggctgctggccgtcaccgaggaggggaaacggtacaccctgggggatttgaacgccgccgcggagcggattgccggggccgtgggggagcaccggctggtctttgtgctgtgtgagaacacccccggaaccctgctgggctacctggggtgcctaaaagcgggagaagtgcccctgctgctcgacgcccacattgcgccggagctgctgcgcggcctgctggagacctaccgccccgccttcgtccatgtgcccggcgacctcccggcggagacggggcgggtgctggagggttttgtcccggcgctggaggtggaggacagcgttctgctccgccgccccggcgggcaggggccggagctccacccggagctggccctcctgctcaccacctcgggcagcaccggcagccccaagctggtgcgcctcagcggccggaacctggatgccaacacccgctccatcgtggagtacctggagctggacgagggccagcggcccgtcaccaacctggccatgagctactcctacggcatgtccatcgtcaacacccacctgctggcgggggcggcactggtgctcacccggcgcagcgtgctggagcggcccttctgggagctggtggagcgggagcgggtcacctccctggccggggtgccctacacctaccgcatgtaccggcgggcgggcctgctggagatggagctgcctgcgctgaacaccctgacccaggcgggcggcaagctgccggaggcccttcacctggagtttgccgactgggcggcgcggacgggacggcgcttttttgtcatgtacggccagaccgaggcggccccccgtatgggctacctgcccgccgagcgggcggtggagaagtgcggcagcatgggggtgccggtgcccggcggtcagttccgcctgctgggggaggacggcgcgcccattgacgcgccggacaccgtgggcgagctggtctaccgcgggccaaacgtggccatgggctacgcccggcgggcggaggagctggccctgggggacgagtggcacggggagctccacaccggcgatatggcccggcgggacggggacggcttctactacatcgtgggccgcaagaagcggttcatcaagctctacggcaaccgggtgggcctggacgaggtggagcggctgcttgccgtccgtttcccggacacgggctttgcctgcgtggggagggatgacctcctccggatctttcacgacagcgccgatcccgccatgaccggggcggcggcggagtatctcagcgaacagatgcacttcccggagcgggtctttcagatccgggccttggaggccattcccaagaatgaggcgggcaagacccagtacagggcgctggaggagatgcggtaacaccggccgaagtatgctgtatatgagtcgggccgccgggaattcccggcggcccggcttgtatttttcagggagctgtgctatgctgggaccacggaacaaaagagaagcccggctcagacgccggagccggccgcgaatcgcggccggtcccgcagactcacgcgtattcgcttcgctccgccgaagcgccgcagcggtagttcagcacacctgcggtgtgctgggggataccgccgcgccgttcgccatacagcaggttttgttccgaaccgggaagggaggggcggccatgggaatcgtctatcaagagggcccctccctggcccgggacctggggcttcccctacgcaccctgtatgccgtcagtaaccggattccagcccactaccaccgggcggaggttcccaagcgggacggcggagcgcgggtgctccgggtgccggaccctgtgctcaaggacatccagcggcgcatcgcccgggtgctgctctcgggcatgcccgtgtcgccccatgccaccgcctaccgatacggcgcgggggtggtggagaatgcccggcggcatgtgggccgccccgagctgctgaagctggacattttgcactttttcgacagtatccgctatattcaggtgaaggaggcggccttcccggcggagatctacgccgagccgcaggagcagtgcctgcggcgcttgctggggcaggtggacttttggctccaggcccagccggacagccaggaggcggcggagtaccgccgttggctgctggacgagatgcgggatgggcgttaagcggggagggcatatgggaaacggggtgctcctgactgcggcgatgtgatggcttcctactgcttgtgatatttctataaaatatacatttttcttgtggcgaagacggaagtatattataataaatattttgtgagaactggcaaaaccctgtgaaacagcgcattacaccgcatttcctgacaacaagcccctcaaattactacgaatttactactaaggaatgaactttgatgcgacgaaacacagagaaatgcggacatacggtttagcgccgctctttgaattgttctctaaatcacatatctcccgactggataggccgtcttttccgaatggagaaggcggctttttcatgcacttacatagccgcctatttcgccgcaggcggctaaatctatgaaaggagggaaccccaaaatggcgaaaccaaaggtaatcagcgtagcaaatcagaagggcggcgtcggcaaaagcaccaccgtctacaacctgggggtcggcctcgcgttggaggggaagaaagtcctgctgctggatgtggacccccagggcgacctcaccaagatgctggggcagcgcaagccccatgatctgcccctcacccttgccaatgtcctgaacgacgtagtatcgggaacaatgccccgcgaccacccggagatcatgcaccaccatgagggctttgactttgtgccaggaaaccgcagtctgtccgccgtggaggtagggctggtgaatgtgatgagccgtgaaacggtgcttcggcggtatgtggacagtgtgaagcgggagtacgactatgttctgctggactgccggccttcgttgggtatgctggtcatcaacgccttgtccgcgtcggactatgtgcttgtccccgtccaggcggactatctggcggcggagggcatgacggagctggtggggacagttcggagcgtccagcgtcagatcaacccgcggctaaaaatcggcggcgtgttcctgactatggcgaatgaaaccgcgttccgcagggacatcgtgaacagcgtgaaggagaattttgggcggcgtctgcccgtgctggacacggtgatcccggccacggtgcgtctggcggaggtcagcacggcggacaagagcatttttcagcatgaacccaggggacgggcagcagacgcctaccgcagactgacaaaggaggtgttggaaattgggcaaaaggagcgcagccggacttctgacctcggtagatagcatattcaccacccaggaggaacgggacaacgcccagcgcagttatgtgaccgacctgcctgccgcggagatcagcgactttcccaaccacccgttcaaggtacggatggatcagagcatggtggaactggcagagagcgtaaagcagcatggcgttctggtcccctccctggtccggcccatgccggacggcagctatcagatggtatcgggtcaccggcgcaagcgggcggcagagctggcggacctgcctacggtgccctgtattatccgggagttgacggacgatgaggccatcatcgtcatggtggacagcaaccttcagcgggaacagatattgccgtcagagaaggcgtttgcctacaagatgaagctggaagccatgaaacggcaggggcaacggacggatttaacttctgtgccagtggcacagaagtctggcggcaaaacttctcgtcaacttttgggtgagcaggtgggagaaagtcaagaccaaatacgccgatatattcgcttaaccaaccttatcccggaattgctggacatggtggacaattctgtgctgaaagaagccggcaagttgcaaatggccctgcgccccgccgtggagctgtcctatctgccggaggccgagcagaccgccttgctggaggtcatggagggagaaatccgcaccccatcccatgcccaggccatcaaaatgcggagcttttccgagcaaggcaagctgaaccctgatgtgatcctctccatcatgcaggaggaaaagcccaatcaggtggagcaattcaaaattcccagggaacggatcgacaagtttttcaagccggggacgcccgcgcagaaaatcgaggacactatcgtgaaggctttggaactgtaccgcaagcgggagagggcgatggaacgatgaacgccacacctgggggatggtctgcccttttgcggccccggtacgcctgccgctccccccctctcacactctccccccaaacccgttgtaccaggtgaaaagataggctttgaccatcctttttcagccggtaaaagacctttggagaacagcgcgcaagaaaaccgaacacgggcattgttggacctcatggcgtgccatgaggattttttgtgcctaaaatcaaaaacatggaggtagttttgttatgaagcggaaacccctgacccacgcggcccggctgctgtgcgccctggctctttccatgagtctggcccctgccgcccttgccgccgacccgtctgaacccacccagccgtccccctgctatcccaccgccgtcacccggagcgaggacggtactgagatcaggaaaatgtacgacctggggccggaggatgaccccggcggcatcccccggtccgactttgaacaggacggctaccactacaccctcacggacctgctgaaacaggaactccccgccaacgagagccgccagcatacagaaaccgtgtccgtgaacagcaagagcaaggacatgggcgcggtgctggccctgctgccgcagacaaaggagtttatcacggaggacggcctgtccggggtgctgaccctgaaactggatacggtgaaggtggaggtggccgggtatggcagctccaccaaaaccgtgaccgccacccgcacctatcccggccttgccaaccaggacacgcagtatatccccaaaaccatccaggacggtggcaattccatgaccctccaggctgtggattggcagaccgagggggacggccattttaccgctatggcctcctactccggctccgccaccagctcctatgtgaagggctataccgtcaccgccgactacgcgggcaccgtgagccgtatcaacctgaataaaatccgctatgtagcgatcttcgagggcacggccctggaccccgcccccggcgaggcccccggagatagttccgaccccaacacccccgccgaccagactgattccaccgggcaggaggcccaggccggagagaagaacagcgtccttccggttgtggccgttgtcgcggcggtgctgcttggaggcggggcgttctacttcatcaagcgacggaggtaatacgatatgaagaaactgaccatgcttttgtctctgctgtgcctaactgcggccctggctgttcccgccagcgcgttagagtatgacatcgccgcccccggcgatccggagtatggcaagcctacttcggtggagcctgttgccacggcggaccgtggtgagctttccaatgtggatgtgagcaaaaacgcggctctggtcccgcccgcctttggcagccccaccgcctacaccctgaataccggcactccgctgacccccaatttggcccccggctatatgctgggcgatggtgccgttatcaatggcagcgccggcaccaccgtcgctccgcctgattattccggcttccccagcggcggcacatccagcgtcctccccaccatcggcttcacggaggtcacatcagacctctactatcagggcggctacctcgccaccttaaaaatccccagcattgatgtcaatgtgaaggtctatgaggggacgggaagcgccgtgctgagaaagggtgcgggccattttgaggacaccagcgtttgggccggaaacgtctgtttggccgcccataacaggggcgtgaacgaccattttggggagatccacacgctggatgtaggagataagatcaccctgaccaccaagctgggcaagcgcacctacgccgtgaccagtgtgaacaaaatcagcgaactggacaactccctgctgtctcccactgcggagaactgtatcaccctctttacctgtgtccgcaaccagagcgcctaccgttgggcggtccgagccgtggaggtgtcataaccacccgctgaaaagaaaattgcaccttagacagtttttgccctcttatggtacagttgggacagcggcatcccaatctatcacaaggaggtcattccatgatgaaaaacagtctgaaacgctttaccgcagtcctcgcctgtacagccctgaccgctgccctggctcttcccgcgcgggcggcggaggatcagcccatccgggtaggcagctacaagggcaccatgctggaggtgggagagcgcagcggcttggtgattggtcctggcgggtcggcgtgcaccgtgacttccagcgacccggacacggtggaggtggaacaggtgatgaacttctggacagccgttgccaaagcggaggggagcgcggagatcaccgtctccaaccagaccggggaaaccgccaccctgacgctgaccgttggctcccacgctccgcaggctcccaccgtcgagagtagccccgaccaaggagaggcgttggatgtgcggctggagctggtacggctggtcaatgaggtgcgccgggagaacggtgtggcggaactgcctgtcagtgaggccctgatgagcgccgcccaaaccatttccgataagaagtacacctggcaccacaccaaggaggaatgcgaggcggccctggcctgcggctatccctatggcttcggcgtaaatctgactgtgtttaccggcgtttccacggaggacaccgctcaacacgccctggacaactggctcaactcccccggccattttgaaactatgattaagccggactgtgacagcatcggcgtgggcgtgacagagagcggcagcgtgacctattgctacctgttcgtgggtcgcccaaacacccacaatccctacgaataattgagaactgaacacggacacggagaggtctttcagccccaggctggagggccttttcttatgcccaaaaacggaaaggagtttttcactgatgaagaaaaaccgttttctcacccgtatgacggccctgctgctcgtgcttgtgtgtatgctgggcctgctgcccatcgcggcgttggcggcggacgcccccagctctatcaagctggaggactgcacccacaatggcgtccactatgaatctcccagcctggggacctgctggctccatcagatgaccttcgattacaaccagaaaagcactatcggcttctgtgccgagcacgggaaaggcatgggctggtccctggagggccagacctggggcaaccccaagcccatcaccgaccctaccgtgcagaccatgatggcctactactacgcccataccaccggggtattcaccgatcaagcccacgccctgggcgtggatgagatatggggcagcgagtattcctggaccatgaacgcctgggtacaggctatcgtctggcgctacaaggccggtctgttgaatgacccggctaccgcctgcgccgaggagttggtctgcgtttataatagcctgcaccacggcaattacagcggtgtagatgacctgctggatgggatgtccttccgcgaccgtgcccaatatatcctggacctgggcaaacagggcgtatggggcgattgtaccgtccatgagtacgcctataccggctccagcaccagctcccatcaggctaaggatgtgcaggccattatgatcggggagctgaatgttatccgcgagaaatacgatctgaccgtgaaaaaggtggacgccaccaaccccaacaagggtctgcccggagcgcggttcatcgtgcgctcggaaaacgggacctacgagaaggaggtcgtgaccgggagcgatgggacctacaccctgtccggtctggacgcctccacatattccgttgttgaactggaagctccggagggctatgagatcgacaacgcggggccgcagtatgtggctttgcccaatggcggcagcaataccgtgaccgtcactttcctggacagcccggagatcaccagcgagggcagcatctgcaaggtggatgcggatgatcctaccaagggttttggccggagcagtcatcaagattgaaggcaccgacaacagctttgtgggcacttataccaccggggcggggggctatctggaggatgtgccctgggacgccctgcccatcggtagctttaccgcgacggaggtcacgcccccggaggggtactccctcagcccggacccggataaggtcaagcaggagttttactgggacggaaagaatgatgtggccttggtgtttgagaacgacgccagggtaaaggtcaaactggtcaagtacgacgacagcggcgatcccctccccggtgcagtattcaacatcgtcagggacggccagatcatcggcaccgaggccacccaagcggacggctccatcaccgtccctaatgtgaccgaggggatgtacgcctttgtggaggtttcggcccctgcgcctttcgcctgcctgactgatccggtcattgtccatgtggatcaggccactgtggagggaggcggcaccatcaccgtggaggcggcagacaagaagctgcccagcctttccattctcaagcgggatgagcagaccaaagaggtcattcccggtacggtctttgaagtcaagggcatccattccggctaccataccgatgtgaccaccggagaggatggcagggccaccctctctcatatccctgtggacagctatgagttgacggagaaatccgttcccgacccttatgtggtgggggatgaacccatccagaccgtctacctcggccccggcgaggaacgggaactgatttttgataacctgaaacagcctcttttgaccatcgccaaggtggacgccgccgactccaccacccccatccccggcaccacctttactattgaaggtattgacagcgactatcgaaacgatgtgaccaccggcgaggacggtacggtgtccctgcgggtggcccccggcagttataaggtgatcgaacagtccgttccggccccctactatttgccggacaaggacgcggaccgggagcagacggtcagcctgaacgccggggatgaaaagcggctggtatttgagaaccacaaggctccggaactgactatctataaggaggacagcgtagccggcgctcccgtggagggggcgcgttttcatgtgacctataccagcaacggcgaggcgtcggacgcgcccgccaccatcgactacggagaaattctgacagacgccaacggcgaaatcaagctccatgagcagggaaagcggctctatccgggcgagtttaccattacagaagtggaaccggctcccggcttccaaatgaaagagccgaccacgcagaccatcatcctccatggaggcgagagcaagactgtcacattccagaacgaaccgctcaacgcgattgtggtggagaagtacgacagcgtgacccacgaggccctacccggctgtaccttccaactgaagtatctgggtggggtcagcggcacgggcggcaccaccatcggtcagaaagtgactgggaaaaacggcaccgccatttggaccgggctgaaaagcggggcctatatcgtggaggaagtagaccctgcggacgggtattccattatcaacgcatctgaaacggtatatttggcggacagcggggagcagagcattgtcaccgtccgttttgacaacgcgccggacggcatcctgctgatccgcaaggtctgcgccaccaaccccagcgtgaccctgcccaacgccgagttcaaggtcatgtatgccgatgggaccctgattggagacagcaacggcgtctaccgcaccgacgagaacggcgagatccgcatccccggtctgaaacccggcaaaagcgtggtggtgacggaaacccgcgccccggacggcttcattctggacacccagagccagaccgtacagatcaaggagggccgcaccgtttccctgaccttcaaaaaccagccgaaaggcgctctcattatccagaagcgggacagcgccaccggccagcccctccccggcgcggagttccgggtaacgacagcggcggggtgcgaagtgggactggacggcgtgatcggcaccagcaccctaacgcagaacggcatttttaccacggacgcccagggcgagatcaagatcaccaacctggcccccggcgcgtatgtactgacggagatcaaggccccggacggcgggtatgtcattgatacaccctccaccaatgtggtcatcggggagggcggcgatacccagaccgtcattgtgaaaaactccaaggccggaacgctggtcatcgacaagcgggactccctcaccggcgaaccgctggagggcgtcaccttcaaagtgactacctccacaggggagtttgtaccggatgaaaacgggcagatcagcagcaacggcctgtacttcaccgacaaggatggcaaaatcaccattaacggtgtggtggggacgctggtggtgacggaaacggccaccgttccgggttataccatcgacgaggccacccggacccagaccgtggtggtgaaccccaacgacacccagacgctccattttaccaatacccccagcaccaccctggtcattgagaagtatatcgagggcaccacaaccccattgaaaggcgtcacattccttgtcaccgacagctccggcgcggtagtgggcagcagcaacggcgagttcatcacggatgagaatggccgtatcgtgatcgaggccctaacccccggcaccaccatcaccgcacgggaggtcaagacggtggatggctatgttctggacagcaccccaaagtccatccagatcaaggccggcgaggtccaaaccctccgcttctacaacacaccgagcggcggcctcaccatcatcaaaaaggacgaggaaaccggggagtgcattagcggcgtccagttcgaggtccgcaagctgaatggagagatcatcggcacctacaccactgacaagagcggcgtcatccgcctgcccgaagcggaaaagggctggtatcaggtggtggagctgaaggccgccgagggctaccgtctggacgatacgccctaccagattgaggtaaaggacggccagaccgccactttggaaattaccaaccggcagaccgggagcgccctcattcacaagatcgacagcgtgaccggcaagggcatctacggcgtgaaattcctcttgtccgacgccaggggcaaccccatcggcacctatgagagcgacaacgagggctatgtctatatcgaccacgagttggaggatggccggtacaccatccaggagattgagtgcgcggagggctaccttttggaaacccagcccaagaccgtctatgtgaagtacggcggctgcaccaccatcatctgggagaataccgccgtcaccggccaaatccaggtgaccaagacaagcgccgactataactctatgaacggctggcccgctggtactcctatccctggcaccgtatttgaaatctaccatgcccggacggggcgtcttgtggacaccatccgcaccgataaaaacggtgtggccgtgtctaagcccttgcctttgggccggtacaaaatcgtggagtcccaggcggcggacttctatgctttggacaaaacgcccattgaggtggagatcgagcatgagggccagatcgtcaaggcggccatgaccaacaagagcctctataccaatgtagccatccagaaaaccggctatgccgaggtcatgccaggccagaatatccgctacaccttctccggcatcgccaacaactccacgacttctctcacatcgttctactggcgcgataccctgcccgtggaggcggtgcggctggcgaagatcaccaccggcacctacaatgctgctggaagctataagatcgtctacaagaccaatctcagcgggagcgagtaccgtgtgctggcggacagcctgaacacgcagcagaactatgtgctggacgcctcgcctgtggccctgcggctggggtccaacgagtatgtcacagaggtgatgttcgtgtttggcgtcgtgccctccaacttccggcaggtggaaacgcccatgatcgactgctccgtggtgtcctgggtcaaaggcggcagccaattcgtcaatcaggcggatgtgggcggcgtctatgacggtcagtggatcatggctacctcccggtgggtgacgaaggtctacgccccctccaagcccctgccccggacgggttattaagcgcatcccccgcggcccgctgtgcgggccgcttacatacccattcgcacatttgaatccatttgccctttcctgtacgatatgggcagagagaagggagttgtttcaaatgttcaaacgggaaaagaaagtgtatctggaactgacggacgcggagcgccgccttgtgcggatgtacctgatgaactggcggaacaagctgaccgcccagggccgggacgctgggccggtgaacgacctgctgttgaagctgatggctcacggctgaaacaaccggcttttacatacgccgctctttgtctttggggacacagagcggcgtaaatttttggaagtccaatggtatgaagtcaagtaggtgatgcaagaaaattttaagcgaaacagagtaaaaagcactgtgtagacagcaaaaaggcaacaccaaccaaagccctgtccctgagaaattttgaaacagggcctatgagtcagagtggcaagctgcgctctcagccctccggcgggatatacaggcggttgtcctttagcagccgaaagaccaaccggaccagttttctggcagttaaagcgagtgcgcgtttatgctggtacttgttgacctctttgaatttgaggtcatagtaacgccggaactcggagtcgcatcttctcacggagttggcggcttccagcaggtagtagcggagatagcggttgccggatttaatcattctggagtgttcggcctcgaagtcgccagactggctcctgttccagacaaggccggcgtatttggcaaccgaggcttgggaatcaaaacggtggatatcaccaatctcagcaatgataccggcggagtagaccttgccaataccggggatggaggtcaaagtgttcggaatgatttcaaactgctgttcaatggccttatctaatactttgacctgccctttcaaggcgcgcatggaggcaatagaaacagccattgcttggtttacagtgtcgtttactgttttgggcagccgataggagcctttggctgcagcccgaactgccttggcggtagcatccgggtcagcaaatttgccacggcctgtttcagtaataaaggcagtcagttcctccaggtcggcattcgccaagtcatccacggtttcaaagtgttccatgagtgcgatggtggtggcgctggtgttctgaatgtctttgtcctgggccatgccggagcatttgaggaataagtagttggcgaaccgctgcttctcccgggtcaagttttggatgacatcaaatctggctctggtaagggtttgcagggctttgtagcggtaatcgtccatgtagacctccctgttgattctgccgaaacggagatggtcggcaatcacaaaggcgtccacccagtcgttctttggcaggtcagaataggcttccttgaatttccgcacctgctttggatttagaacatggattttcctctgaaaccgccccaagcggccatcctcacgaagagcatagactaggctgtccccgtagatggaggtggcctccaggccaatcaccacacgctcaagctgcatggagccaagtgccgatacgattctctctgataacagtttagcaccgccaaggttattctgcacggagaagctggagtgtttgctgccgtccggtttcatcaggtaggccacattgttcttgctgctcacatcaatgccaacgaatagtggattcacaattttcacctccccgcatggagatttcaggccagcaggctttgagatacccatgataaccggagcatctggcaccctcgcttatcagaatcattcctgggcagaccaatgcgatagccctcactgctgaaagggcggtcttgtcccaggcaaacagccaatgagtttgcagctaacttccggttcaggggaacagactttcagtgaagtagccttacggctcaaccggaggactcagaacttgaccctgctgtcctacagctattgtatcacgggcacctcaaagcctgctgatacctgaaactattaactttgaaacttattatacgaggaggacttcaaatggacatagatcaggaaaagcgtatggccggggactatgagatcatccatgcgcttcacattggcgaccgggagatcgtgctgggggaaaactcgtcagcgccggaggatgagcggtatgtatgcgcgttctgccagcagcatgagatattcataaactataccgaggtcatggtcagcggtgactacccggaactggtaaagctgtttggggagcgtgtggcggagcaggcggaaaagacccgtatcgccttgaacggcccgaaaattcagggcatccccaattcggccatcaccgccgaggactgtggacaggtcagttaccaggaggacatccggggcaaagtcgtggtgatccgcccggaggtgctgcgccgggaataccgccacgccacctgccagctccagttgtgtaccagcggctccggcgcataccccaacagccgcggcactgcctgtttctgcacagagctgtattccgggcagagggcgcggtttgagcgcagcgacattctcggcgtcatcgccccggaggacctgcccaaatgggcaaagcattacctggagctgcgacaggctgaaaaggaacgaagctctcgtgacagggggtgccgctgatatgggcaaccgtatgaacgccggctatctcatcaccgactccatccacatcgggaccaccgagttcgtgctgggtgtgagcataacggaacaatccatgtttgtgacatgggcctgccagggaaatgattactactattggggccactatcactccgatctcctgaccgcgaaaaaggaccttctggaacgggccggggcggaactggagtaccagatgacaaagcaggaacgctccggcgaacagccggagaaatcggggaaggagcgtgagctggaatgagctatgagccggcctattctccctgggggcttatccagacccgcaagaccctctgccctggtttcttcgatgtttccacagccagccatggcgggatcatggtggcgcgggaatttgtgaccgggaatttatcacctgccgcccagcggtacgggttctgggaaggcggctatctgtgctttgaggaggacagtgacgcgcagatcgtcctccgggagctgatggaccgggggctttacaccgcgccggtcaatgaatacttcggccccggagaatacagcaaatgtattgatgatactatccgggtatgccatcccgactactggcgggcgcatgaggccggactgacacagcctgcacagcagccgaaggtaaaggagcgtgagcgatagtggagctgactttgcggcctgcgacacccacggaacgactatacgccaagcggcagtgtattccgatcatggagcggtgcggaagtccgggtatcttagttgctgaattggacgatagcggcacggcgttttacagccattgggacatctgggaccccgcatggaaaacaccagagttctcggtggaactcgatgccatgattgaaatgctccgatcagaccagcgatatggccctgtgctgaagaatatccccgcgatgattgcctactgcctgaacaaccaggaaagccgcatcatgcaaagccccgaatatctgttccgcgttgatgccggctaccatgcttatctactccgttgtacgccatccgagctgctggataacgcatatatctatgcttaccgccgggacctgctggagcggcacatgaaggaagccgaaaaaggcatccgctttgtcaccacggacggcaaagagaaattcagggtgtcggatggggagcagatccgcattatcacaggcggagatggcacccgtgaccgcaccgcccgctatatcgacgccggccacatggaactgtcccacgagtggggcagcaccgtctatcctatccgggagtttgcggagcggctggagcagacaggcggcagggtgatccccatgcgttccaccctgccggacaagtgctacgccgtactgcccagcagtgatgagatcattattgtcaaaaagggcgagagcggctattaccgcacagatcagtatggacacgaccgggcggaggccctgaccattgtagatgagtgtaacgagcgcggcggcgtgaccaaagcgcagacggcggcgatgctggccggctccctgttcggctgggaggtggcagccgccgacccgaaaaactatgacgagcagggccagcccatcaagcccaagcgccatgaccggggcgacgcccggtagaatgtctatcaatatcgtatagagagaaggcggctatcagtgagaagctgatggccgccttcttgttgacaaggagcgtgatcgtatggaattgacttttcgcgccgccaccccagcggagcggctttatattgccagacaaagcacacagattgagggccagaccgggagtatcgggcaccttcaagcggatatgggcgaggacggcaagggcttctttcccaagtggaccagccaccgggaaagcctggacaccgaggactttcaacaggagtttgaggaggttttggaggccctggtgggggacgagcagtacggcgggtttctgaaaagccgtgacgccatacgggatttctgccggggacaccaggagagcggctacgataacggctttgcgttcggcttccgggcggacacagcacagtatgcctacctgatccggctgcacccctacaagggggaggaaaatctgtttctctactgctattgccgcgactggctggaccggcacatggaacaggctgaaaagggcatccggttcatcgacccgcactacaaggagctgttccgcatcccggacggcgggcagatccgtattctccgggagggctgtgcgcccatcgaccggacctgccgctatattgatgactgccatgtggaggtaggcaacggctgggacagcctgtttcacatctgccagtttgccgagcagatggaacgctgccacaacaccgtcctgccactgacaccacccctgccggagaagtgctttgccattttgccatcatccggcgagctgatcgccatagagcggtataagcctgggtatcaggtgtcccctatggcccatttcaaagggaaaacgccccagcagacggcggatgtgctcaacggcgatatgggcgtgaccagggcgcaggcggcggcgatgctggccggggtgacccagggctggacttcccctgccgctgacccgaaccgctacaacgagcgaggacggcctgtcaagccccgccgccacgaaaggggcggttcacgatgacagagcaaaggcacttaatatggagcaactacgatctggactatgaggactggagggacgatctggaggaagatcatccggagctgaccgaggacgagcgcatggccctgatgtacgagatcaataaccgctatctggacgatgagcgcgtcaatctgaacatccagcttgaccagcccatccttgtgatcgctgacctgggactttggaatgggcggcgtacaggctatcaggagatctccagcggcaatatccgggactgcctttacagtggccgggatattgaatacgccacatggtatgtggataagctgggcgacctgcgctgcgacgccatacaccacgacggtacgaaccatcttctttaccgcacctataagcccggagcacgggactcacaaattgacttgctgaaagaaaaactgtattacggaaaggctgtccgatccgatataacccggattacccgcaggctgggagacgagatcggcaaggtgtacggctgggattttcccaagccccggcaggccgtttccgtggaaaggtaggacgatgatggcacaaatacccaacaccaaattagaactacacccctctatgtttgacctgttgatgactgtcctggcatacaacgccgctaacgcccccgtggagagcgtccgaagcggtgcgaaggacttgatggagaaacgtatgcgctttacccggctctatatgagtaaagacggcgaacaatacgccagtctgtgtatgtatgaaaatgaagcgggagaaatgatctggcagctccttttatccgcagccctcaactatgatgtgagcgaggaatatcacaaaaagttgaaggtgggaagcaggagtgatccccaatgaagggcgtacccattgacgagtccctgtgcgcgtatctgaaggagtaccgcagagggcaggagaacgcggcttccagtaaggagctggaggccgcgtttcatgtcggcgggacggagctgcggcgggcggtcaaccgcctgcgctgtgacagccaccccatttgcagcgccgatgcaggctacttctacgcggcgcgacgatcagaggtcagggccaccgt

SEQ ID NO: 339 - DNA, 733522 bp, Flavonifractor plautii
  source 1..733522: mol_type = genomic DNA
cggccatggcgggggcgatgcgggccacatcggccagacgggtgcccgacaggctgcccatgagccagtaggtgatctccgggagctggttggtggggtcggccaccagcttgaggtaggaggtggcggcggtgaacagggagctgatcaccatgcccgccagcaccaggttgagcacccggtccccgggcgcccgctgtcccaccaggtagaccagcaccaccgtggccagggaccagaaaaaggcggacagggtggtgccctgattgcccacccccgccaggatggccagcgccgccccgaaggacgcgccggaggaggcccccagcacatccggggaggccatgggattctgaaacaccccctggtaggccgccccggcgctggacaggcagcaccccaccaggcaggccagaacgatgcggggcaggcggatattcatgaccgcggtatactcatggtccgtccacgtgggctccagcggcaggagcggggagagcagaatccggcaggtggtgccggcgtccaccccataccgccccaggcagaaggagaggacaaacagcgccgccagcagtacgcccaatgccagcagcacccggccgccggtgtgttctgttttggacaagggcctgcacctcctctctcacctcaatccagcaaatgggccagctcggcagggatctccgcccggttctccaccgtcagcgggagcagccggacatccgcccggcgggaaacagggccccagaaggggcttttttcgtggcggcgcagcacccccagcaccggcgcggggccgtccagcagggtaaagaccgcccgctggaacaccggggaacaccgctccagaaagccaagctcgtccatcagcagcagggagcgccgccccgccggggcggacagcagacgctcccccgccgcgtcgaaggcggcccggtcggccctcacgccatggggctccatcgtggcaacgctcagggtctcccccgtctccagcagctccagcgccagatggccgcccgcccgatcccagcgggtacggaacccgccgggggcctccggccgccccaccagatagtgggcgatggcggtggactttccgctctggagcgggccggtcaaaaaaatgtgcatcacacagcatctccttattggggcaaaacaaaacgccgcatcctaaaaaaggatacggcaacgcagggcggtccctgtgcagagggccgccgcagactgtcgttccttttcaaacacggaaggcaccgccgtttcctgcggcaccctgcggccccagccggggccatcggtccgccagccctaggtcaccccgtaggcggacggactcggaacagtatacatttgtacctatagactagcgttttcgccggaatttgtcaagccgcagacagttctttataccacaaagcggtagcccagcccccgcaccgtctggatgtaggcggggtgggcggggtcctcctcaatcttggcccgcaggcggttgacatagaccatgatggcgttctcgtcgatgatggcctctccccagagcagatcgtagagcatatccttggagaaaatgcggttgacattgtcgataaacagcttcatcatcgcgttctcctttgcggagagtggaatttccaccccgtttttataaaagcgcagggtgctggtgttgtaggtgaagggtccggcggtgatgaggctgtccgccccaggcaggccgttgcggctacggcggataagggcctttaccttcgcccccagagtgacggggttgaagggtttggtcacatagtcgtctgccccgatgtccaggccatacagagtatcatagtcctccttgcgtccgctgacgatgatgatgggggtccggacgccccgctgccggagggtctgtaccacctgaaaaccgtccatccccattagattcacgtccagcaggatcaggtcgtacgtccgctgcgccgtccgctccagggcctcctctccggaagccaccgtgtccgcctcgattccgttgctccggatgaccttatagagcatggtgaggacggcttcatcgtcgtccacaatcagcaccgtatccgccactgtgcttctccccctttacagccggtttgaaatccagtatgatttcagtataaagaatctgccggaatttgacaagggggtgtgtggtatggaggggcaaaaaaagcgccggcctcctgttcttcttctgatgatcctggttcttttcctcaccgttggcggcctggccctggccgtacagagcttcggccgctacgacaccctcctgctggagcagtcggacagccagctctacggactggcccgttcggtggaccgcagcgtttcgggcgccctggagcaatttatcggggagctggactacctcatccggctggagaactttaccgatgcggaggccgattgcctcgccgggcagccggaggagctccttcaattgctccagaacaaccctcttatccgtgaggcccttatcaccgactttctctgtctccaggacgggcgggtgctgctctccgcctctggacgtaccggctatacgtttcccgtcgggggcagcctggacgggcgggaccgtgtccgcccctgcgtggcggagaacggcaccgtctatctctccttccaactggagggggagcgggggctgtggtacgccgcgctggtggacctctctctcttttaccggcaggtggccggcggcctcaccacctctccccgggatcaaatcctccttctggacgcgggcggccaggtcctgctccgccagaccggtcaggagatacgtgtggagctggcggcggacggtctcgccggggagcctggcctgggctttctgctccagtgccagagggagggccaggagggagcctgcttctatgaggcggagggctacaccgcccgcatggcggtgatccccgccgcaggaaacaacggcatcttcgccgtaggcgtttccgaagacttcgaccaagtatcgcggcccatccgccgctccgcccttctgctcaccaccggcggcggactggtgatcgccggagtgcttttgctggcgggtctcaaccttcgctccgggcggcgcaacgagcgcgcccagcgggagctggccctgctccaggaaaagaacgccgccatggaggccctcaaccgcaagaatcaggagctggcccaccatgaccggctccagaccatcggcacactcacctccagtatcgcccacgagtttaataatctgctcacccccatcatgggctactccattctggtgctggagcaactgccctctgatgccgaggagctgtatgataacgtgctggagatctacaactcctcccgcaaggccaaggagatcatcgcccggctgtccgacctgtcccgcaaaaacacctctctcaccttccagtatgtatcccccgatgagctggtacgcaaggtgctcgccgtagcctcccccgcccggccgccccatgtggaggtgcgcaccgatctcgcctgccgccacctgtggctccggggcaacgagatccagctctcccagatgctgctcaacctgatcctcaatgcctaccacgccatggagcccggcggcggaaccctcaccgtggccacccggccggagggggagtttctctgcttccaggtctccgacaccggctccggcatttcgccggaggtgctcccccacatctttgagcccttctttaccaccaaggagcgtggcaagggcaccggcctgggactggccatcgtccggcaggtaatggaggagcacaaggggaccatcaccatcgacaccgccccaggccggggcaccaccatgctcctccgtttccccaccatcacgccgccggaggaggatacctaaactccaatacgcccccgcaccgtgcgggggcgtattttttgtgtataccttaacaaatattaaggttctatctatgtcctgttaaggcttatttgttattcttttaacaaacagtgggaaagggggtatactatgctgattaccattgggcacacctatggcagcggcggtttggagatcggtcggcggctggccgcccggctggagatcccctgcggcgacgcggaggccgacgaaggggccgtccgctcactggcgggacgcggctcctgcgtggtggtgggcctgtgcgccgaccatgttctgtccggccagccggggctgaacaggatttttatccactgcggcatggaacagcgggtggagcggctgatgcgagagcgcggcctgtccccggcggaggccgcccgggaggcgctgcgccaggatcgggaacgggcccggctctatggcctgcataccggagccaagtggggcgaggtgggtcggtatgatctgacggtggacagcggtcccctgggggtatccggtaccgtggagctgttgagtcagttcatcgccctgaaaaccatgcgccggcgaagcaaggaggccgcacatgctggaacaactgattgaacgtatcctgcccactatcattgcggcgctggagctgatgggtatcttcattgtggcggtctcggccctaagcgccttcggccgttacctgaaaagcctgttcacccgcaccccctgcgacgttaagttcgccctggccaacggtctggccctcagcctggagttcaaaatggccgccgagattctcaagaccgtcttggtgcgggacctcaaagagcttctggtgctgggcgccgtcattctgctgcgggccctgctctccttcctgatccactttgagatgaaaggaacccatccccctaaataagtttcggaggtatcgacatgaaacgaatgcttgccctgctcctgaccctgacgctggccctgggcctgctgcccggctaccaggggtgcgtccgggtggacggctgcgacgtgtcatccctggcgccccgcgccctggccaaaaaaatcgcctatattccccagaccagccatatgatctttccctacacggcgctggagctggtgctcatgggcaccaaccgccggctgggccttttctccgcgccgggccgccgggagcgggccatcgccatggaggccctggaggagctggggatcgcagactacgcccaccggagcttcgcggagctgtccggtggagagcagcagcttgtactggcggcccgggctctggcccagcaggcccggctgctgctgatggatgagcccacctccgccctggacttcggcaaccaggtgcgggtgctggagcgggtgtccgccctgaccctgcgggggtacaccgtcctgctctcctgtcacaacccacagcatgccatgctctatgcccagcgggtggtggccctccacgacggcctggtggccgccgacggcccccctgaccaggccttggacgaggcgctgatgcggaagctctacggtgtgcccgcccgctttgtccgcaccggcgacggggtactcatcgccccggtgcgcaagtccattgtcctgtggacccccgacatggtgcgcttcatggccgacgccatccgggtcaacgggagctgtgcggccatggccgcagccctgtctcaggtgctccccccgggggcgcgggtgtgcgacgcggggtgcgggctcggcgggttgagtctggcgctggccccctactgccgcgcggtggtggcggccgatctgtccgccgaggccatccgccatctggaggcacagcccctgcctcccaacgtggagccccggcggtgcgatgtgctggccgacacaccggacgagccctacgacgctatggtgttctgcttcttcggccgcacggatgagatcctctccgccgcccggcggcagtgtaccggcacggtggcggtgctcaaacgctgcggccgggatcaccgcttttccagggggaaggaccacccccggcagggctttgaggagctgtgccgggagctggaggagaagggcatcccctaccagagccgggttttagagctggatatgggccagcccttccgctccctggaggacgcggcggtctttttccgcacacacagccgggacgatccggcggagctgacccccgaggccctgcaaagccgccttcagcggcgggacgacccggaatttccgtggtatttcccggtaaacgagcccatcggcctgctctggttccaggcctgcgagataccagataaagaaaaggagagatgataccatgaaaaagctgctctgtaccctcctggccctcagtatgctcctggggctggccgcctgcggcggccccgcgcccgcggagggcccctccgcagaccccgcgccggcggtgtccacccccgcccagcccgaggacggctccgcctccttcaccgactccgtgggccgcaccgtggaggtgcccgcggagatcaccagcgtggcggtctccggccccctggcccagatggtgctcttcgccctgtgccccgacaagctggtaggcattgccgacgagtgggacgcgagcgctgagcagtacctggccaccgagtactacaatctgcccctgctgggccagctctacggcggcaagggcgagctgaatctggagaccctcttgggctccggcgcccaggtggtcatcgacgtgggcgagcccaaggacaccatcgtggaggatctggatgccctccaggagcagaccggcatccccttcgtccacgtgtccgccaccattgagaccatgggcgacgcctatcggaagctgggcgagctgctgggcatggaggaggccgagacgctggccacctactgcgacgagacctacgccatggtcaaggacgtggcggagcacgtggagaaggcgaacctgctctacatcaccggcgacgccggcctcaacgtcatcgcccaggggtcttaccacgccgagatcattgacctgctgtccaacaacctggcggtggtggactccccctcctccaagggtaccggaaacgaggtggacatggaacagctcatgctgtggaatcccgacgtaatcctcttcgctcccgacagcgtttatgcctccgtgggggatgatccgctgtggcagagcctcaccgccatccagaacggcagctactatgaggcccccatgggcccctacaactggatgggctttccgccctccgtccagcggtatctgggtatgctgtggatggcaaagctcctctaccccgacgcggcggactacgacctccaggccgaggtgaccgaatacttcgacctcttctaccactgcgcgctcaccggcgagcagtacggggccctgatggccaactcgatcgggaagcagtaaactcacacgtcccggcccctttttgggggccgggatgcttgcatagggcggcggattacgtgtacaatagggaaaaaggaggggagcgcatgaaaattgccattgtgaccggggcctcctccggcctggggatggcctttgtccggcggctggacgcgctgggcgggctggatgagatttggggtgtggcccgccggggggagcggatggaggcgctggcggcggagctgcgcaccccgatgcggcctctggccctggatctgacccgattggagagcgtggagaccctgcgggttctcatgagagaggaggagccggaggtggcggtgctggtcaacgccgccgggttcggcaaattcggcacctgcgccgaactcaccctccaggagacctgtggcatgatcgacctgaactgccgggctgccgccgcactcactgccgccgtgctcccctacatggggcggggaagccgggtgctggagatctgctcctccgccgcctttcagcccctgcccggcttcaatgtctacgccgccaccaaggcatttctgctccggtacagccgcgccctgcgctgggaggcggcgccgcggggcatccgggtgacggcggtgtgcccagggtggatcaggaccgatttcatggacgtggccagagatacaaaaaacgggcgcaccgtacggagctttcccttcgcccagcggccggagaccgtggcccggcgggccctgcggaacagccgcctgctggccgtcactacctgcggcctgcccgccctggtccagcgtgtggccagcaagttcctgccccactgcttcatcatggcctgctgggagggcctgcgaagggcatgatgcaaagcgcccggagccgtttggctccgggcgctgcgtttatttacgcggcagggagttcaggtagtcgccgacaccccgtgccacgccctccatcagcttctgctgataggtctcgtcgcacaggcgggtgagttcctctacgttggtcataaagccggtctccaccagtacggcggccatgttggtctcccgcaggaccacgaaattggccgaggcgatgccgcggtctaccgcgccgctggccgcgcaggcagcgtcctgcaccgcctgggcaaaggccttgctccggctgctggtggggtagtaataggtatagagcccctggaaggtggggacggtgggggcggagttgcagtgaatgctcacgaacaggtcggcgttgacccggttggccagctcggagcgctcgtacaggtctccggcggtctccccgtcccgggtgagcaccacgttatagccttcattcagaaggatgtcccgcagcttgtagaccatggacagggtgagatccttctcatagatgtccaccccgttggcatccggatataccgcgcccagcgttttcccgtcgtggccggcatccagtacgacggtgtacttgttggggtcaatggggggtagctcgggggaggcggagggagtggcggtaatgcgcacgccgctgctgcccgcctccacggtgatgtttttggcgtagctggcaccgcccttgaggtccagcaccacccgaagggtgtggggatagccataccccaagtcgtccccgtgctggttgtaacgcaccgaggagaacacatcgctgtccaccggcagggcggcctcaccctccagagcgccggaaaacaccgcgcccaggaggtccaccgctacccggtctcccagatccaccacccggtattccggtatatggtcggtggcgatggtcacaacgtgggaagaggcgtccaccgagatgccggtgacataccccttgtctccggcggcgggcgtgtcgggcgtgggctcgggggtcggcgtcggtgttggcgtgggctccggctccggggtgccgggggaggtgaggatagcggtaaaggtatcgttgtcccagtccacggtggcgcccaactgctccgagacaaagcgcagggggaccatggtgctctcccggccctcccacttaaccacgccagcgggcacgccaccgggcagctccatggcctgaccattgaccagtgcggtggccgagcccagggtgagtacgatggtgctctcctcccgcaggaggatgacctgacgggtttccggcacccaggttaccgaggcgcccagccgttccgcgatcaggcggacgggcaccagcgtgcggccgttctgtcccgccgggtactgcaccagggcgggtacatcgtccggtgtcagaggcgagccgtccagcgtcaggctgacccggtcggtctgggtcagttcaccataacgctgggtggtctcgtcgtagaagtagacggagagggtccccgcgggaccggccgcccaggcggacagcagccccgccagcagggcgagggtgagcaggaaggaaacggcttttttcatggcagaactcctcggcgatagatgctaatattctaccttattccacaggtgccgtcaagaaaggaccgcaaaaaaggttgacataaatttatggcaggcactttgacacgctactgtaaatgtgggcaaatcccttgcgttttgcggcaaaacttgttatgataaacattaaatacaaagcaacggagggaatacccatgctgaagatcacctgtgagggcgtgtactacaagaacgggggctttgtcccggccaaagacggccctgcggccggcttgcccgcgccggaaaaggcgagggagggcaccatggcccacgcgattctgaaggcccacaataccggagacaatatggaggagctggccatccgcttcgacgccatggcctcccacgacatcacctatgtgggcatcatccagaccgcccgggcctccggcatgcaggcgttccccctgccctacgtgctcaccaactgccacaactccctgtgcgccgtggggggcaccatcaacgaggacgaccatgtgttcggcctgtcggcggcgaagaagtacggcggcgagtttgtccccgcccaccagagcgtcattcattcttatatgcgggagcggtacgccgcccccggcaggatgatcctgggctccgactcccacacccgctacggcgcttacggcaccatggccatcggcgagggcggtccggagctggcccggcagcttttatcaaaaacttataacatcccgtacccgaaggtcatcgccatctacctcaccggcacgcccatccccggtgtgggcccccaggacgtggcgctggagctcatccgctccacctttaaagacggagtggtcaagaacgcggtgatggaatttttcggccccggcgtagccaacttgtccatggactaccgctccggcatcgacgtgatgaccaccgagaccacctgcctgtcctccatctggcccgccgatcataccttgaaggcccacctggccgtactgggccggggagaggcgttcaagccccaggcccccgccgacggggcctactatgacggactcattgaggtggagctggacaagatccgccccatgatcgccttgcccttccacccctccaacgcctacaccatccaggagttccaggagaacctggacgagctgctccaccaggtggacgaggacacggtgcgtcagctcaagctcaagaaccggcccgcctcactgcgggagaagattgtggacggtaaattccgggtggatcagggagtcatcgccggctgctccggcggtacttaccagaatatcgtgcgggcggcccagatcctggacggccgcgccatcggctccggcgagttctggctgtcggtctatcccaccagccagcccgtcaacctggagctgacccggaggggctatatcgcctccctcatggccgccggcgcctctatccgctcctgcttctgcggcccctgcttcggcgcgggcgacgtgcccgccaacggggctttctccatccgtcactccacccgtaacttccccaaccgggaggggagcaagccctccgacgggcaggtgtcctacgtggccctcatggacgcccggagcatcgccgccaccgccctcaacggcggcgtgctcaccggggccgacgagctgcccgcacccccggccgatcctgccgaggagcccttcgcctacgacgacaccccctacaaggcccgggtctacttcggcgtggggcggcccgaccccggccaggagctggtgttcggccccaatatcgccgactggccggagcaggtggccctgccggagaacctgctgctcacggtgtgctcggccatctatgaccccgtcaccaccaccgacgagctcattccctccggcgaaacctcctcctaccgctccaaccccgtcaagctctccgagttcgccctcagccgcaaggacccccagtacgtgccccgagccaaggaggtgctggcggtggaacggctccgccgcaccaatcctggtgatccccgggtgggggaggccctgctgggccatgacccggcggataccggcctgggctcccttgtgatggcactcaagcccggcgacggctccgcccgggagcaggccgcctcctgccagcgggtgctgggcggcgcggccaacctggccgcggagtatgccaccaagcgctaccgctccaacgtggtcaactggggcatgctgccctttatcgccgaagacgtgaaggactggaacctccagccaggcgaccggatctacctgcccggcatccgcgccgccgtggacggcggggcggaggaggtatcggccgtcctcctccagaacggcacggagcggcccgtcaccctcaagcttcccggcatgacccgcgaggagcgggacatcgtgctggcgggctgcctgatcaactactacgccaagtaggggcggcctgtggccgcccgcccctgaaaaagcggggaagcgtaggggccgatgccctcatcggcccgccgttttccggagccctttacatgcggccgtatggttgggaaggagggaggacttgtatgagacggcatctccttgcattgcttgtgtgtgttctgctctgcctgatggtgctcccaggcaccgcctccgccgacagcgggcccaagcccgccgtcaccatcacggtggtcaacgccccggcgggggagtactacctggatctgctcgtcaccgaccccggcgaccatgcaaacatcgatccggcagactacgaccccaatcttctccaagggctgcgggactgggaggtagacggctggtaccccgccctggcgggaggcaccagcgttccactgttcggagatctgcggccgggggaggacggtacccatcgttttacctactacggcctgccccgcgcctttcgtatcgccgtctccggcccagacggggcccaggccacggacgagccctttacccgcacggtgttctacacccatctgacgtacgactgggagaccaactccattacaagggccacctccccggcggggttctacggcgtccagtttttatccaccctggtgcccaccctgctggtggagggtgggctgctgtggctgttcggcttccgggcccggcgggactggctggtgttcctcgccgtcaacctagtcacccaggcggggctccacctgtggattgcggcagacctggtttccatcggcgattctgcccttcagtatctggtgctcctcgtggcggaggtgcctattttgctggtggagctgattgcctatgtgttcctgctgaaggagtacagcgggctccgccgggcggcctacgccgcctgcgccaatatcgccagctatgccgtgggttatcttcctctccactgggcggtggaatttctggcccggtgagaagatttgttttacacgggcggcaaaatacggtataatacgatatgccgggtaggaattacccggcgtatcgcctgttttattgagataaggggaagcatatgaaaaaaatccttgcgggagcgtgtctgtttggccttctgctctctgcctgtactcctgccgccgaaccgggggacgacggcacgcttcacatcctggccaccacctacccggtctacctgttcaccacagcggtgaccgagggggcggaggatgtggaggtaagcctgctggtcaaccagcccacctcctgcctccacgactacacgctcaccgtcagtgacatgagggccatcgagaaggccgatgtgcttgtgatgaacggtgcggggctggaggactttatgggcgacgccctggcggcctctgacgcggcggtgatcgactgctcggagggcattgagctcctgcccgccctgggccacgagggccacgaccatgacaccgagtacgacccccacatctggatgtgtgaagagtcagcactggttatgatgaataatattcttcatggcttaggggcgttggacgagaaaaatctggattgctaccgtgaaaatgccgctgcggctgcggccttggtgccagaagatgacgcacgaatggagaacctagcctgtccttatctgatcacgttccacgacgggtttcagtactttgctctggacaacggcctgaacctactgaagtccatcgaggaggaggagggggcggaggcctccgcagctgagatccaggaggttgtggatctggtgagggaatatgaaattccagctatctttaccgagcgcaatggctctgaagctaccgcccgggccatttcccgggagaccggctgtgcggtgtaccaactggacatgatcatgagcggcgacggcacgggcatccagccctacctcgacgctatgcagaaaaatatcgacaccatcgcggaggcattgggatgagcgtacacaagcacggaaccacagggcccggctgtgccggtacctgctgtcttaaagccaccgaccttggggtgagtttcggcggggaggaagtattgagagatgtttccttccacctgcactgcggggagatcgtggcccttatcggccccaacggggcgggaaagagctctcttttccgtaccatcctgggacaggtgcctcacaccgggaccattgagttccaacgggcagggggcgacaagacccggccgctgatcggctacgtgcctcagtctcccagctttgaccggggagacccggtcagcgtgttcgacttcttctccgccgctatctcccgctatccggtgttcctgccctccccccggagcctgcgggccagagtgggtgcatgtctggcccgggtgcatggggagagcctgctggaccggcggattggggccctctccggcggcgagctccagcgtgtgctgctggccctggcgctggagccgctgccccacattctggtgctggacgagcccctctcaggcgtggacattgacggggagaagcagcttctggacatgttggacgagatccgtacccgctatgacctgtccatcctcctgtccacccacgacttcgccaccctgggccagtttgccgacaaggtgattctcctcaagggcacggtgctgcgggtggggccgccggatgaggtgctggcctcgccggagttccaggaggtctttcacctgaacctggggaaagggaacctggggaaaggagggaggggctgatggatttcctggccgggctcctggagccctttcactggcagttcatgcgcaacgccctgctggcggtgctggtaatctcgccgctgttcggcctgctctccaccatggtggtcacaagccgtatgtcgttcttctccgacgcgctgggccactccgcctttaccggcattgccatcggcaccctgtgcggcctggccgatcccctgtggatggcggtgctgttggcggcggtgtttgccctgctgttcacctatgtgcgccgaaagtccaatatggccagcgacacggttatcggcgtcttttcctccaccgccgtggccctgggtatctttattgccaccttcggcggcggcagcttcacccagtacaacagcctgctcatcggtgacattctcagcgtggagcccgccaagatcgccctgctggcggtgatccttttggttgtggtactgctgtggctgtgctccttcaatcagctcatgctgtcctccatccaccctgccctggcggacagccggggggtgggggtgttctggcaggaggcggtgttctccgccgccatcgccgtggtggtcacggtatccatgacctgggtgggcctgctggtcatcaactccctgctggtgctccccgccgccgccgcccggaatgtggcccggaacatgcggcagtatcacctgttctccttgcttggggcggtgatctccggcctggcggggctgatgacctcctattatatcggctcttccgccggggcgtccatcaccctctatctggcggtttggtttgccgtcacctttctcctgcgaaaaaagtgtatataagcaagagcaccgcggaagccagcttccgcggtgctcttgcttgctttttatacctgaatcgaatccacgagggcgtcggccagggcatccagctccacggccttgtcgtcggagagagaggaggccatactcaaccgctcgttgaggacggtcatgtttttcatctcctcatcgatgaacttctgcatgagatctccggacttgcaggcccaggagccgttctcgataagggcgaaggtgcggttctggaggttgagggccttcatgtcctccaggaagctcttcatcaccgggtagatgcccaggttgtaggtgacggaggccagtacgatatggctgtacttgaaggcttcggagatcaggtaggacacgtgggtgttggacacgtcgtacaccgacacgttggtaacgcccttctcgcacagcctggcggccagggcctgggcggcggcctcggtgttgccgtacatggaggcgtaggcgatcatgacgcccttttcctccggctcatagcggctccacttgtcgtacttgtcgatgaagtagcccagatccttgcgccacacgggcccgtggagggggcagatgaacttgatctggtccagaatgccggcggccttgcccagcagcagttggatgtgggggccgtacttgcccacgatgttggtgaggtagcggcgggcctcgtcaatccagtcccggtcgaagttgacctcgtcggcgaagagcttgccgtccagggcgatgaaggagccaaaggcgtcggcggagaagagcgcgccgttggtggtgtcaaaggtgaccatcgcctcgggccagtggaccatgggggcacccacgaaggtgacggtgtgcttgccaaagcagtgggtgtccccctccttcacctcgacacactcgtgctcgtcggggtggaagccgaactgccgcatgagcatgaaggacttctcggtggagatcaccttcaccttggggtagcggcggaggatctgctccacgctggctccgtggtcgggctccatgtggttgaccaccagccagtccaggggcttgtcgcccagcaggtggtccaggttatcctggagctggcggtaggcggaccagtctaccgtgtcgaagaggacggactgctcgtccagcagcagataggcgttgtaggaaacccccctggggatggggtggatgttttcaaacaggtggagccggtggtcgttggcccccacccaatacagatcgtcggttaccttgcgcacgcaatacattgcgattcctccttctgttcgttaggcctcaatgaactggtccttgccctcggcgcactcggggcagacccagtcctcgggcaggttctcaaacagggtgccgggggcgatctcggcgtcctcgtcgcccagctcagggatgtactcatagccgcagccgccgcagacatagcgcttgccgatgggctcgggcttgggggcgggaggccgcttcatcttcaccatggggggcgccggctgcttctcaccggtgtccagggcggcggccagcaggggcaggatctcgttgacatcgcccacgatgccgtagtcgcagttcttgaagataggggcgttgccattcttattgatggccacgatggtggaggcgtccttgatgcccttcagatgctgggtggcacccgagataccgcaggcgatgtataggttgccggtaaacttctggccggacatgcctacatagcggctcagaggaacatatttgagcgtctcggccaccgggcgggaggaacccaccgcggcgccggcagctttcgccaggttctcaatgagcttcatgttcttcttgtcgccgatacccttaccggcagagaccacccgctcagcctggttgatgggggtgtccatggggatgcccacggtaaagtcgtgtccgtccttcttcagtgcctccaccagggcggccaccttgtccttggacgctccgtcccggaaaagctggcgcttgcgcacgccggtgatgggggcgggctttttggctacagagcggctgccgctgccgctgcccttggagattttgccgatgaggtgggaggcaataaccacccgctgaatctcattggtgccctcgtagatggtggtgatcttggcgtcgcggtacatccgctccacgtccatacctttgaggaaaccagtgccgccgaagatctgcaccgcgtcgttggtgacctccagggcaatgtccgaggcgtacatcttggccatggcggactccatgccgtagggctcgtggtgctccttcagctcggcggcggagtagatgaggaaccgggcgcagcgcagcttggtggccatgtccgccagcttgaaggccagggactgctgggcggcgatgggcttgccgaactgaaccctctccttggagtactccagggcggactcataggccccctgggcgatgcccagggcctgggctgcgatgccgatacggccgccgtcgagggtggccatggcgattttgaagccgtcaccctccttgcccagcaggttttccttgggtaccttcacatcattaaagatcaactcagcggtagaggaggaacggatacccatcttgtcatagtggtcgccaaactcgaatcccttccagcccttctccacaatgaaggcggagatgccccgggtgccgatgtccggggtggtgacggcaaagaccacataggtgtccgccttgggggcgttggtgatgaagattttgccgccgttgagcagccagtggtcgcccttgtccacggcggtggtctcggtgccgccggcatcggagccggcgttgggctcggtgaggccgaaggcgccaattttttcacctctggccaggggcaccagatatttcttcttctgctcctcggtgccgaaggcgaagatcggccaggagccaagggacacgtgggcggacagaatcacgcccgtgccgccgtctacccgggacagctcctccacggcgatggcgtagctaatggcatccagccccgcgccgccgtactccttggggtaggggatacccatcaggcccagctcccccagtttttttacggcttcggccggaaactcattggcctgatccagggagaaggcgatgggcttgacctcctcttcggcgaaggcgcggatcttggcgcgcaactgttcatgcgcttgggtcgtctggaacaacatgttgcttcctccttacacataattaaaagtggataaaattagtccaatttgtaggcgaaaaaatcagtctgccggacccaaaatgtcctccaaagtgtgggccttcagttccgcattcagcttttcctgaatgcctgtcagatggcagtgaaccgtacagccgccatggctggcccgccagggacaggaataggtgggatccatacaactgcttaggcgggaatcctctcccatagcggtcatcaggtcgtagagagtgacccggttgagctctgccgacaggcgacagccaccttcggcgccgcgggctacttccacaaatccggccctggcaagctttttgagaatcttgtgtgcaaaggactgggggaccagctcccgctccgccgcctccgccgctgtacggcgctccccatcccgcagggtgcgcagcaggcgcagggcataatcggtttcgcgggtaatcacagccgctccactcctttctgattggtctggctacaacatatcattttggataaagtttgtcaagtataattttccaaaatcgtcacaatgtaaaaaaacgcgcggcatgttttggcatgccgcgcgctgaggtcaggattttcagcccagcagatggatgctggtgatcaggccggagaacacaatggaaacggtggagcacagcttgatcaggatgttgagggagggaccggaggtatccttgaaagggtcgcccacagtgtcgccgatgacggcggccttgtggcagtcggagcccttgccaccatgggtgccgctctcgatgtacttcttggcgttgtcccaggcgccgccggcgttggacatgaacacggccaccacgaagccggtgacggtgacgccgcccagcaggcccaccacggcctctgcgcccagaatcaggccggtgaccacgggcactacaatggccagcagggaggggaccaccatctcatgcagagcgcccttggtgcagagatccacacaggaggcgtagtcggggtcggccttgccctccatgatgccggcgatctccttaaactggcggcgcacctccaccacgatggactgggcggcccgctgcacgccgctcatggtcagggcggcgaagaggaaggtgagcatggcgcccacgaacaggcccaccagaacggcggggttagtgatggagagatccagcgtgtccaccttgaccttcaccacgtccacatagctgaccagcagggccagggcggtgagggcggcggagccgatggcaaagcccttgccggtggcggcggtggtgttgcccagggagtccagggcgtcggtgcggttgcgcacctcctcgcccaggccgctcatctcggcgatgccgccggcgttgtcggccacggggccgtaggcgtcggtggccagggtgatgcccagggtagacagcatgcccaccgcggcgatgccgatgccatacaggcccttggagaaaagctcgccatagttggccgcattggtggtcagggaaccgccggcggccaggaaggagacgatgatggccacgccgatgatgacgatgggggcggcggtggacttcatgcccagggagatgccgccgatgatggtggtggcggcgccggtctcggtggagtcggccaggccctgggtgggcttataggtgtcggaggtgtagtactcggtaaaatagccgatggcgcagccggccaccagacccgccagaatggcgatgtaagggccccaggagcccatgatgtaataggtgacgggggcggcgatgacggcggccagcacggcggcggtgtaggtgcctttgcgcagagtagccagcagggacttctgggtggcgttctccttggtgcggatcaggaaggtgccgatgacggagcacaccacgcccaccacggcgatgatgaggggcagaagcatggcgttccaggtcaggccatcggcggcgtaggcggaggcgcccaaggcgaaggtagccagaatggagcccacgtaggactcatacaggtcagcgcccatgccggccacgtcgcccacgttgtcgcccacgttgtcggcgatggtggcggggttacgggggtcgtcctcggggatgccggcctccaccttgcccaccagatcggcgcccacgtcggcggccttggtgaagatgccgccgcccacgcggccgaacagggccatgaaggaggcgcccatgccgaacatgaccatggtctgggcgatctgggcggcctcaaaccctgcgatgtacttgagaatgtggaaccagatggacacgtccagcagacccaggcccaccacggtgaagcccatgaccgcgccggaggagaaagccacgttcaggccccggttgaggctctcatgggcggcgttggcagtgcgggcgttggcggaggtggcaatcttcatgcccacaaagcccgccaggccggaccagatgccgccggtcaggaaggcgaaggggataaaccagttgtccagcatcccgactcctgccaaaattaacaaaatgacgaagacaatgataaagatctttgcaacggtagtatactggcgcttaaggtaggcatttgcgcccttacggatggatgcggccagcttttgcatcagttcggtgccctctgagaacttgagcaccttcttggcttgggttaaggcgaagattaatgcaattaatgcacctactaagccgacccaaaacaggttttccaacaactttccccactcctttttttctttggaagccttgtaacacaaggcttccagcgttaagagacaatataatattaacgcaaaaaggggtgatttggcaagtatatcttaagataagaaagcgtcaaatcctaggatttgacgctttcgacaaaaacgaatgattggtttaagaacgcttccatgcatttctgctaaagagaacgagaacaggcagaacctccaggcgcccgatcagcatacacagggagagcaccagcttggagaagccggaaaaggcggagtagttgcccatggggcccaccagctccagtccggggcccacattgccgatgcaggagactacggcggtgaaggtggtgccaaaggagaagttgtccaccgacaccagcagcgtggcccccagggcgatgaaaagataggctgcaaaaaagagctggacggagcgcaggctgtcctcatctaccacccggccgtccagcttgaccacgttgacggagcgggggtgcaccacctgccggatctcccggcggatgcacttgagcaggagcagaacgcgggagcacttgatggcgccgccggtggagccggcgcaggcgccgatgaacatgagcagcaccagcagaatccgcgaaaactccggccacaggttgaagtcagtgctggcgaagccggtggtggagataatcgagcccacctgaaacgcggcgtggcgcacggcggagccgtccgccggatacatgggccagatgttgatggagatcaggagggtgctgaaagccaccacggccagaaagaagcgtagctcgtcgctgcggagcgcctggtgtaccttgccgcagagcagcaggaagtagagggcaaagttgatggagaagatcagcatgaagagcgtgatgatgacctcaatggcggggctttcataggccgcaatagacaggtttctggtggagaagccgccggtgcccgcggtggcgaaggagtgaaccaggctgtcataccacggcatgccggcgattcgcaggcagaagacctccagcagagtgagggcgcagtagatgccgtagaggattttggaggactggctggtcttgggtaccagcttgctcacaatgggcccggggctctcggcgcgcatcacatgcagggtccgtccgcccaggctgggcagcagggcgatggtgaggatcagcacccccatgccgcccatccagtgcatgaaggagcgccagaaaaggattcctctgggcaggggctccactgcggtcaagatggaggcgccggtagtggtgaagccggagaccgactcgaagaagcagtccacataggaggggaaaaagccgctgaaaaagaaggggagggcgccgaaggcgctcatcagcagccagatgagggccacggcgaaaaagccctcccgggggaaaaagtggtcgttgctgcgtatgagggaaagggcgagccccactgctcccgtcatggcaatggacaggaggaagggaaggggattttcgcggtagaacaggcagaccagcagggggaggagcagcgcgcctgcctctaccagcagggtcttgcccgtcaacttgaagaccaggcggaagttcatgcgtcgcctcccagctccagaagggagtcctcaaagatgtcgttgagatccagaatcccgtggttgcgggatatgacgatcacggtgtcaccagcggcgatggaagaggagccgtcagggattacgatacggccctggtgcaccaggacggcgaccaggatgccaggcttcaggcgcagctctcgcaggggggtgtcccggtttcgggtggttgcattggccacaaattccatagcctcggcgtggccgtcggcgatcttgtagagggcgttcatgacgctgcccttggagttctgcataccgcgtaccacctgaagaatctgcccggcggtcagcagcttgggggagatcacgctgtccagcccagcggcgtgggcgatgccggcataattctggcggttggacttggccaccaccttgggtatgccctgctgcatggcgtagagggagataatgaggttgtcttcatcccggtcggtgagggctacgaaggcgtcggaggcggtcacatcctcctcttccagaagttcctggtcggtgccgtcgccgcagatgaccgtggccttgggcagtacctcgctgagatggcggcagcggtccagactgcgctcaatgatctttacgtgtatgccaagccgctccagaatggcggtgaggtagtgtgcgattcgtccgccgcccaccagaaatacgttgcggcacctgggattgtgccgccccagcaggcgaaagaaggcggtcaggccggtaggctggccgatcagatagagccggtcccccacctggggcacaaaggaaccgtcggggatgaccacatctccctccgcccgctcggcggcacagaacagcataggaagggactggagctggccgctctgggcggacaggggatgtcccaccagaaagtcctcctcccgcacccggaagccaatcagctccacccgaccccggcaaaaggtctccagattggcggcagggggaaagcggagcagacgggcgatctccgccgccgcggcgttttccgggttgatgaccaggtcaatgcccagggcctccttcagcagggagagctccatagcatattctacattgcgtacccgggcgatcgtatacttggcgcccagccgcttggcggtcaggcagcagaccatgttgacctcatccatactggtggcggcgatcagcacatccgcagcatccacacccgactctctcagggcggaaatggacgcgccgttgcctttgacacacatgacatccagggcctcagaggcgtggcggagagcggcgtcgttggtgtcaattacggtgatatcgtgctcctcctgagagaggtgctcggccagggtaaagcccaccttgccgtcgcccacgatgatgattttcaagctccatacatcctttcagagcgcccggaggtgccccacaacacattgcatgctaatcttaacgcaatcttaacacgcatgcaaggacattatgcgtaatttgccgaaaaagagcccctctccacagggagaggggctctttttcggcttttataccgtccattcactgtgcaccaggccgaccagataccagtcaccctgatagcattcaaacaccagtttgagagaacaccagtcgtatccggccatctgttcgtccagaccgggaaagtgatactccacaaaacgtccctccggataggcggaggccacattttccagcgcgtttccctgcatcagaacggtgtctaccgccgtctcaggggcggcagtatagtcggcattgaagacgtagcgctcaaaatactcccgtccggtcagttcaatgggggcgccggtgccgtcctcaataccccacacataagggatgtcgtcctcgggcaagaggacgagctgggcggggaggagattgcggtcacaactgggctccaccgtggagtaaggcgtcagggtaacccctttctccgggtgcaccagcgcggccagggcctcataatcgctctccttcagcgcggcgagaacctgtccggcacggtcggacaggcaggaggtgccggcgtcggccggcgcggcctggtagagggtagatctaccctctacctcaatagcgtccagcgcggaaactgcgggatactccgctgcggtggcacggaccgagttcaggctggcagaggagatcccgctgccgaacagggtgcccagtgcaagcccgcccaaaagggcgatcagggcaaatagcacggccttcttcatccggtacacacctttcctgtcaggggaaattcacaattctttattttaaaagcagcacacaaaaaaagcaacaacaaaaggttacaaaagctaggatgcttttgtatatcttgcaatgatggaaaaaaggaggtataataaaaaatagttttttgtcagaacaaggaggattatcatgcacgaacacgagctgcaatttcatatcaaatgtaaggccggcgacgtgggccgctactgtttcctgcccggtgatcccggccgctgcgagaagatcgcagcctactttgataacccggtgaaggtacagagcaaccgggagtacaccacctataccggaacccttctgggggagaaggtgagcgtctgctccaccggcatcggcggcccctctgcggtgatcgccatggaggagctgcacaacatcggcgcggacaccttcatccgggtgggcacctgcggcggcatcgccctgcccgttaagagcgacgatgtggtgatcgccaccggcgcggtccgccacgagggggccagccgggagtacgcccccatcgagttccccgccgtgtccgactatgaggtgcagagtgccctggtgcaggctgccaaaaacctgggcaagccctggcacgccggcgtggtgcagtgcaaggattccttctatggacagcacgaccccaagcggatgccagtgagccaggagctgctctacaagtgggaggcgtggaagcgcctgggtgtcctggcctccgagatggagtccgccgccctgttctgctgtgccgccgccctgggggtgcgctgcggctcctgcttccacgtcatctggaaccaggagcgggaggctgccgggctggatcaggaggagagccacgatctgtccgccgccctggaggtaggcatcgaggccgtcaggctgctgatcgaagccgaccgggccgcgaaggggtgagccgcagaaccgctccgccctgcctttgcatagtgaaaaatgcctggaaccatgtggttccaggcatttcttattgcttattttaccgttttcagcgcccgcatggcgttgagaatggcgatgacggacacgcccacatcggcgaacaccgcctcccacatattggcaacaccggcggcgctgagcgccagcaccaggaacttgacggccagggcgaagacgatgttctgacggacgatggccagggtgcgccgggcgattcgaatggcgtcggcaagcttggagggcttgtcatccatcagcacgatgtcggcggcctcgatggcggcatcggagcccaggccgcccatggcgatgccgatgtcggcccgggagagcaccggggcgtcgttgatgccgtcgcccacgaaggccagggcccccttgggggagacctcacccagcagagcctccacacgggtcaccttgtcggcggggaggagctgggtgtgtacctcgtccaggcccagctcctgtgccactgactcacccacggctttggcgtcgccggtgagcatgacggttctgcgcacaccacaggccttcagcgcggtgatggcctccttcgcgtcgggcttcacctcgtcggagatgacgatgtggcccaggtagaccccatcggaggccacgtggacggtggtgcctacccggtgacaggggtgccagctcacgccgatgtcctccatcagcttgtcgttgccggcgcagatctggcggccgtccactgtggcccgcacgccccggccggacagctcctccacattggatacccgggaggcatccaattccttgccgtaggcctccttgagagagcgggagatggggtggtcggagtagctctccgccagggcggccagctccagaagctgcgcctcgccgcagtggtcgggatggatggcggtgacgttaaacacgccgcgggtcagagtgccggtcttgtcaaagaccacgagttccgttttggccagtacctccagatagttgccgccctttaccagaataccgtttttagaggccccgccgatgccgccgaagaaggacaaggggacggagatgaccagggcgcaggggcaggagaccaccaggaagttcaaagcccgctggatggagtccacccattggatggaggtaaacagggggggcaggagggccagagccactgcggccagcaccacggcgggggtgtagtaccgggcgaacttggtgatgaagttttctgccttggccttcttgctggaggagttctccaccagatccagaattttagccacagtggactcctcaaaggccttggtgacccgaacccgcagcaggccggacaggttgacacagccggagatcacatcgtcgccgggctgggcctcccgggggagggactcgccggtgagggccgcagtgtccacattagaggtgccctccagcaccacgccgtccagggggatgcgctcgccggccttgatgacgatggtgtcacccaccgccacatcctcggggtctacctgccggagctgaccgtccacctcaatgttggcgtagtcgggccggatatccatcagggaggtgatggacttgcgggactggtctacggcatagctctggaagagctcgcccacctggtagaacagcatgacgaatacggcctcggggtattcgccggtggccagggcgcccacagtggccaaggacatcagaaagttttcatcaaagacctggccgtgggcgatgttgcgcacggcccgccacaggacatcccaggcaatgacggcataggggatcagaaaggtgaacagccgcagccatccctccgtgggcaggagaagtgcgaccgcaaagagcactgcgctggcgaggacgcggaagagcattcgcttctgcttcttggacataggacatcgctcctttgaaaaaatccgggacggccgccgtaggccgtccctggtgtggtcagcggacgatggtacagtctggctccacctttttgcacaccttgacgacctcgttcagaatttcatcgaaccgggtgtcgtcggcgtccagagtcagcttctgggtcatgaagctgacggtggcgtcgtggacgccgtccagcttcttgatagcggcctccatcttggcggcgcagttggcacagtccagatcaatgagcttaaagtgctttttcatggtaaagtctccatttctttatagaatatgcagaggcagcagctccgccacgtgctccatcccctggtccaatatggtgcgcacgtgcccgtcggccagagaatagaatacggtcttgccctccctgcgggccttgaccagcctgctctgcttgagagagcggagctggtgggagatggcggactgggtcatgcccaggagctgggcgatgtcgcagacgcacatctctgattcaaagaggacgtacaggattttaatgcgggtggagtcgccgaagattttgaacagctccgccaggtcgtagagaacctcctcatccggcatgttctggttgacctggttcacgatggcctcatgcacatgcatgtactcgcagcgttccacatccctgggttccggcatccgatcacatcctttctaaaacatatgagctattgttcatgtgttattatatgcttagttgttcaaatgtcaataggttttgcaaaaatatttttattgcccaccaggtgatctggcggtatgattagaaaaaaggagggaaacacgatgaagcgagacgcaaatccggagaaggggctggaggctctggatcagtgtgaatacatggttctggccatgactgatggagagggaaagccctactgcatccccctcaacggggtacgggcgggggagaagatctatttccactgcgcaaaggcaggggagaaggtggactgtctgcggacccatccgcaggtctgcctgaccgcggtgggacaccagcgggtgatccaggccatctatgagacggagtaccagtgcgcagtggtacgcggcaccgccggagaggtcacagacgagacggagatgcgggaggccctctgggctctctgccgcaagtacagcccggactgcctggagcgggtggaacaggtgattgacgacagctttgcccgggtggccatctggaaaatctgtattgagtccgtcagcggccgctggagggactacagcggccagggctgaccagaggcgcgtatgtggattctatatgcctttgcctccgcgttctttgcgggagtgaccgccgtcttggccaagctgggcatggagggggtcaattcccatctggccacggccctgcgcaccattgtggtggcgctcttcggctgggcaatggtttgggtggcgggctccagcggcgcagtcggggcacttgaaccgcggagctggctgtttctcatcctgtccggtctggccaccggagggagctggctgtgctattttcgggcgctccagcttggagaggtcaaccaggtggcccccgtggataaatccagcactgtgctgaccatgctgctctccatcctgttactgggagaggcggcccactggaatacgttattggggatggggctgatcctggccggcaccctggggatgctccagcggaagccccgggaacgggcctcctccggctgggggtggctgccctgggcggtgctctccgccgtgtgcgccagcctgacttccatcctgggcaaggtcggcatgaccggcgtggactcctatgtcggcaccgccatccgcaacatggtggtgctggcaatggcctgggctctggtgctcgggctggggctccagcgggagattccgacgctgagccggaaaaactgggggtttctggctgtgtccggcgtgtctaccgggctgtcctggatgttttactaccgggcgctccaggaggggccggccagcgttgtggcccccatcgacaagctgagcattctagtgacagttggcttttcctgcctggtgctccgtgagcggctgagccgccgggctgccgccgggctgctcgtgctcacctgcggcacccttcttttgctgctgtagcatgaaacagcgccccatggcttttgccacggggcgctgttttggcctaaacagaggcagccgcgtttgtttttttccgtctgcggcggaggaacagcagggcgagaagtaccgccgcagccgcggcggccagtacccaggggagaagggttccgcttccggaggcgctgagcagcagagtaccggcggtgggggcggtgagcaccagatagctgccatcccgctccgcctcgatagggacggcggagccgtcctgaagcagggcagcgcgcacagagcccctaagaccgtcggcgcatacccgcagcgttacggtgtcagggagctccgccccgtccgtaatttggtagtcataggcggcagcgccgtctaccggctccggccgctgtgccagctccagccgtgcgtcgggagagaatgctccctcggcgagaagcagggggcgttctccgccggaggagatagtggtcacccagtcctcgtagaccgcctccaccgtcaggctccgggtgatgtggttgtggtcaaagggagcccaggcgccatagcgcccgccgtcgctgggtacttccgggaaggcggcggggtccaggctgccgccgtagggcacctccactgtgtccaccacctgctccccggcctggaaggtgacgcggaaggtgagaaagtccgccggaatgccctccagggcggagaaggcgccaaaggagaggggggcggtctgtccggcgtagtcgatgccgtcaattccgactgccttctcctgaaggtaatagttgccggaaactgtgccgtcagcccagccggccaccgcgcccagacgttcgccgctgccgtcgatgcgggtcatggcgatgcagtccgcgatatctctgccctcgccggcaatgccgcccaggctgctgtccccggttacgtcggcctgggctgcacaggagcggagcactccccgggagagccccgcgataccgcccgcaaaggagccgtcgtcggcccccacgggtcccatactggtgcaggagagggcagcgcccacctcgccccggcccaggacaccgccggcgcactcgttcttggcggtgacggggccccggttgtcacactggtagaggatcgctttgagcagagcggtggtatccaccagcagattttcactgtccagctccagattctcctcggggtccagggagagctcaggggagaccgctcccgcaatgccgcccacgttggtgtcggcctggatgccgccctcattccggcagcctaccacccggcccgggccgctctgggccccctcggccgaagtgttctccttcaccgtcttttccggaacctcggtcagttccacaatggctttccgggcctcgtcaagctgtccgatgatagcagtggtggtggcatgcagctcctggttggtctggccggccccctgggtcatctgatccacccgttggctgatgtcatccaagtgcccgtccagctcgtccaggcgctcctgtcccttgtcgcccaaggtgtccagatagccgttcaggacatcctcgatgatatcggcctggctgttaaccacccggagctgctccacgctgccctggctgaagtccttgacatggccgttcagggcatcgagggccttttccagtgcccgggcggcccggtccatgtcacggcgggcgtcgcccatctcatctccggcctcttgccacagcgttgtcagacggtccgccaagtggaacgtgtcggaacccatggcctccagatggccgctgatgcggctgaggtgcccgttgaaatcgatggaacccacatcccagcgcttataggcatccaggatgccagccagatccaggcgggctgcagcctggagggcgtccttgacaaaggactccagccggtcggtctcgtccgcgatctgacgcagctccgacacaagaccgctgtgttcccgctccagtgcgtccagcgtggaggagagactgtctccggtgtcggacaggctgtcctccagagtgccggtcagatttttcagccccttgcgtagggcggtgagctggttgcctacctcgtccagatcggcgctggcccgccgggtgaggcggtccacctcgtccagcaggccgctcatggccccgttgatggtctggaccgcgtcgtagacctggtcggcggcggctgaggtgtctgtgttgaaatcgctgcccgttccgtggattacgtcctggatggcggagagggagccatggatagcggagatatcgtccactgcatctccggctgaggaatggatttggccggagagctgagtcatgagggtggaaagggaggccagggcgccgtccagccgctccatggggtcctctccgtaggtgagggtcacgtagggctcaaactggcccacgatgccccctacgtccttacgccccaggatctcaccatcgttgaagcagcgaagcagcgcgccgttctgaatcccggcgatgccgccggtgttgtatccggtgtgggcgtagcccacagcggcgtgattggtgcagtcggccacggtgccggtattgcgcccggcgatgcctccactgttggtggcggcatcgtttccaccagtgttgacttcccccaggttagtgcagctctggatcatgccctcattgcgcccggcaatgccgccgctgttggtgtttccggtgacagaggcccggttggtgcagctccgcaccacgccggagctcccgttgacgcctaccagtgcgcccacgtcctcatctcccgtcacatcgccagtgacggtgacttgttccactgtgccgtggttctcaccggccaggatgcccacctgcgactgggagccgccaggggccactaccccgtccagagtcagattttttacgacagccccctcgcccagcgtgcggaacaggcctaccttggaacccttgtccagccaggcgaagccggaaatggtgtgtccggccccgtcaaaggtgccgcggaacacgggaatggtggaaaagccggtaccggccagggaaatgtcggcggccagcaccacggttaccccttgagaccaggtatccgaggtgcagctttgggccagcttgagcagcccgctggcatcatgaatggtgatggtatccccctccgcgccggcggggggcagcagtcccaggcagaataccagggccagcagcagggcggcgccccgttttgcatagttcatcatggcgttattcctccgtttcatccagttcctgccgcttgctctcaatgagggcatccacgctgccgtggagcacgcccttgaactcgccgtcaatgaaaccggacacgtggccccggacatgtccgtccagacgcatggtgccgttctggaagcgctgtttccggtcccggttgagggtaatggcggtgcgctcgataagggcgtcgcccagcaccaggagctggggcagcacagtcatgaccaggacgatggaggtcagggtgccacggcccagggtatcgccgatggaggagataatggtgtcggtggacagcttgccgatgagaaagccggccacagtcatgatggagccggaggtaagcacggtggggaagctctggttgagcgcctccacggcggcggcccgacggtcaagcacggccttgagctgtaagtagcggttggtgatgacgatggcgtagtcaatggtagcgcccatctgtatggcgctgacaatcaggtaactcataaaaaacaggttggtgcccgtcaggaaggggaaggagaagttgatccaaatggagccctggatggtgagcaccagcaggatgggcagcccagcggacttgaaggtaaacagcaggatgaccaccacaaagagcacggtgagcacactgattttcaggttgtccccggtgaaggaggcggccagatcccgggcgttggtggaattgcccaccagcaccacatcgtctccgtagtattccgcggcaatggcgcggatctggtccaggagggcataggtctccgccccctcctcggggagatcggcagtaaagaccatccgggtccactgttccccctggagctgctggagtccgtcgtccagggtatcctgcagttcctccacctggctggcctgctctccgctcaggcggataacccccttgtccttctgctccagcaggaactggaacacatccagcaggggcacggaatagtcgtccgtgtcctgaaagatagcgccgtattcctccacgctcaggccgtaagcctggtagagcagccgggccagctcgatgtccacgcccgccagctcggcaaactgccggggggtcagcttgtcggtgaggtagcggccgtcctccacctcaatgttggccaagccggtggcggtcgtcacgttgtccagggcctccacccggcggagcaccgcaccttcgctgtcgtagtccccacggggaaccagtacggcaatggtgttggtatagccgaaggtctcgttgatcttgtccatggcgatacgggtctccggacggttgcctgagttggtggaattggtggagaatacatagtcgcactggttggagcagtaaatgccgccgatgacgcacacggcgaacaccgccggaagcacgaagcgcagcttcatgatgaggcggccccagcctgcgatggagggcactaggtttttgtggcgggtcttttcgatgccccggttgaaaagcatcagcagaccgggcatgagcagaaacaccgacagcatggagcagacaatgcccttggacaggacgatacccatgtcgaagccgatgcggaactgcatcagcatcagggccaccaggccggagatagtggtgagggaggaggaggagatctccacgatggccttgctcagggcggcaatgtccgcctctcgggcgtccagaccgttgtcccgctcctccatatagcggtggcagaagataatggcgtaatcgatggccaaggcaagctggagcaccacggcgatggcgttggtgatgaaggaaaccgagtcaaagagaaagttggtgcccatgttgagaatggcggagaccacaaacacaatgagaaagaccaggacctccagatagctcttggaggtgaacaggagtaccgctacgatgacggcggcggcaatggccagaatgaccgtcatctcctgcataaggctgtctgagtcgtacggatcgccgctggggaagacgtagtgatcgtagggcgctaccagctcctttacggccgcgagggcggcgtccgcctccggactgccctcctcaccggtaaaggagacggaaaagagggcggaggagtccttaaagtggtcggtactgtcgtcaaaggcgacggaggacacgccatccagctccgctaattgggcggctaccttttcggcttggcggtaggtcacattggagagcataacctgagcggaggcgtaggtggtgaactcctcgtccataagggtcagcccccgtcgggtctcggtttcggcggggagataagaggtgatgtcattgttgaccaccaccttgtcaatagagctgccgcaaaagagcaccgccgccaggaagaccagaaagaaggcctttcgcttgtcgacaatgaaccgcgccagcttggttacaggggtttcagagcttgatgtttgtgacatgggtgggattccgcctttctaaaccgggagctcgggttgaggaatgaagtgctctacatgccgaagcagcacttcgtctggaacgtctgcaccgctggagagccaccagcggatcagggcgagcaggccgccggcatagaagcgggccgtcagctccgggtcaaacccggcggccggggcgctctccgacagctttcgcttcagcgcatccgtaatgatctcgtccagcacgtagaactctgctgcgccctggacggtgaggaacatccccctgtgggacttcaggaaggagagcgcgttgtgaaaaaggaccataaaatactcccggggcccggtacgtgggtccagggaggggtccaccggctcgaagtatttctgtagttcgtccacagcatagcgtagcagggccagcttgtcatcgaaatgggcgtagaaagtggtgcggtggaccatggcgcgctggcagatatccaccaccgagatttcactcagcggacgctcctccagcagggagagcagggcgtcggcgaggagcttccgggtacggcgctgccgcagatcttcccggggctggctggtttgtttcaatgggatccgctccttattctgggatgggaagaagtgtagcacagacaaaaacaaatgtcaagataaacaacatatgtagattaagtgaaacaaacggaactttttctgttgaggattatagggatacaaatggaaccgagctgtgcgagagggcggggaatgagagacaaccgccctctttatataattttataggtgcgcaaagtaggtttcgtgcaaaacaagtaaaccgaagccggataacccattgacgtagtaggagattgttgctatactaatttaatccatattgattggtgggaaagcttgcgctgcatggaagcagtaataagagaagaaaaaggaggggaaacgtgtggagctgaatgtggacgaggcgttgcgttatctgggcatcggcggacaagcagccgagtccattcgagcgagtgtggctgctgtcgcagacaagttaacggctgctatacagcccagatacacctaccgcatgtgttcccttcaaaaaacagaggccggattcctgctgccggaggccgagctgatccttccgggcgcggacgcagcgaaaatgctggagcagtgcgatcaggccgtgctgatggcgtgcactctggggacgcagtttgaagccctcttgcgcagggaacaggctcgtgatatgtccagggcagtcattctggctgcctgcggcagcgcctgggtggaggccgggtgcgaccaggtggagcaagaactggcgcgttgtcttccgaaccgctatagaacggaccggttcagtcccgggtacggggatctgccgttgtctttgcagccgaagatctgcgccgcactggatacccaaaggcggcttggactgtatgtaacagagagctatttgatgaacccatccaagtcagtcaccgccatcatcggcttgtccgactggccccagatggcccgcatccgtggatgcgcatattgttcgatgcgtgagacctgcaaattgcgcgtgggaggaaaacactgtgggaattgagatacctcaaaacaaatttttgatcctggacggcgctatgggcaccgttctccagcagcggggactgtctccccaaggccggccggagctgctgaatctgacggagccggagctgctggattccgtctataaagagtacatcgccgccggaagccaggtgatttatgccaacaccttcggtgccaacggcttaaagctggccaagacgggccacagtgtggaggaggtcgtgggtgcggccatcgccgtggcaaagaaagcggcggccggtaccgggaccctggtggcgctggatgtgggcccgcttggcgagctgttggagcctatgggtacgctgtcttttgagcgggcatatgacctgttccgcgaaatggcggaagctggtgcaaaggccggcgcggacttaatcgtggtggaaaccatgacagacctgtacgaggccaaggctgccctgctggcggccaaggaggccgcccacctgccggtgtttgtcaccatgtcctttgatgccggcggccggaccttcaccggctgtacggtcgcctccatggcccgtacactggagggcctgggtgcggacgctattggactgaactgttcgctggggccagacctgctggcgccgctgctgaaagaactgtgtgagaatacccgcctgccggtcattgccaagcctaacgcgggcctgccggacccggtggatggacactatgatatgggaccggaggactttgcccaggctctgctgacctgcgtggaggctggtatctccatcgtgggcggctgttgcggtacatccccggaatacattcgtcggctgacggcagttctggaaggaaaaaagcccgtatcccggcactataacaacaccggtcttgtctgtacccctgtgacacccatccgactgaatggtgtgcgggtgattggcgagcgtatcaaccccaccgggaaaaagcgtttccagcaggcactgctggaaaatgacctggactatatcctggatgtgggtgtccagcaggaggatgccggagcggacatcctggatgtgaacgtaggcttccccggtgtgaatgaagtggttatgctgcccagagtggtaaagaagctgcaaagcgcgatcgctgtgccgcttcagctcgattcctccaacccggacgcactggaggcagggctgcgggtctataacggcaaggctgcggtgaactctgtcaacggagagccggaggttctggagcgtgtgctgcctattgtgaagaagtacggcgcgtccgtggtgggtctgacgctggataaaaacggcatccccaaaacagcggaagagcgggtagccatcgcccgccgcattctgcaggctgctttggaccacggcatccccagagaggatgtgtggattgactgcctgaccctgacggtctcggcccagcaggagcaggctgcggagacgttgaaagcggtgcggaccatccgggaggagctggggctgcaggtggtgctgggcgtgtccaacatctcctttggcctgcccaaccgcaagctgatcacgcagaactttttgattcaggccatgcatgccgggctgactctgcccatcatcaacccaaatcaaacggagatgatggacgcggtggcggcgtaccgtgtactctccggagaggatcgggagtgccgagcctatgttgcccgtttcgcggcggagtcccctgccgtgcaggcagcgccgaaggcggatgccctgacgttgggcgatgcggtcatccgtgggttgaaggccgatgccggaaagctggctgccaaagcgctggagaccgaggatgagctgtctctggtagaaaaccacctgatccccgcactggacaaggtgggagaggactatgacaagggtacggcattcctgccccagctgctcagcgccgcccaggcggcacaggcagtattcgaggtcatccggagctctatcgccgccaagggcggtgtgcccgtgaagaagggaaaactcatcgttgccactgtgcagggcgacattcatgacattggcaaaaatattgtgaaaaccgtactgggaaattacggctacgaggtgttggacctgggccgggatgtgccgccggagaccatcctgcggacggttcaggagcagggggtgcgcctggtgggcctgtccgccctgatgaccaccacactgcccgccatggaaaagaccatccggttgctgcacactatggaggagcccccggtcatctttgtgggcggcgcggtggtgacgccggaatgcgccaaacaaatgaatgcggactactacgccaaggatgcccaccagtcggtggagatcaccagaaaggtcatgggatgatggatatccgcacctatttatcgcagggaaagccattgctgtttgacggggctatgggcacttatttcgccgcccatccgggccgggctgaggaacgctgtgaacgggccaacctgacccgcccggaggaaattctgcgcatccaccgcgcttatttgcaggccggctgccgggccatcaagaccaatacctttgccatcagtggagatctctccgatgggaacgatgaaaccgcctgcgacatcgtaaatgcggcctgccacctggcacggcaagccgctcaaccctatggggcttatgtatttgcagatctgggccccgcgccccgtgaccacagccgcgccccggcagatctataccagacgcaggcgcagtggtttctggaacagggggtgacccattttttggtggaaacgctgtctggtgacgaggggctcccggaattggctggttggttgaaggaaaaaaatccggatgcgtttcttatggtttcctttgccgtggaccatagtgggatgaccagcgccggacgtttgggcagcgagctgtatcgctttgcatcggaactggctggggtggatgcagtgggctttaactgtgtttctggcccccgccatttgctgaaatacattcagaccctggagctgagcgataagcctctgactgtcatgcccaacgccggttaccccaccgtgctgggccgccgcacggtattcggcggtcagcctgactactttgcagggcagattgcacaaatcgttcaggctggcgcctccatcgtaggcggctgctgcggtactacgccggaacatattgcccagacggcgcaggctttgaaagagccgcttcctaagtgcaccgtttctgctccgaaaaagctactcaaacctgcggccaatgcgtccaactccctttgggagaagttggaggcgggtaagcgtgtcattgccgtggaactggacccacccgtagatgacgacagcgcgggcttttgggagggggtgcaggccttgcggggctcgggggccgatgcggtgacgatcgcagattgtcccatcggtcgcccacgggcggacagcagcctgttggcctgtaaaatcaagcgggatattggtatagagccgttgccccatatgacctgccgtgaccgcaatctgaatgctaccaaggctctgcttttgggcttgtccatggaaggggtacacaatgtgctggtggtcaccggcgaccctatccctaccgaggatcggaacgaagtcaaaagcgtattcaatttcaactcccgcaagctggcccgctttgtccatatgctgaatgaaaataccctgcgtaccccctttcgtatctatggcgctctgaatctgaacgcccgcaattttgatgtggaactgcggcgggcacaggagaaagaggcatgtggtgtttccggctttctgacacagccggtgttgtccgccgaggcgctggacaacctgaaattggcacacaagactctgcggggcaagattctgggcgggatattccccgtggtgagccaccgaaacgcctgttttctgaacaatgagatttcaggcatgcgggtgtgcgatgagatcattcatttatatgaggggaaggaccgtgatgcagcggaagctctggcggtcaccgtttcgacggcgattgccaaagagatcttcccctacaccgacggttattacctcatgaccccgttccgccgggtggcgctgatggagcatattattcaaaatattcagcaatcgtgcatttcataagcaaggaaaaggggccgttcgtgtgaatggctccttttttgctctggtcggttctttaacaggtctttataccagatcaatcaataatgaaattacctattgacatcataggaaataggtggtagtataatcccataaaccaactgagtaaattggttttagaggggcgtgcaaaatgagcaatctgtttcaacaactgttgcgcagcaatttccgctgtggacgaatgctgaactcccgggcactggatttggccgggtggatcggtatgtcctccactcactttgttgtgatttaataagatcattacatggccatatctctttgtccgggagcgaataacgccccggtctttttgtatctaaaatcaaactataaactgaaagaggtataaaccatgaataacaattataagtttgaaaccctgcagcttcacgttggtcaggaacagcccgatcccgctacggattcccgtgcagtaccgatttaccagaccacttcctatgtcttccgcaactgcgcccatgcggcggcccgcttcgggctgacggatgccggtaatatttatggccgcctgaccaactctacccaggatgtgctggaaaagcgcctcgcagcattggagggtggcgtggcggctctggctaccgcttctggtgccgccgccatctcctataccattcaggcgctggcccaggctggcgaccacatcgtggcgcagaagaccatttacggcggcagctacaacctgttggcccacaccctgccccagttcggtgtctccactaccttcgtcaactctcatgatcttacagaagtggaaaatgccattcaggataacaccaaggcaatttatctggagactctgggcaaccccaactctgacattccagacatcgacgccattgccgccatcgcccacaggcacggtctgcctctggtcatcgacaataccttcggcacgccctatctggtccgccctattgagcacggcgctgatattgtgctccactccgccaccaagttcatcggcggccacggcaccacactgggcggcatcatcgtggactccggcaagttcgactggaaggccaacggcaagtacgcgcccattgcaaaccccaatcccagctaccacggtgtcagctttgtggacgctgtcggtcccgccgcttttgttacttacattcgggccatcctgctgcgggataccggcgccgccatctctcccttcaacgccttcctgctgctgcagggtgtggagaccctgtctcttcgtctggaccgccacacagagaacaccaagaaggtcgtggagttcctcgcaaaccatcccaaggtggagcatgtgaaccatccctccctgcccgagcatcccgaccacgctctgtatgagaagtattttgccaacggcggcggctccatcttcacctttgaaatcaagggtggtcaggaggaagcccacaagtttatcgacagtttggaaatcttttccctgctggcaaacgtggccgacgtgaagtccctggtgatccatccggccaccaccacccacagccagctttctgctgaggagctgctcgaccagggcatcaagcccaacaccatccgcctctctatcggcaccgagcatattgatgacatcattgccgacctggaaaagggctttgccgctgtgaaatgctgattgcaaatttgaagtaaagcacaattttatgttttggaaaggattttgactatgatgtgtatgtgtcaaattatgcactgttataaaaatcgaatcatttccatacctcgcctgcgtttgatacgataggctgtgctttgtgtgcaattaagcggggtatccatgagaaacggatgccccgctctttattttctcacggaaggaaacgtaagatgcagtctatatatatttaaagaactgctatggaaaaattttaggtgcggacgatgtacgcacggaagcgtccccaaacgtaataattttttggaccggaaggattccagcgaaagaaggtatcagtttgaatgaattgcgtgatcaggtatgtgctgaaaaagaatatatgattaacttacgtcgggattttcaccgtcatccggaattgtccctacaggaaaggcgtactgctggggtgatcgaacaggagcttgagcggttcgaaatttcgcatactcggatcggagctaccggtgttctggggattttgcgaggcactcaaagcggcagcggagtcgtagccttacgggcggatattgacgcgctgcccattcaggaaaccaacgatgtggagtaccgttctcagacagacggaatcatgcacgcctgtgggcacgatgcccacacagcaagcctcttgggtgccgcgaaagtcctctcccaaaatcgtgaccgctttggtggagagctccgttttctgttccagccggcggaggagaccggaaaaggcgctccggattttataaatgccggagccctggatggcgcggagcgcattctgggcctgcacagtgctccggatctgccccttggcaccattggacttacgcccggactgaacaatgccgcagtggatcatttccgtatcctagtccatggcaaggcggcccatgtctccaccccgcagttgggcgcggatgccctgtatgccgccagtcagatcgtggtagcgatccagggattggttgcccggcgttcttcacctgtggagccagtgctcctcggcgtcgggaaatttgctgctggaacgacctacaatgccgttgcggaatatgcggagctggaggggaccacccgcacgatctctcaggagacgcgtctgcaggtgcgggagtggatcgaccagaccgcggagcagattgcagccatcagtggcgcggaagccagggtgatttggtcggatattacctccgctctgattaatgatccgcaggtcagccgtgaggcggcagaagtggcaaaggggctgggagaccatattcaggtcgtcaccaatcgccccttgtccctgggcggcgataactttgctgagtatcaacgttttgtaccagggtgctacgcctatattggcacagcaaacacagacttgcccagcacattgaacagcctccacaacggaaactttgatttggatgagaatgcacttgtcttgggagcaggcttatatgtgggatacgccctgtggtggcttggaaggcaggagaagccatgattcaattagaacatattagcaaacgatatgtcggccccagcggtacggtggatgcgctgaaggatgtgtcggttcatgtggagaaaggagatatctatgggattatcggctcctccggcgcaggaaaatccactttgctccgcatggtcaaccagttggaaaaaccggataccggcacagtcaccgtggctggccgggaactgagcacgctctccaaagctgagctgcggaagatgcgccgtaaaattggcatggtatttcagcagttcaacctattggagtccaaaaccgtattccagaatgttgcgattccactgatcctggagggcatccccaaggagaagatcactgaacgcgtcaaagaagtgctccatatcgtggagctgcacgacaaacgagatacttatgtcactcagctttccggcggacagaaacaaagggtgggtattgccagggcgctggcaacagaacccgcaattctcctgtgtgatgaagccaccagtgcactggatcccaagaccacagaatccatcctcggcctcctaaagcgcatcaacaaaaagatgggcgtgacaattctgctgatcacccaccagatgcaggtgatccagatgatctgcaacaaggttgccgtcatgggaaacgggcagatcgtggaacagggaacagtgttggatgtgttcagccagcctcatgctccggtgacacaggagtttgtccgcacggttatcaacgatcagatccccaagagcattctggatttgctccagacagaaacgcggcactacgtgattgaccggctgaaatttatcggcgccagcgtcaaaaaaccggtcatttccgagatttgccagattgccggcgtggaggttaatatccttggtgcaaccgttcaggagtttggggaaagcatcatgtgtattttcatcctgcaaatgtttggttccgatgacaagctgctccaggccgaagcacagatcgacgcgactggagttctccgcgaaagggtggtattcgactgatggaagctctgttggaaacaaagatttttaaggtatctgtcgagcgactgctgcttaatggcggtcaaacactatacatggtgggtattgcactattgattggcaccgtgatcggtaccttgctcgccttggtgctggtgctctgccgcaagggcggccttgtggaaaataaagttctacacagtatcgtcagcctctacatcaatgtggtacggagtgttccgttcatcattttgctggttaccatcatgccgcttacccgcgctattctgggtacgacgattggcagcacggccgctttggttccgttagtggtctatatcagtccctatttagcccgcttgattgagaacagtttgctggaggtatccccaggtattctggaggcggcccaggccatgggagccacaacctggcagatcatccgctgttttctgatgcctgaagcgctgggttcgatggttctggccttgaccacaggaaccgtcggcctgttgggcgcctccgctatggctggttactgcggcggaggcggtgtcggcgatctggcattgacctatggttatgaaaagatgaataccccgttgatgatatttactgtcattgttctggtcatcctggtacaactattgcagatggcaggcaaccgtgtttcccgccgtctgcgtgagcacagataaggtgtgattcatattagtgtcgagtcttgaaagaaggttaatcctatgaagaagttttttgcattggtagtgtccctgattctgattctgagtttgactgcctgcggcggcagtgacagctccacggacagcgcaccggactctggagcatcctccgccgatcccgccgcaaagacggagatcgtctacggcaagtctcaaggtccctacaccgaattgttcgaagcagcgatcgttcccatcctagaggagcagggctacaccctgaaaggagtcgacttttccgacctgctgactgccgatatcgccctgaacgacggcgatgtggatgtgaacgtggaacagcacacggcatacgccgaaaactttaactccaataacaacggtgatctggttcccatcagtcccatccctaccgttcccgccggtatttactctgggacccacacatctctggatgaagtgactgacggcgcaaaaattgccgtccccaacgatgcctccaacaccgctcgggcctatgtcctgctgcaaaagatcggctggatcactctggatagcggcgtagatccctctgccgtgacacaggatgatatcgtggagaaccccaagaatctggaatttgtggaaatgaagtctttaaccatccccgcagccatccaggactttgactatgtaatcattaccggcagcattgtttacaatgccgggattgacccctctgctgcactggcaaccgaggacattcttgatcaccttatcctacaggttgttgtcaaggaaggaaacaaaaacgctgactgggcgcaggccattgtggacgcttatcactctgaccgatttaaggcctatctggaggagaacaacgacggcctgtggtgggttcctgaagaactgcagtaggaagatgtcagctaatagagaaaagagtgccctgattgcaatgagcggcggtgtggacagctctgtcgcggcatggctgatgcgtgagcaaggatatcgctgcgagggaacgaccatgcgtctttaccgcaacgcggacatcggcttgagtcagttccatacctgctgctcgcagaaggatatcgacgacgccagtgaggtggcgtttcaactggatattccctatgaagtgctggattttaccatggacttcaggaaccagatcatcggaaagttcatccgaacatatgagtcgggcgggacaccgaatccatgcattgattgtaaccggtatatgaagttcgataaactgcttcgctttgctgaagagaaggggctggagtatgtggccaccggacactatgccctcattgaatatgacgaagtgtccggcaggtatcttttgaaaaaagcgctggatgacagcaaggatcaaagctatgtgctgtatatgctgacacaggatcagcttagccacatacagtttcctttgggcggcaaaatgaaaaaggaagcgagagagatcgcggaacagttgggcttctgcaacgcccggaagcacgacagtcaggacatttgcttcgttccgaacggggactatgtcaagtttatggaacagtataccggaaaacactacccggcaggagcgtttcttgatctggagggccagccggtcggcagacattgcggggctgtccgttacaccttggggcaaagaaaaggacttggtcttgccatgggtgaacctgtgtacgtttgcggaaaggatatggctgccaatacggtcacagtggggccggagaacgcgctgtatagcagtatgcttcttgcggaaaatatgaactggatctccatcccgcaattaaagcagcccatgcgggtgaaggccaaaacccgatatcgtcaggcggaacagtgggctgctgtgtacccggagcaacacggccgtgttaggctggaattcgatgcgccgcagagggctgttaccgttggacaagctgtggttctgtatgatggagatgtcgttgttggcggcggcacgatctgccaggcgccgccaacgaaacgctgattcacaaaatacaggctcaggcttggacagccatatgttgaacggcggacatgaccactgcggcgcctgctgctgcggaagttgcggtgcgctgaaactgacccaaacagaggtcgatttacggcgtctttctgctcagattccgagtggaagtatggttctgaccacaaaaggtcaggcagtgattgaatgagtggaaatacaagaattgaggcataagcaacgatgctgaatcaatttttgaggacacagcgtctcttccaccgggaggacatggaaaaactgtatcagggccgggctgctgggggtggtattggcggcgttggcgaatttggtctcattgatgatggacgggtgtgccggacaagtgtgaatcgctacacttttgcaaccagaaaaaccgtggggcagaaagcgtggaaaaggtgaaatccgcttcactgaacgttcctgtaaggagctttgcggagaacattttaacgagagggagtactttaaataatctcccggttagaaccacgctttaagctggtgatacccaattgaggattacttaaattggcggtgagttccatgcaagctgtgtgatttggcggcggatcggagacagtgtggcgccgggagaaggttttcgccattgttttgcaggaggggatgattcactctggagacaaaattatagttttaccggagagacgccatgatttaccttgactactccgccaacacaccggttgatcctgctgtgctagaggcattttgtaaagcggagcaaacgtatatcggaaatccgaactcaacgcattgcgctggacgtgcagcctgcgaggagatggcccgagtgacagatcatattgctggacttctcggtgtggaacccgccgggattatctacacttccggagccagcgagtcgaacaacctggcaatcaagggaattgcccaggcttcccgaaataccggcagacacatgatctccaccgtactggaacacgcatctgtgggcggcacacttacggctttacagcagcagggctgggaagtcgatttgttggatatccagcgggatggaaccattgacctggagcaactgggtgatctgctgcggaaggacacgatcctggtgtcagtctgcgcggtggacagtgagctggggacagtgcagccaatccgtaaaattacggagattctaaaagattttccaaactgccgtctacatgtggatgccacccaggcgataggaaaaacggagctggtgatggatggtgtggacaccatgagcatcgctcctcacaagttttacggtctcaacggcagcggacttctcctgaaaaagagcagtgtgattatcgagcctcagattcacggcggttccagcacaacgctttaccgtagtggtacaccggctttggcactggctgtttccattgaaaaagcgcttcaattgacgctgacgcagcaggaagaacggatccgctgtgttcggcagttgaacgaatacctaaagactgcactgctgcactatccgtcagtccggatcaacagtccggaaggcgcggtaccgcatatcctcaacctcagtgttcaggggcttaaaggcacggtatttcaacgtgttttgagtgagcggggcgtatgtgtttccgtcaagtcggcctgttctgcggaggggacgccatccaaagcggtatttgccgtcagcggggaccgaaaaaatgcgctgtcctcctggcgagtgagcctcagtcatttgacaacacgagaggagcttgacgaatttttgcaggtgttcgaccaatgttacaaagagttgggtccatgaaaaatccattggactatcagatttcgaagtatgacgcggttccaccgctatgctcaatgacgcgagctatcggttccaagggaaagatacccccctgtagtttaccagtaatatcaccctgtattgtttggattgttacggctcagatggagtttgcgaaaagggtggaacctttttgcggagaacggctcaatctgtgacaacggaggcggcagttctaaacgtcaggaaaacaaaacactgctctgtgggttgaaacgaagcaatcccggcattaaaaagagtatattcaacaacatccacgctgttttccagatacggtgcccggttgcaaaaaaacggtacagagcactgatttttggagtaatatgaggaaaaatgagccggtaggatatcctaccggctcattctgttacctaatcaaattacataattatctccagcagcaccggacttcatcaaatctgcaatggtaacattgtccagatattcgttaattactttatctagaccctgccacatatgtaaagtgcggcattccgctgctctggcacagaccgctgcgcctggtccgagacaagaaaccggcgccagggagtcttccgtaagtcgtaaaatagcgccaacagtgtactggtcaggcgactttgtcaatttatatccgccgcccttgccccgcagtccgctgagaatatttgctttgacaaggagcctgatgatggtttcaagatatttctctgaaatatcctgccgctgagcaacttctttcagtgggatatagccgtccgtctggtgctcagcaagatcaatcataacgcgcagtgcataccgccctttcgtagaaatcagcattttaaagtctccttgcactcattataacctattatagcgcatggttaataggaaaatcaatagcctttttggagcggccctattgacaaaatgagcaatatctatattttgaggaccaattgatcgggaaaacaccgcctctgaatctcgtccctattgagcagagcgaagggctggaggccaacctgctcggcaaactcgaatacttcaatcccgctggcagcatcaaggaccgtatcgcaaaagccatgatcgacgatgctgcggccagcggaaaatgaaagcccggttctgtgatcatcgggcctacctctggcaatagtaaggggcttggtcaatccgaaggcgttttggctggcatctcttccggtgctgcggtttgggctgcgctccaacccgccaagcggcccgaaaatagaggcaaggaccatcacggcattgctgccggatacaggtgaccgttatctctctactcctctttttgcggactaagaagataaaaaagatagtaagtcaacttcatgacttactatcttttttgtttacccgtaccggctgcgttgtccagaggtcgcattgtgtccctagaagaattaatccctggtccggggggcttctgtgcttagttgtgggattctgtaaagcgcatgagaatggcggccatctcggcacgggtggcggtgccggcggggtcgagccaaccgccgcccttgccggtcagcagaccctcgtccaccgcccagcacagggcatctgccgcgtaatcgctaaccgcgtctttgtcgttaaagccgtgcagactgcccgtgggctccggcgtgcccgcatagcggtacagcatggccgccaactgctcccgtgtcactgcgtcctccgggccgaaggccccggtgctgtacccggtcacaatcccccgggacgccgaccagttgaccgcaccggcgtaccacgcgtccgacggcacgtcggtgaagcctgccgtaccggggacggcagggctgtccgccaggttccagagcacttgggccgccatggagcgggtcagcactgtagtgggcgcaaaagcggcggggccagtgccgtccatgaggccgtttttatatacatagaccaccgcgtcatagtaccagtcgccgctgctcacgtcggcaaaggggagtttgggctcggcttcaatttttgcgaagctcgcctcaatctccaccctggaggcgggcattttaaaggtgtatttgccgccaccctcgttgatgagcttgatttcgccgccattcttgccggtgacaaccagtttgtccagctcatagccctcgttgggcttcacggtgatggttacggtgtcgcccttttcggcccgcttggggctgacggtgacggagccgttttttccgctgtccacgctgacggtgaaactgccggagctggagcctccgccggaggagctgggccacaccacagccgtacctgtggccttgttgtagtggtcagtatcatctggggtaaaggtccaggcgtaggagttgccgcgctccacggtctggtcgccatcatcccaggagagtgtacccgcgacctcaatacccgccgcgttcttcatggagccggacagggtgatggtagacagctccacgccgctgctgaccttgtcaaaggtaggttcgcccttgggatttcccatgacgatgctgtatcgccgggaggcgtaacagtaggtcttggtgtccttgttatacccgttgatgacaaaggagtagacgcccagctcggtgggagcgatggccttgagtgcatcggcggtcagatgggagtttgtctgattgtacaggtgcgttccgctaaaggcggtgccctcttgtactgcgtggaagtgggcggtgaaggatgtgatggaatggtcagtgcttgtgcccttggtgtacagggtggtcaggttacgggtggtaggaacgatgccctggccggtgtactcgtacacccggtctccctcaaaggtctccagaggcttgtcatctccctccagatagaggtctacctcattcatgccttcctcatagcaggtaacatagaggatgatggtgtcactcggctgccaattcgtgcccacggtgcagaaacggtagttggggtttttcagcttcagctccacccggatgctgtggggattgccgtccgcatcggtggtggggtgggtgggcagggtgtcagtttgtataatatttccgcttacatcgttctgataaacatagtaaacatcgctgtcatcacctatgccgggcttgaggtcgatcttgtccttagtgatatcagcctcataggtcccgttctgactgccctctttcaccggatagaagcccagcaggtcactgaacttgggcgcggtgccatcctcattcagcgcgtaggtgatgtacggacggccgatgccgtcgtcattctgcgttgtggctgccttgccgtagatgatccgcatgggggtgacttccacattgacggtcagcgtccctgtgccgccagcctccgttctggctgtggcggtgatggtggttttacccaccttgtttgccttgagctgatcgtcctcaatagagacaatggtgctgtcactggactgccagttggagagggtgacgccctcgatggtcgggagcgtctgggtggagccgtactccatggaaatagcatcggatttcagctcgatccacttggcgtagtaggtctttcctactgtggagttggtcacagcggtaccggtacaaccctcgttttcgtaccagccatcaaagatgctgccctctttgatgggagttgccagcttgccagactcaaacttggtgtccgccgcaaaggtgccgccatcggtaacggccagagaagttttctctgaatcgaatccattgcttgttgaggttggatcagcctttgactgcaacatcaaggaaattaaatcgcttgaacccaaataaattacactattatttgccattcctttaaaaatttgattattttctggaatagaggaaagcgatgccggaatatagacaccctccattaaagatgcatccttaaatgccatgctaccaatagtgttaaggttgtttgaaagaaccactcttttcaaattagtacatccttgaaaagcactctcggcaatttcggtaacagagcttggaatgaggacttcttccagcttagtacaccccttaaaagtctccttgcttatttttgtaaactgtggattttctggaaaaacgaaactttcaagctgtatacagttactaaaggcaccaggagcaatcgtcgttaccgtatctggcagagtaatgcttgtcagagaactgcactccataaaggcattaactccaatttcagtgacggctccattaaactcaatgctactaatgctcgtcgctgcaaatgtataggatgggatggaaaatacgccaaccggaacagaaatcgttccattcaaagaagaacatttataaaatgcttgtggctcaatagtagtcagatttgctggtaatgtgatggaggtaattccagaaccataaaacgaatcttgcccaattttagttatagaggccggaagaactaccgtcttcaaatttgtataattcttaaacgatttcgcgccaacagaggttactccgtcttgaattactactcgagtaatcttctcgcgtgagtagtgccattctggctcgccactactcacattgtcttccgtgatataagcatttcccataggaccattaccgaaaattgtgagagtataaccatcctcatcgttcgctgtaagtgcccatttaacagtatcggtatattccttgtttatataatcatataggccgcagttaccggacatcacattgtcagcgggggcgggatcatcctccgtggtctccggttcatcgggcaggacgcactcacacttatgcccggcctgcagggtacagccctcggtcacggcgcaggcaaccggcgtctcgctgcccttgtctctctcggctgcaagggcagaaacagggaaaagagacagtaacagtaccatcgctatcatgcttgctagtagtcgttttctcatttgatctattctcctttatacaaaagtagtacctttctaaactgtccgctttgtaaaagtgtacctttctaaagcgcaattttactgtttgtatttgctgaaaaagtattgaaaatcctggaagacttgtgtatcatacaaacagggatcgttctatctgaaagtttgtaaaggtacaccttttcaaacaatgcagcgcctctggagaaatccagaggcgctgctgtcttcctgtcgcggacaaaattgtttgctcttatcaacttcgtgatggaaaatgctcccttaactgttgcaaattcgtgaattatatggtatcattttacatgaaaagacattggaagtaaagggtgttgcacgatgaatgcaaaactatccaaggtcaatcagtccattgaaaaaaccattcagattgtggaggttatggcccgcggtaagggccctatgcggctgcaggacgttgctaagaaatgtggaatgccggccagcacggtgatgcggatgcttaatacactgcaggtgtacggctatgtcaatcaggatccctgtacgcagcactactctctgtcgttgcggtttgcgcgcctgggttgcttggtcagtgaacagaccaatatgcgggatgtggcgcggccattcctggcagagttggcgcagcgctgtcaggagactgtgtgcctgtggtgtgaggcagaaatggaagtggagtgcaccgatgtggtggacggcccggacggaatcctgatggtgagccagcgggtaggcgcacgcgccccgctccacgccaccggcgcgggaaagctcctgctgctcaattacagtaaccagaagctgaacgagtacatagcagttaagggcctgcgggccctgacgccccatacactggtcacgcgggaggcgctggtgaacagcttggagatgatacgcagtcggggctatgccctggaggacgaggagcgggagctgggtgcccgctgtgtggcggcgccggtgcgtgattactcggggcggattgtaggcgggatcagtgtctcaggtcccaccacccgtatgtccagggcgcggctggaggcgctggcacccctggtaatggatatggcagcggaactctcccgccggctggcctatgaggagtggcctgaggaaggggattgactttcccggtcgggcggtatatgatggaagcacagttgaatatcgaactccggcttttgtggcatttacgcgaccccgcctgtccgggcgggacacgtattcttgttcgctgaacaagggaatcaggtgaaattcctgaacacggcccagctccgctcggtgcggatgggtacgtagctgtaagcacggagcgtatcctctttccgtgaaagcgggtcactggcttgtgctgggaaggcgggggatatgcgctggcggcatagccgtctggacgtgtgagtcagaagacctacaaggagcagtttctccccgagtggaggggagaggcatggtgcgtacaaaagcggtaacctgaggttaccgcttttttcgacctgctcccaaggtgggaaaaagcggatacagaggtatccgctttttcatttcgggatcgacggttccgcttaacaggtgaattccaggaccggccaggcggccgcccggacattggggagaatggaacggggccgcagactcccgacggagcgcgcagggcctgcgaatgggttggggcggggagaacagctcccggacaggcgccctgccagctaagctggcagggcgcctgattcatattgaataaaaaactccgcaaccgaaaggttgcggagttttggcggagagagagggattcgaaccctcgagacgctattaacgcctacacgatttccaatcgtgcgccttcgaccaactcagccatctctccatggtgagtgctctatccttgctcgcccatcagccgagcagcagagattattatatcagctttttcgaatacgtcaagaggaaaattgaaaaaaatcaaaaaaagagggaagtcaggaaaacattgtgccttgccaaggggaggggagagcggttacaatctggttacaaaacaaagaaaggttgtggaaccatgaaaaagctggtactggccgtggcattgagtgcggctctggtgaccaacggacaggcggcgtccgccggcccgctgcgggtcaacggcgcaccggtggacgccagcggcagctatgtccatcaaaacactacctatgtccccctgcggacgataacggaggcgctgcgccccgatgcagaggtggattgggtgaaagaccgggctgtggtccgggcggaggggctgaagctgacggcccggccgggtgatgcctacatagaagcaaatggccgtacgctgtatgccaaagacggcgtccatttgaaggcggggcgtacgcttgtgccggtgcgggtgttggcagaggcgctgggcgccaccgtggactggaatccggccaccggcgtggtgtcggtcaacgggggaggcagcgcaacgacgcagcccgactacaaccgggaggacaagctctactggctgtcccgcatcatctcggcggagagccggggagagcctctggagggacagatcgcagtgggcaacgtggtacttaaccgggtggattccccggacttcccggacaccatctacggtgtgatctttgacgaccggtggggcgggcagtttacccctgtgcgcaatggcacaatctatcaggagcccacggaacagagcattcaggcggccaagctctgcttggagggggtcaacgtggccaaggacagcctgtacttcctggcgccggcgctgaccaacaaccattggattatggaaaacagaactcacgtcatgacgatcggcgcccactggttttaccgctgagcgcggtggagacacgtccggacagctttccggacgtgtttctttttgttatcatttgtagccgaaggagagctggaaacatcgaaaaatgttctgacgcacaaagagaagggtgaattgaaaccattgcagcacaatggattgaacagtatcgacaaaacttcctcttgactttttaggggagaatcggttacaatgcggttacaaaacagtgaacaacaagtaacagattgtaacaggaggaatcctaagcatgaagaaacgagccctttgtgcgctcgtcagcctggccctttgcgttaccctggccgggcaggcggcggcggctgagagtagcgtcagctttgtagtcaatgggatcacccttgcggcagatgtgcccaaccgtgtggaggcgcgcactacctatgtgtcctactggcccatcgtgagcgccttgtatccgaacgcgacggcggagtgggtcaatggtcaggcagaggtcaaggccgacggcctgaccctccacatcaagcccggcgcccagtatatcgaggccaacggccgctacctgtacgtgccggacggagtcaagtgcgagggctacagcatcatggttcccatccgaaccctgtgccaggcgctgggcgccggcgtggagtgggacggaacccagtccaccatccagatcacctctggcagcgggcccatcctctccggtgagcaggcctaccaggcggacgtggtgtactggctctcccgcatcatctatgctgagagcggcaatcagcccttggacggaaagattgcagtgggtaatgtggtgctcaaccgggtggccagcccccggttccccaacagcgtctacgaggtgatctttcagcgcaaccagttcacccccgccgctaacggaagcatcaaccgtacccccagcgctgagagcgtggttgccgccaagctgtgcctggacggtgccaacactgcgggcagcgccctgtactttgtgaatcccacagtggcccccggaagctgggcctcccggaaccgcccctatgtggcgaccatcggggcccacgctttctacgggtaaggcgcggcaaaaagccgagaccattggtctcggctttttattgtgcaaaagcacagcaaaatggccatgtatcgccatatttgcctgttgtcatgatatgtgcatcgtgtatgaaatgtcccgaccgggaactgcgggagaaaaggatggaaatatccacgcgcgtatgttaatataaatacgtatgtccaaatgattcagcatggagggaactgactttgacttattttatgtccatcttaatggggattatccagggcgtggcggaattcctgcccatctccagctccggccatctggccctgtttcagacgtttttcgggatggagaacatggaggagaaatacatgttctttaccgtcctgctccacttcggtacactgatttctgtctgtatggtctactggcgggacattgtggatatgatccgcgagttcttcctgggcattgccgccctggccgggcggaaggataccggcgttgccccgccgccggcccgacggatggtgatgctcatcatcatcgcgaccgtgcccctgtttgtgatggtgtttttgcaggatgcggtgaaccaactgttctccaactccatcatggtttcctgcgccctgctggccaccgggtttatcctgtttttctccgaccgcatggcccggggccacaagaccgccaaaaacgcgacggtggcggacgccttgatcgtgggctgcggccaggcgctggcggttatccccggcctctcccgctccggcaccaccatctcggttggcatgatgcggggctttgaccgggccttcgccgtgcgcttctccttccttatgtccctgcctgccgtactgggcgccaacgtcctggaaattaaggatgcgctggcctcgaacttccccattgaggagctgcccatgtacttagtgggcgtagcggtgtccgctgtggtggggtactttgccatccggcttgttaagagcctgtccgataaggggaaattcggcaagtttgcttactactgctgggcggttggcctgggcagcttggtagcgggcatcgtgaagatgatgctgctcaagtgacagaaacccgatacaaaagaatgaccctggaaaggatttgattttcaatggccacagcacagaagaagaacgcgggcggaaagcggacggcctcgggtacgggaaggaccgcatccggctcccgcgctgccggcagccggaagaaggccccggcgcccaggcccatccgtcgggaggtgggggcggtggcctgtctgctgctggccattttctccgcctttggctacttccatattcaggccatctttatcgactttttctgcggcttggtcaagggcctgatcggctacggctactggctgctgccccccatgctgctggtggccagcgggatcttggtcttccaccggggccgcccggtacggctgcgggtgtggtgcgccctgctcaccccagtgctggtgggctgcctgctccacctgattctgaccaggggctcctatgagtggagcctggagctggtcaagaccctgtggagccagggagaggctctcaagagcggcggtgtggtcagtggcttgatcgccctggggctgactgcggtgttcagcaagtacggagccggtgtaatcttcgtcctgatcgcggccatcatgctgatggtggtgttccacgtctccccggtggatatcgtggaccggatccgtgagcggccccgggtggagtacgaggaggaggaactgcccgagcccaagccccgtgagcgccgccgtgcccccgagccggagagcgccgcccgccgccagcaggtgcctcagatcgatatccccgtggacgatggtccgctggtgggcaaacggcccgagcccaagcccattgagaagaaggagcgctttttcaaccggaagccctcggtgcccacgccggaccaggtattggccggtgcggcggctggggatgtgcctgaggcagaactcattgccgtgtccccgccgcctgagacgcctcaggaggcagttcaggcggcgaaaccggtgccggaacccatcccggagcccgcccctgccccgccggtgccggagattgagcgggagcccgctgtggccaaggtgaagagggaggaggctgcccaggcggcggccgaggtggcccaggacatcgcccgcaaactggaggaggggactccggcggcctaccagtatccgccggtttcgctgctgaaggagggggcaggcgtgtcgggcgccgacgtggccagcgagctccaggccaatcaggcccgcctgtccgacaccatccggtccttcggcatcgatgctaccatcgccaatgtgacccgcggcccatcggtgacccggtacgaggtggagctggaccagggggtgcggcttaacaagctgaccaacctggctgacgatatcgccctggccttgggggctaccggcgttcgcatcgcccccatcccggacaagatctccatggtgggcattgaggtgcccaacaagctcgtctccccggtctatatccacgatgtcatcgactccagtgagttccgggacaacccctccaaggtttcctttgctgtgggccgggacatcagcaaccgcaatgtggtgggcaatattgccaagctgccccacctgctcatcgccggcaccaccggctcgggcaagtcggtatgtaccaactctctgattatctccctgctctacaaggccacccctgaggaggtgcgcctcatcatggtggaccccaagatggtggagctgggcatctacaacggcatcccgcatctgctcattcccgtggtcaccgaccccaagaaggcggcgggcgccctccagtgggcggtggtggagatgatgaagcgctaccgggccttctcggagatcggggtgcgggatctggccagttacaacgcccacgccgccaagaccgagggcatggagaagatgccccagattgtggtggtcatcgacgagctggccgatctgatgttggtggccgccaaggaggtggaggagtccatctgccgggtggcccagatgggccgcgccgccggcatgcacctgatcatcgccacccagcggccctccgccgacgtgatcaccggcctgatgaaggccaatatcccgagccgcatcgcctttgcggtggcctcctccctggagtcccgcatcatcctggacaccaccggcgcggagaagctggtgggccggggcgacatgctctacttccccctgggcaccggcaagccccagcgggtgcagggctgcctcatctccgacgaggaggtggccgccgtagtgggctttatcaagcagaacagcggctcggccgagtattcggaggagatcatccatgagatcgagcagcacgccgccgagaaggagaaggggagcaagggcgtgggcggctccgcgccggacgaggtgggggacgactacgacgagctgctccccgccgccattgaagtggtggtggagaccggcatggcctccgtgtccatgctccagcggcggctcaagctaggctactcccgggcggcccgactggtggaccagatggaggagaagggagtggtggggccctttgaaggctccaagccccgccaagtgctcattaccaaggatcagtggcaggagatgcagtttaagcaggggatggtggacgctgccccagagcccgtccccgacgagctggaatttgagggcgacgccatcccccagagccgggatttgcccccgtttgatatggaggattgagcacgatggagcactatgtcatcaagcccgccggggaggcgggggaagcggcggttcacgccggcctgcgggcctataaccgcacctttgtctccgatacggcggatctctccctggtggtggaggacggggccggacagatcatcggcggctgcgatgccttccggatgggggagctggccctgctggacgtgctgtgggtggcggagtcccgccggggcaccggcctgggggcctgcctcctggcccagctggagcaggacgccgcccgccagggtgcgaagcgcctggagctgaacacctttggatttcaggcccccggcttctatgaaaagctgggctaccgccgcttcggcgcagtggagcccgccgtgggggagtacggccactacttttacgtgaaagagctctaacaggacgcagataagccggatgggcgcggtcaaacgaccgcgcccatccggcttatgatgtagaaatggaggaaggaagtagaaatcagaatcagaagtcgacctcagtgccgtagtagatgcaggtaaacagcttggccatggtggcgggatcgatggggcgggggttggagccggtgcaggcgtcgcccaccgcgttggcggcgatggcatccagcttctccttgaactcgtcttcaataatgccgaagtccttcagggtgttggggatgcccatagcgtcgttcatggagcggatcttggcgcgcaggccctccaccagctcggcggtggtgtccccgacgacgcccatggtgcgggcaatgtcggcgtaccgctcggccacgccatcggccttggcgttgtaggcgatgacgtagggcaggtacatggcgttggccaggccgtgggtgatgtggccggtggagaaggccgcgccggtcttgtgggccatggagtggacgatgcccagcagggcgttggagaaggccatgccggccaggcactggccgtagtgcatctcctcgcggcagcccatgtcgccgttaaaggagcggagcagatccttctccacgatgtggatggccttgagggccaggggatcggtgaacacggtgtggagggtggacacataggcttcgatggcgtgggtcagggcgtccatgccggtgtgggccactagcttggggggcatggtctcggccagggccgggtcgatgatggccacgtcgggggtgatattgaagtcggccagggggtacttgatgcccttctggtagtcggtgatgacggagaaggcggtgacctcggtggcggtgccggaggtggaggggatggcgcagaacctggccttctggcgcagctccgggaagctgaagggggtgatcagatcctcaaaggtggtctccgggtactcgtagaaggcccacatggccttggccgcgtcgatgggagagccaccgcccatggagatgatccagtcgggttcaaactcccgcatgaccgccgcgccgctcatcacggtttccacagagggatcgggctctacgttctcgatcaggcgggtctcaatgccggcctccttcagatagcccagggccttgtccacaaagccgaacttcttcatggagccgccgcccagcaccagcaccgcacgggtgcccttcagattcttcaggttctccagggcgttggcgccgtagtaaatatctctgggaagggtaaaacgggacataacaggtacctccggttgaatgtgatttgacatcgttaaaactttaacgattcttcggaacctattatggcacattgttaattccctgtcaatcggttttgcagaaactgtacgttccaaacttcgcgtttcagatcaccagcgtcccattctcgtcctcctggagcagcagaatgcgctcctggcggccatcggcggcatccacgtagaccagcacgtggccgccggaggcgttctggcacttgaattcgtggcacagcacctcgtactcgccgccggtggggatcagggcgagctggtgggccagaacggtgagggagccgtccacctgggcggccgcctccgcctcggagacggccggggcggggagggtacggtccccgtggttcatgaggtagccctccgactcaaagctcaccacatccccggtgtccagcgccacacccaccttgaccagatcggggtagcagtacacgccgtcctggcgggaggcaaagtggacggtgagtatgccgtcctgccggatggagtagctggggtccatatcctggtagccccgctcggacagaaactccgcagccttctgccgcccctcctgggcggagagggacgcctcgcccaccggccgggaggagagtacctggagcacctggccgccctgccgggtgacctctacatagagctcgccgccattcaccagggcggagaagccccaagtggggagctgtccctcgccctgggcgctgagggtgaagatgtcctcccgcagccccagaaaggccgccgcggccctgcgggcctccgcctcggagacctggggcagcccctccagcatcttgggcgtgcggcccgacaggtggtcggaaaaggggccgtcgtagatcagggcgggcacctcggggaagtcggcctccaccgtctggaaggccgagccggcggggagttcacccgactccgtggcgttggacagccgtgcctgaacggtctccacgtcctccggccggatggtgcccgcgtccagctccgccagcaggctctggagggcgccggacagggtggaggcggcccccgccaggccgcgcagggtctcccggtgcgcctcagtgcacgccgtctcgccgtaggcgtcccgggccagggccatggcgtagtcaccggttttggccaggaaggcggcggtctgctccagctctacgttgccgtagggcagctcgcccagagccgactgagcggccagcgccttgctgtaggcctgggcgcacagtgcggagaacagctcgggactggtggcgtaggtcacctttcggagggcgacatccagctcgcccgccgccgtggccagctcggtgaaggcgtgctgataggtgttgtccagcatgcgccggtactgtgccgcccgggcgtggccctgtactgcaaacccggcggtcaccgcgaaggcccccgccagaaagctggcggccagcacctgttttctccgtttctccatgacaaaacgcccccttttacggctaggttgcgtaaaagggggcgttttatgtgcggtaaatataagctaaagaagggggcgaagccgcgcaaaaaggttgagcagatcatcggaggccttcacgcccagaagaggaatttccaagccggccgcccgaatccgatcttccagtgcgccgaggaaaaggccgcggccgggcatctcttgattgcggtcggacgtggtctccaccccgcagttgggggagcggtttgcgcccagaaacgcaatgatgcgaaacccgtatctgtggtactccagcacctgatgcatgacagattcaactaggtcctccagcatccggctgggggcgggcgcctgcatggcggcacgaatacgggtgttctcctccgtgaccggggactgcgcgcccagcctgtttccacggtccagcccaaggcagcagagctccgggcagggaagctgaacgattcccacctgatgttccagaaagaactgcaccagctcccggaaagcagccggatatacggcggtcccgtcggagatggcgttttggttcagcaggcagtgggccagaaacaccacttttctactgcggccgtcggcaaacatctgcatgattctcaccattcacggctgggctcagccgcccagcttgtccagcccaagacggaggcggcgcaggcactcgtccttccccagaatgtggcagatctccaccgcgccgccgggggtgaccgccttgcccgccgcggcaatgcgcaccggccacatgagggtggcgtttttgacctccagagactcggccaggccgatcagagcgtcatgaatcccgtccacggtccagtcggccagcccatccagggcgggaaggacggcctccagcatccgccgggacacctccggattggtcttggacttcttgttggtgaacagctccgcgtcgtagccgggcagggcgtcaaaaaagtccagcttctctgggatgtcggtgaggcgctcgcaccgggcctggagcagcccggcgatctcctccgtggaaagggcgggattctgcaccgcctggcggatgtagggcagggcggccgcatggaaggcctcggggctcatctcccgcaggtagtgggcgttgaagtaggtcagcttttcgatgtcgaagatggcgggggacttggagatgccgccgatgtcgaaaatctccgccagctcggccagggtaaagaactcccgctcggcatactcgcctctgggagaccagcccagcagggtgacatagttgaccaccgcctcggacagatagcccatagcgatgagatcctcgtaggaggggtcgcccttgcgcttgctcatcttgttgtgggcgtcccgcatgacgggggagcagtggatataggtgggcacgtcccagccgaagccctggtacagcaggttgtacttgggggcggaggacaggtactccgaaccccgcaccacgtgggtgatgcccatcaggtggtcgtcgatgacgttggcaaagttgtaggtgggcaggccgtcccgcttgatgagcacctggtcgtccagggtggagttctctacggtaatgtccccgaatacggcgtcggagaagacggtggagcccccggcggggatcttctggcggatgacgtagggggcgccggcggccaccttggccctggcctcctccaggctcatgtcccggcaggggtcggccgcccggtcaaagttgccggagtcctcctcagactcggtcttttcgcagaagcagtaataagcgtggcccttctccaccagcagctcggcgtacttgccgtacagcgcccggcgctcggtctggatgtaggggcccaccgggccgccgatgtcggggccctcgtcccaggtcaggccgcacttgcgcagggtggcgtagatgacctcggtggcgccctccaccagacggccctggtcggtatcctcaatgcggaggatgaacttgccgccgctgtggcgggcgatgagccaggtgtagagggcggtgcggaggttgcccacgtgcatgtagcccgtgggggagggggcgaagcgggtgcggacgccgtccttggggatgcgggcttccatctcctcaaaccagttcagatccattgaaaagactccttttttaaacttcatcacattattctatatttttcgcctaaggattgtcaaggccatttggatatgatatgataaaccaatatggggcattgtacccaatgagccaaaaatcactcgtaagaggtgtgttttagaatggaaaaccagaaaaaagtcatgctctccggcatccagcccagcggcgagctccacctgggcaactacctgggggccatcaagaactggggcgcccgggcggacgagttcgactgcttctactttatggccgatatgcataccatcaccgtgcgccagaccccggcggagctccgtcgccgcactctggagcaggtggcccagtacatcgcctgcggtctggacccggagcgcaacacaatttttgtccagtcccacgtgcaccagcacgcggagctggcctgggtgctggagtgctacaccatgttcggcgagctgtcccgcatgacccagttcaaggacaaatccgccaagcacgccgacaacatcaacgccggcctgtttacctacccctgcctgatggcggcggacatcctgctctaccagccggactttgtgccggtgggggaggatcagaagcagcacgtggagctgacccgcaacgtggcccagcgcttcaaccacgtgtacggcgacgtgctcaaggtgcccgagccctacatccccaagatgggcgcgcgggtgatgagcctgaaccagccggacaccaagatgagcaaatccatccccgagggctgcgtgttcctgatggataagccggaggacatcctgcgcaagttcaagcgggccatcaccgacagcgacactgagcgctgcgtccgattcgaccgggagaacaagccgggcgtgtccaacctgatgagcatttattccgccgtcaccggcaggagcttcgaggccattgaggcggagttcgacggcaagggctacggcgcgttcaagcccgtggtgggcgaggccgtggtggagatgctccggcccatccaggaggagacccgccgcctgctctccgacaaggcctatctggagggggtctaccgcgccggcgcggagaaggcgtcctacgtggcggaaaagactcttcgcaaggtctacaaaaaggtgggcttcctggcccggtaataagataaggagcaaattcccatgccaagaaatctggatcttcccctcatcggcatcgtggccgccgccctggtggtggccctggtggtggccctggtggccactccggtggtgaaaaacctggccattcgggtcaaggcggtggatgtacccaaggacggccgccgcatgcacgaccaccccatcccccgcatgggcggactggccatcttcctgggcttcctgctcagcgtcctgctctttctggacttgaacgcccaaatgcgggggatgctgctgggggcggtcatcatcgtcgtgctgggcatctttgacgatatctactcgctgcgggccatgttcaagtttgtggtgcagatcatcgccgccctggtggcggtgctctcgggcaacgtgatcgagacgctgtccaaccccaacgtgttttccgcggatccctactggaatctggggattctggcggtgcccgccacggtcatctggatcgtggccatcaccaacgccgtcaacctgattgatggcctggacggcctggcctgcggcgtatccaccatcagctccatgaccctgctggtgatcgccctggtggtcagcgagggcaacgtggccattctcatggccgccctggcgggcgggtgtatcggctttctgccctacaacatgaatcccgccaagatcttcatgggggacacgggctccaccttcctgggctatattctggcggtggtgtccattcagggcctgttcaagttctataccattatctcctttgcggttcccttcctcatgctgggcctgcccatcttcgacacctgcttcgccttcatccgccgcattgcccacggacagagccccatgcacgccgaccgcagccacgtgcaccaccggcttatcgacatgggcttcaaccagaagcaggcggtggcggtgctgtatgtcatcagcgccatcctgggcctgtccgccgttgtgctcaccaccagcgggccggtgaaggccatgctgctcctgctggccctgtgctttgccggggcgatctccgcccggattttcctgggcgccaacggaaagaaaaacgacggtgagaagccggacgagaagggggaagagaaatgaggcaggtgcgcgtcatgaccatcttcggcacccggccggaggccatcaagatggctcccctggtggcggagctccagcgccgtccgggcctggagccggtctgctgtgtgacggcccagcaccgggagatgctcgattccgtgctggagatcttccggctccggcccgattacgatctgaacatcatggagccccgccagaccctctccaccatcacctccaagtgcctgctgggcatggagggggtgctggagcaggccagacccgacctggtgctggtccacggggacacctccacaaccttcgccggggcgctggccgccttttaccaccagatcagggtgggccatgtggaggcgggactccgcacgggtgacaagtattctccctttccggaggagatgaaccgcaagctggtgggcgacatcgccgacctgcacttctgccccacacgggccaaccgcgcaaacctggagcgggaggggatcaccgacggggtgtttgtcacgggcaataccgtgatcgacgccctcaagaccacggttgtgaaggattatcacttcacaacggatctcctcaaccatttggactacaccggccgaaagatcatcctcgtgacctgccaccggcgggagaactacggccagcccatggctaacatcatggcggctctgcgccgggtggcggacgccttcccggaggtggagctggtctacccggttcacctatccccggtggtgcgggaggcggcggggaagtacctcggcggccacgaccgtatccacctcattgatccgctctccgccgacgagatgcacaacctgatggcccgggcctatctggtcatgaccgactcgggtggactgcaggaggaggcccccgccctggggcggccggtgcttgtcctgcggcgggagaccgagcggcccgaggcggtggaggcgggaaccgtgaagatcgcggggacggaggagaacgtcatcttctccatggcctccgagctgctcaccgctccggcggcctacaccgccatggcccacgcggtcaacccctacggcgacggtcacgcctgccgccggatcgccgacgccattgagtggaaattcggcctgcgggccgaacagccggaggaattccgggcataacgcggtccgggcggagaggagggaacaggcgtggagcgcagaaagcggaatctgctggtggtactcatcggcatcgtcatcgtggtggccatggtgtccagctttggactgggcctctttgcgccggacacggcgaagatcgtgctgcccacgccggaggtctcccagcagccggggggagagcccggtgtgcagagcggtctggtgctggtggacgtgacgacggagacggtgcagagcgtcatccgggataccctctcccgcccggaccgctacactcgcgcggtcacgatcgaggacttctggggtgagggagagagcggaaccacccatgcggacgtgtgggtggacggcggctggacccagacggaggcagccctgccaggcgggacggtacgttactccatcgtgggcgacgggcagttctggctgtggtatggaggcgaccgcacggccctttccggtccggcggacgggcactcggcggatctggagggccagcgcatccccacctatgaggacgtactggagctggagcaggatgccattgccgccgccggatatgaggagaagggcggcctggcctgcatttatgtggagacaggcgaggacgcgctgggctatgtggagaagtactgggtctccgtggacagcggcctgttggtgtgcgccgagcagtggaaaggggaggagctgacctaccggatgacctcctatgcggtgtcgacggaccgtaccctcttcggactcacggagtttgcgttgccggacggcacagtgctgcatacggtagaggaataacgggcggccggcagggggccggccgcccgttattccagccccagcagcaggagcagccccagggtgatgaccagttccatgtcgtccccctccagaaagaggaacaggaggatgagcaggagcaggacatcgccggtgtcgaggccgtccagcttgaggccccgaagcagcttgcccagtcctgaggcgggcttggcggattccggcgcctcggcgtccggctccggcgggggcgcgtcgggagggacggtctgggtgggaggggcatcctcctccacgacccgggtgtaggaggcgccattgggtatgtagcggttatacatcgtccttcccctcctctcggcggctctggaagagctggaaggccacccggatgacccgggccagcttggcgatctgaacggccttgtcaacctttgcataccgctccggcttgacaaaaggcttgagagcattgagcagggccaccttgcggtcgtcagtggcggagtactcggaaaagaggcgcagaccggcctggagaagctggggatccagctcggacagggcggaaagcgggttgctgtctccgccgccgcccagcatgcccagcagggcggaccagtcggtggcgccggactgcccggccgcctctcccgcgggcccggcctccgccggttctgcggcggggggtggagcagattctcccgcgtgctccccagtcagcgcctgcgcgagggaagcgatctggcccatggcctggggatcgctgaggatcgcgttgagtttctcctcgaattcggccatgtctcccgccccctcccgccgaaatgcctacttcttctccttgggcaccgcctggctgatgttttgtaccagccgggccccctcgctgctctgcatgacctgccgcaccatgcccagcagggcgccggtgtcccccttggcggcggcggtcttgaggccgtcccccgcgttctgactgagcagctccatcaggcgctgggtgtccggggactgcatcaggctctggagcagggccttgttcttcagcaggccggcggccttgggatccttcatgagttcgtccagattggactggggatttgccataccatcagctccatctcaattatttataagaccgatcactccattctatgagtgacttttcagaaggtgataccttgaagctggtacttttttccgactcccacggcaacgtggccaacatggccgacgtggtgcgcctggagcacccggaccgcgtcctccatatgggggatctggcccgggatgcggaggagctggcccgtcagtttcccgatattcccgtgacctatgtgccgggcaactgtgacggccgccggccggatctgccggacgagcggtgctttaccctggaggggtgtaaaatcctgatgacccacggccacacctaccacgtgaagatggggcccggggcggccatccgcgcggcccgagaggcgggggcgggacttctgtgcttcggccacacgcacgaggccctctgcgagttccagaacggcctgtggatcgtcaaccccggcgccgccgggagcctggttcagcccacctacgccgtggctgtcctggaggagggcggcgcggtgtgctatctgtcgcatatctgagaagggagaggagcagtatgctgctggtcattgatgtaggcaataccaatatggagttcggcgtctaccggggagaggagctggtggggagcttccgtctgatgacggacgccaaccgaacctccgacgagttggggctctggctgtgccagtacttccagcgcttcggcctggagctggggcaggtggaggatgtggtgatcggctcggtggccccccaggtgatgcataccctgagccgggcggtgcagaagtatgtgggcaagaccccgctggtgctggacgaggtgctggaccccggcctgccctacgtggagtgcgacagcgacgagcgcctgggccccgaccgggcggcggcggacatcgcggccatcgccaaatacggcgcgccgctggtggtgctggacttcggaacggccaccaccctggacgcggtgagccgggagggggtgtacctgggcggctgcatcaccgccggggtgcaggtgtccatcgacggcctgttccagaagaccgccctgctgccccgggtggagctggtgaagccggacacagtgctgagcaccaccgccgtggggcagatccaggcgggggcggtgctgggctatatcggggccatcgagtacctcatccgccacgccaaggaggagatcggccagccggacaccaaggtggtggccacgggcggcctgtcccggctggtggcggacaacacggagctgatcgacgtggtggatccccaactggtgctggacggcctgcgcatcatctatgagcgggcgaggagataaaacggatggggaggagaggcaatgagtgagatcaagcggaacgggcacggagccatggacatgactcaggggtcgccgacccggctgatcgtcttgttctccctgcccctgctggcgggaaatgtgctccagcagctctacaacatggtggattcggtggtggtgggcaactatgtgggctcctccgccctcaccgccgtgggcgcgggcttctctatcatgttcctgatatcctccctcttcctcggattctccatgggcgcgaccatcatgatcgcccagtatgtgggcgccggggaccaaggggcggtggggcgcacggtggacaccatctacagcgccctgctggtgatcattgtgcccctgaccctgctgggcgtgctggccagcgggccgctgctcaccctgatccgggtgccgcaggaggcctatgagcaggcgcggacctactgcatggtggtgctgggcggcatcatcggtactctgggctacaacatgaacagcggcatcatgcgcggcctgggggatagccggacgcccctgatcttcctgttcatcgcctgtgtcatcaatattgtactggatctggtgtttgtgctggtgttctcctggggcgtgttcggcgtggccctggccaccattctggcccagatctgctcctgggtgttcggcatcttctacatcaaccgaaagtaccccttcctccatatccgcctgttccggatgcggctggaccggcgcctgctggggcaggtgatccgtctgggcataccctccgcgatacaggagtgccagttcgcggtgggcatactcatcatgcaggcgctgatcaacggcttcggcaacgattttgcggccggcttcaccgccgccaacaagatcgacaccttcgccttcatgcccatcgagtccttttccatcgccgccaccacctatgtgggacagaacatgggggcggggaggctggaccgggtacagaccgggacccgccgggccctggtgctgggcactctggtatgcctggccatgtcggcggtggtgctgcccctgcggcggcccctgctgatgctcttcaaccgggagcccggcgtggtggccgccggggaggcatacctgctccgggccctctccctgatgttcattctggccatgatgtttatcatgaacggcgtcctccgcggcgcaggcgccacgacagtgcccatggtagcctccatcatctccctctgggcggcccgcatccctgtggcctatgcgctggcctatttcttcggcccggaggagatctattgggcctatcccatcggctgggccctgggcctgctgatctgcgtggtgtcctattgccgtggaaggtggaaggacaagtgcattgtgagctaggcgccgcaggaatagcacagaggccccgccggtctgtccggcggggcctctcctgctggagtcaggactttgtgtagaaatcgcaccaggggcgcagggtacagttggggcagtcgggcttgcgggccatacacaccgcccggccgtggagcaccatccggtggcagaagtcgttggactcctccggcggcagggtgggccggagctgctcctccaccttggccgggtccttggtgccgtcggtgaggcccagtcggccggtaatgcgtatgcagtgggtgtccgccaccactacgccgggggtgtggtacacgtcgcccaaaatcaggttggcggtcttgcggcccacaccgggcagcttgagcagctcctccatggtgtcgggcacccggccgccgtactgctccaccagcatgcgggaggcggctacaatgtcccgggccttggcccggaagaagccggtggaatggatataggtttccacctcggcggggtcggcctgggccagagactccagggtgggaaagcgggcaaagagggcgggagtgaccatgttgacccgctcatcggtacattgggcggccagacgcacggaaaagagcagctcgtagggcttggggtactggagcgaacagagcccttcggggtatagcttcttcagctcctctacgatagccaggacgtcctcatggtttttcatcgaatcacctcttagacaatatagcatagaatccgccaaaaaacgagagccttttttcaaatagggcgattgtaatttaaagtgggattctgtataataaacggtacagtcaaatttgagaaaggtggagtcggatttggtcaaggatatcatggagtttcttgccggacaagaccccgaggtaggggcggcggttcaggcggagtacgaccgccagcggcgcaacatcgagctgatcgcgtcggagaacttcgtcagcccggcggtgctggccgcggcggccacggtgctcaccaacaagtacgcggagggctatcccggcaaacgctattacggcggctgccagtgcgtggacgtggtggaggatatcgcacgcaaacgggcctgccagctctttggggccgaccacgccaatgtgcagccccactgcggcgccaacgccaactatgcggtgtacgccgccctgtgtgagcacggcgacacggtgctcggcatggatctggccaacggaggccacctgacccacggctcaccggtcaacttctcgggaaaaaactataatatcgtggcttatggcgtcaacgaccagggctacatcgactacgaccaggtgcgcgatctggccaaaaagcacaggccccgcatgctcctggccggcgcctccgcctatccccgcaccatcgacttcaagacctttgccgatatcgcccacgaggtgggggcctatctgtttgtggatatggcccatatcgccggcctggtggctgtggggctccacccctccccggtgccctatgccgacgtagtgaccacaactacccacaagaccctccgcggcccccggggcggcatgatcctctgcaaggaggcgctggccaagaaaatcgactccgccattttcccgggcagccagggcggccccttggagcacatcatcgccgccaaggccgtggccctgggggaggcgatgaagccggagttcaaagcctaccaggagcagattctcaaaaacgccgccgccctggcgaaggccctcatggccgagggcttcgatctggtcagcggcggcaccgacaaccacctgatgctggtggatctccgccctgcccgcctcaccggcaaggagatggagaggcggctggacgaggtgaacatcaccgtcaacaagaacgccatccccaatgatccggagaagcccttcgtcaccagtggcatccgggtgggtacgcccgccgccaccacccgcggcttcaaggaagcggacatggaggtcatcgcttccatcatgtggcgtaccgccaccgattttgagggcaagcaggacgagctgcgggaccaggtggcccagcttaccggcaaatatcccctgtacgaataagcgaaacggagtacgcccgtccagaaacggcggcctgtcggaaaatggcttcggcaggccgcccttttctcttgacaaattccttgggtgtggtatatttgtaatataaagagcgaaatataccacataaaaggagtgcatctggatgggtatcaaacgatggtacgggctgatcggcctgctgtccctgttggggtttgtaggggtgttcaccggggagagatatttcctgggcttttttgccttcgcggtggacttccagtatttttttacccgggctgatgagatgcaggagggacagattctccgctcggccgcacggggctttttcgcgggcatgggagtgacggcggcggggacgctgctgctcctggcccttggcggagggacgacggaggcgctgtacctcagcagcgggctgggctggggagtgggagtgatggtatatgccctctccagcttcctgtgcggctgccgggaatggtggaacgcgcgggcatgattaccaatcgcatcaaggagtaccgggcccgcttcgacctgaagcaggaggagctggccaggcgggtgggagtacgccgggagaccatcggcaacctggagaaggggcgctataatccctcgctggtgctggcctggaacattgccaaggtattcggcgtaccgattgaggagatctttaccgtggagggggatgaatagtatccgccgctctttacgggggctcgaacatgtgttagaataggggcgaccaaacgaggagggatgcccaatgtcataccggcccctggccgacgagatccgcccccagagcctggacgaggtggtgggccagcgccatattttgggggagaacggcctgctgcgccgcatcattgaggggggacacatccccaatctggtcttttatggcccctccggtaccggcaaaaccacggtggccaacatcatcgccaggcgcaccaaccggcccctccaccggctcaacgccaccacggcctccatctcggacatcaaggacatcatcaaggacatcggcaccatgctggcccccgatggggtgctgctctatctggacgagattcagtacttcaacaagaagcagcagcagtctttgctggagtttatggagaacggcaagatcaccctgatcgcctccaccacggagaacccctatttttacgtgtataatgcggtgctcagccggtctaccgtgtttgaattcaagcccatcgaggccgtcgacgtgctgcccgccatcgaccggggcatccggctcatgggggagcgcctaggtgcggaggtggactgcgaggatggcgtgcgggagcacattgccaccgcctgcgggggcgatgtgcgcaagtccatgaacgcggtggagctgctgctcagctccgcccggcgggagggggagcggctggtggtcaccctggccgatgcccagacggtggcgcagcgctccgccatgcggtacgaccgggagggagacgatcactacgacatcgcctctgccctcatgaagtccatgcggggctccgaccccgacgcggccctccactatctggcccgcctgctggaggcgggggacatgaccaccgccatccggcggattctctgctccgccagcgaggacgtgggcatggcctacccccaggcggccctgatcgtcaaggcctgcgtggacaacgctctccagctcgggctgccggaggcccgcctccctctggcccaggcggtggtactgctggccaccgcccccaagtccaactcggtctacgaggccatcgccgccgctcaggccgatgtgcgggcgggcaagaccggcgactacccccgccacctccagaacgtccacgccgactcggcggggatggagcgggagcagggctacctctacccccacgactttccgcgccactgggtgcgccagcagtatctgcccgacctgctggcggataggtgttactaccactacggcgacaacaagaatgagcaggccgccaggcggtactgggacgagatcaaaggccccgaggcataaaacaggagcgcggcatagccgcgctcctgtttttcaggcgaatatggtctccgcgcccaccttgacacagccctcgggggcgtatttccacttttcaatttgtccctgggtgagaaaatactccagcggcgcggggacgttcagcgggggcagggtgtcgatggccagcagcttgatcttcatccgctcaggcaggatagccttgatgtagacggacacacggtccccctcccgcaggccgtttttccgctccgccaggccggacagattcggggtgagctccacaaaggccccatactccttgagcccgcggacgataccgggcaccgtcatgcccgcctgaaagcgggcggcgttctccgcccaggtgcccagcagctcccggtgggtcaggtacacccgccccagcttggggtccagctcctgtaccacggcgaagatggcctgccccacccggaaccgctggtcggggtgggggatgcgggagacggagatgttttcaatcccgatcagggagggaacgccgcagccgatgtccacaaaggccccgaaggactccaggtgggtgaccacagccgggaggatacagccgggatgcagcccggcaagcatggcgtccagggcggcctgctgggcccggcggcgggagaggcggggccggaggacgccctcagattcctccagagctgtgatctgaaaacagaccggcttgcccacccgggagagaatggcgatctcccgggtggtgccctctgcaatgcccagcgcggcctcctcccgggggagaaagccggtaaacggccctacggacaccagcaggttgtgggccccgtcgcagagctgggcaaccccctccagcaccgtctcctcctccatggcccggcggaggccgtcgcgggaggcgcaggcggcctcgttttccggtgtatgtaacagacgcccctcgggcaggaagcggctcctcaatgtgaccaaatcctttcgtttccacagtcatttttttccgatagactactatatgcacttgccggtcctgaattgacagggtataataggcgttacgaaggaaacgggagggacgcggatatggacatccatgtgggcgatgtgctggaattgaagaaggagcacccctgcggcagccggcggtggctggtgctgcgggtgggaatggacttcaagctgcgctgcgagggctgcggccacgagctgatgctcccccggagcaaggcagagaagagcatcaagcgggtgctgcggacggaggagccccaggcatgaggtacgaggggacggtttaccgcccgccgggagagtggaagagctatctgctccaggtgacggtggggtgctcccacaacgcctgcaccttctgcggcatgtataaggacaaacgctaccgggtgcgcccgctggaggagatttttgaggatattgccctggccagggcggcctatggagacgtgaagcgggtgttcctctgcgacggggacgcggtggccatggacacagaggagctgctggccgtcctggaccggctgtacgagaccttcccctccctcgagcgggtcaacgcctatgccggcccgggcagcaccctgcgcaagacggaggaagagctggcggccctccgtcgggcggggctggtgcgcctctacctgggggtggagagcggcagcgacgcggtgctgcgggcggtgcgcaagggggtggacgccgcgggcatgctggaggccgggcggcgcatagtagcggcgggcttcgatctgtggaccatggtgcttatcgggctggccgggcagggcgaggcctcccgggcccacgccctggacacggcggccctgatcaacgccatgagaccccgtcacctctccgccctgacttacctccccgagcgggggacggcgctgggtgacgcggccgcgcggggggagttccggctgctgactgcttggcaggccctggaggaaacccggctgctgctggagcgcctggaggtggatcccctccatttcaccagcgaccacgcctccaactatctgcctttaaagggaggactgcccggggacaaggcccggctgctggccctgttggatggggcgctctctggcgagcagggcattaagccggagctgtggcgggggctgtgacacaaagagaggggtattgagatggacggacaacacctgcatattctgtggaccaacgccgatccggtggtctttgacaagatggtgctgatgtacgcggtgaacagcctggtgcggggctggtgggaaaaagtgacggtgatcctctggggggagacctcccgcctggcggccacagatcccgcggtgagggagcgcattgtcctggccatggagcagggggtgaaattctcggcctgtattacctgcgccaaggagcttggggtggagcaggcgctgcgggacatgggcctggaggtcatctcctggggcccgccgctgaccgagctgctcaagacccgggcgcccctgctgaccgtgtgacggaaacgaaaaagaagctgacgcgcatagcgcgtcagccagacggtcaataagccctcctgcgaaaggattcggagggagggatagtgtgaaagggaaccgtcagagttccctttcgcgttggatcaaacaactttttgaagcttttctaaagcttcaaaaagttcgacaggctggctgacgcgcgcagcgcgtcagcttctttttttgcccgtcccggatttgaccttttttgtggacgtggccctctataatgggaaacgacaggccagaggacagggggggacgcggggtgacggtgatctatctggatgagctgttcctgctcaactttgtggtggactatctcctgctgctggccgccggacgcctgtccggcgagatactccgccggggctggctggctctgggggcggccatcggggcggcctacgccgccgccgccgtcctgccgggcatgggctttctcctccatcccctctgcaagctgggggcggcggtgctggccctgctggcgggctacggcaaaagccgccgcctcctgcgggtgagtctggtattctttgccgtgtccgcggccttcggcggcggcgtgttcgccctccagctcctgggcgggcgggggctcactctgcaaaacggcatcttttattccgccatggatctgcgccttatcctcctgtcggcggcggggtgctatgtgctcatcaccctgctgttccaacgcaccgcccggcacagcggcctgcgccgggagctggtgcctgcggtgctcaccctggaggggcggcgggtggcccttaccgccctggtggatacgggcaacaccctcacagaccctgccaccggccgtccggtgatggtggcggagggggagaaggtgggggctctctttcccgacgggcaggcgccggctcccgaggagctgcgccgcccggtggaggccctggagcggctgggccgccagggctggcaggggcggtgccgcctgctgccctaccaggcggtgggggtggagtgcggcatgctgctggccctgcgcctggacggggcgcgggtggggacggaggactacggcaagctgctgctggccctgtcccccacccgcctcaccgacgggggcggctatcacgcgctgattggtacataaacagacgatgtgggaggatggctatgaacggttggagactgcgcctgtttgtgggcgtggagcggctgctggcccggctggggctcaaactgccggggaagatcatgtatatcggggggagcgacaccctgccgccgcccctgtccagggacgaggaggcggagctgatcgcccgtctggacggtggggacgagggagtgaagtcccagctcattgagcgcaacctgcggctggtggtctacattgcccgccgctttgaaaataccggcgtgggcattgaggatctgatttccatcggcaccatcggcctcatcaaggccatcaatacctatcagcccgcaaaaaacatcaagctggccacctacgcctcccggtgcatcgagaacgagatactgatgcatctgcgcaagacggccaacctgaagagcgaggtctccttcgacgagcccctgaataccgactgggacggcaacgagctgctcctctccgacatcctgggaacagagagcgatctggtgatgaagcccatcgaggcggacgtggaccgccagctcctctccgacgcgctggagaagctggaggaccgggagcgggagatcatcaccctgcgcttcggcctggacggccgcccggagcgcacccagaaggaggtggccgaccggctgggcatctcccagtcctacatctcccgcctggaaaagcgcatcatcagccggctcaagcgggagattctgcgtatgctttgagggcgcgcgccggctcactccgccttcggccgcccggctcgccgggcggccggcttcgtcagatcgtagctcagttccagcaggcggatgatctcctcctccgggagcgagccgtccaggaggagggtgacccagttggacttgttcatgtggtaggcgggcaggatgcctgggatgccgagaagggagccggccaggagcgggccgcattttacatcgagaatgtcgacggactccggtcgttccagccccagcctggttccgggaacctccagaaagaccgcaaaccacttggcgttttcactgtggcgcaggacggcatagcgggggaatttagcccagaggtgctccggttccgcgcccagatgtacctgggcatattgtaggatacgctctttcagtgtggacggttggttcatggcgctccctccttacagatccttggccttcattttctccagctcggccttttctgccgccgtggccttgttccgcccgatcagccaggcggcggccagtcccgcggcacatggaatacctgaaagcaggccggaggcatcccggagcgcgatggacaggccggccagcagcaggaggatcccgccgggcagcagagcccccagcaggggctttctccgggtacccagatagtattccagcgccaaaagggccagggaaatgaaaagaactgcaaactctctcatatcggtttcccctccttctcgtatttgtcgatgatcagtttggcggtctccacatcaatgcgggagtccaccgccagccccttgataaaggcggtgaagggctcctcctcatgttggtcggccagctcgatcttctggatgagcttgtccagccgcagacggaccgtggggtaagagacctggtagagccgggcgatctccttcagagagccggacttgagcgcgaaatttttgagaaaggcggcgtcctccggttcgagagcgagcatccactgggggattttattaagctccaatttaattctccttttatttttggtttaattatattgaatataacataaataaaatgaaagtcaagtataaaaaagaggtgcggctttttagccgcacctctttttgagcttacaggcccagggtgtccgccaagtcgtccttcatgtggtccatcttgcggacggcacgccgggccatccggcgcacgtcggggctctgcatgctcttggcggtcaccgccataccgatggcggcgcccgccagcacgccaaggcccatcccttccagaaacgcatgcttcgtcatattgcttcgctcccttctgcatcagcgtccgctgttattattgccggaaacgcagaaaaatccgttgctaaaaactgtgtttcaaggtataatgtatgcggtatgatacggttcaatttgtggaggggacgggggtggacctgtacccttttttgctgtgctctgcatggcggtttggaacggtttcaatgtgaaaggagtgatttcgtgaagctgctgatacggcagggacggctggttgacccggttgggggcatcggcgggattatggatgtgctggttgaggacggaaaggtagcggtcatcgggagcaacatcaacgagcccgacgcccgggtgatcgatgcccggggactgaccgtgtgcgccgggctggtggatatgcatgtacatctgcgggagcccggctttgaatataaagagaccatcgagaccggcgcggcggccgcggcccatgggggctttacctccattgcctgtatgcccaacacccgcccggccaccgacagcccggagcagattgcatttgtaaagcagagggcggcggaggcctgcggcgtccatgtctggcccatcggggcggtgacccggggacagcaggggcaggagctcaccgactttgaggccctgaagggcgcgggggcggtggccctgtccgacgatggggtgccggtccagaatgccaatttaatgcgggacggcctgatcctggcccaccggcaaaacctgacgattctctcccactgtgaggacgccgacatggtgaagaactacgcggtcaacgaggggcgtatctcccgccagcttcggatggccggccggccggccatcgccgaggagctgatggtggcccgggatgccatgctggcggaggagaccggcggggcggtgcacatctgccacatctccaccgccaaatcggtggccctggtgcggcggtacaagcgcaagggcgtacagatcacctgtgagacctgccctcagtatttcagtctcaccgaggacgagattttagcccagggcgccctggcacgggtaaacccgcccctgcgcaccaaggcggacgtggaggccattatcgagggattgaaggacggcaccattgacgccatcgccaccgaccacgccccccactccgctgaggaaaagacccggcccctgaccgacgcccccagcggcatggtgggcctggagaccgcccttgctgtggcgctgacctacctctaccacacgggcgagatggccctgtccgacatcctgcgccggatgaccatcaacccggcctgcatcctgcgcctgcccaccaaggggcggctggccatcggctcggacggcgacgtggtgatcttcgatcccgacgaggcgtggacggtggaccccaaccgcttcgcctccaagggacgcaacaccccctttgcgggaaagaccctgcgggggaaagtgaaatatacgattgtaggcggcgagatcgtctactgggaaggagaatgagcgcgatgtcctttgatgtattgcaggagaagattatccgtatgaaaaaccccacggtggtggggctggaccccaagcccgagtatgtgccggagcacatccgcaaggcgtcctatgagcagttcggcgagaccttcgagggggcggccgacgccattttccagttcaacaagggcctcatcgacgccctgtgtgatattgtacctgccgtaaagccccagtccgcctactatgagcgcctgggctggccgggcatgtccatgctggaaaagaccatccgctacgcccacgagaagggcatgtacgtcatcgccgacatcaagcggggggacatcggctccacggcggaggcctacgccgacgcctggctgggagtcaccaaggtgggggaggccctctgcgggggcttcaacgccgactgcgtcaccctcaacggctacatgggcgcggacagcgtcaaccccttcctaaaggtggcgggggagcgggacaagagcgtgtttatcctggccaagacctccaaccccggctccggtgagctccagaacgtagccgccggggagggagacaccgtctacggccttatggccgacctcattgagaagtggggagccggcactgaagggaagcacggctatacccgggccggcgcggtggccggggctacttatccggaggagctacagaagctccgcgcccggatgccccacaccttcctgctggtgcccggctacggggcccagggcggcaccgccgaggatgtacagtatgccttccaggagaatggccggggtgccgtcgtcaactcctcccggggcatcatctgtgcctggcagaagacgggcaaaaacggcgcggactaccaagaggccgcccgcgccgccgcaatcgccatgcgggacgacatctgccggtttatcgccatccagtaaaccaaggaaacagagggggacacacccatgccaatacaaaagctctgtaccgtcgcagaggcggtgcgcctcaatgaatttgcctggtccctcaccctggaggccgaggggatggagccccaggggccggatcagtttgtccatgtgaagtgcggccacagccgcctgctccgccgccccatctccatctgcgactgggggaagaaccggttgcgcatcgtctttgaggtgcgcggggagggcaccgagtggctcgcccgccggaaagcgggggacaccctggacgtactgggccccctgggctgcggcttccaagtggagcgagaggcccgctgcctcctggtggggggcggcatcggcgtcccccccatgctgggctgcgccaagtggacggcggggcagagcaccgccgtactgggcttccggtcggcagaccgtgccatgctgaccgaggaatttcagaaatgctgtaaagatgttttgctttgcagtgatgatggaagcctaggacagaaaggctttgtggatgctcaggtgcgggctgttcttgaaaaggataaaaactttacagcggttttggcctgcggccccaagcccatgctgaaaaacgtggctgccgtggcggcggaatacggcgtaccctgtcaggtgtccatggaagagcggatggcctgcggcgtgggggcctgcctgggctgcgccatccagatggccgacggcaccatgaagcacgtgtgcaaggacggcccggtgtttgacgcggaggaggtggagtggaatgtctaaggtggatcagtccgtggtgctggccggggtgcggatgaaaaaccccgtggtggtggcctccggcacgttcggtttcggccgggagtacggccggttttatgatttgagcgagctgggcggcatctgctgcaagggtctgaccctctgccgccgggagggcaacccgcccccccgcatcgcggagacccccatgggcatcctcaactccgtgggcctccagaatcccggagtggacgcctttatcgcggaagagctgcccgagctgagaaagcatgatctggcggtaatcgccaacatttcgggcaataccccggaggaatacggcgtcatgtgcgaaaagctctccgccgctggggtggacatgatcgaggtcaacatctcctgccccaacgtgaaagcgggcggcctggcctatggcaccaagccggagctggccgccgaggtgacggcggtggccaaggcccacgccgggagagtgccggtgatggtgaagctctcccccaacgtcaccgacatcactgagatcgcccgggccgtggcggacgcgggggcggatgccctgtccctcatcaacaccctgcgggggatgcgcatcgacgtgcgtacccgccggcctattttgaagatgaacaccggcggcctgtccggacccgccgtgctcccggtggcggtgcgcatggtgtgggaggtggcccaggccgtgaagctgcccatcctgggcatgggcggcgtagccaagggggaggacgcggcccagctcctgttggccggggcctccgccgtggcggtgggcaccgcctgctttgacgatccctatgcccccatcaaggtgcgggacggcctggcgtccctggcggagcgccaggggctgaacaaggtatccgactttaccggggcggtcgtgccgtggtgaatggaggtgcgcgccgatggagcggaacacctgttatctgaacctgtccgtggcggaggcggcccgcaccgtgtccgagctggtggaacgtgcggggctgtccagccggatggtggattgccatgagctgcgccagggcgagaatctctgtggcatggtgctgctttttgaaaagtactttctccgcatgggcagccgcctcaccctgacggcggtgctggacaacctggaggggcgcacccggctctactggacggtcaccggcggggcgggaatgctccggcagagcggagacagcaagacagcggcggaggagtacagcgaggccctgcgggagaagctgttctcctatctggacggctgaaggcgggagggaaaaagatggaggattcgtattctgtctccctgggactgcgggagtgcggggaagccatccatgcggcggtgaccgacagcgtcaccggggagctggttgaccactatgagctcacccacccgggcggcggcacctgtgtggtggcggtctatgagaagcactactaccgggcgggcaaccggctcaccctcaccgtggttctggacgactttaccggccgaacccgcgtccactgtatcagcggcggcgggggcgaggggctgttccgcttcgactggggggcggcggagtccttcgagggagtcgtccacgacgcgttgagccactatcggctctgaggaaaaggatatggcttatacagaagtgttctaccccaagctgcccatggagggctgtgcggaccgcattcaggatgtgatcgtgcgcagcgggttcagcaatggacaggtgtcggagcgctaccggctggagacccccggcggctcggttctggttctggtgttggtcaagtatcttcacagaaccggaagcgagatggtggtgacggcagtgctggacgagctggaggggcggctccgtctccatctcactgctgccagtgcgctgggcggcatgggagatgagtgcggcgaggagaagcatattgtctccaagctggaaaagactctggaggtatgagaacaatggatttcagattcagaggtggagtaaagcgatgacaaccgtctatatggtccgccacgcggaggcggagggaaatctctaccgccgggttcacggctggtacaacagcctgattaccgataacggctaccggcagatcgcggccctgcggggacggtttgcggacatacatatcgacgcggtgtactccagcgacctgttccgtacaatgaccaccgccaaagcggtctacctgtcccacggtctggagctgcacaccgatccgggcctgcgggagatcagcctgggcgcatgggaggacaagccctggggcgagctggagcggtgcgacgccatgaatctgatccgcttcaatcacagctccccggacttccgggtggaggggggcgagaccttcgcccaggtacaggcgcggcttaagggcacggtgctccgcctggcggcggcccacccgggccagacgatcgccctgttctcccacggcaccgccatccgctgcctccaggcggccctgcgggggctgggacccggcgagatggacggtttgggccacagcgacaacaccgccgtcacctgcctggaggtggagggggagcgcacccgcaccgtctttgagaacgataactcccacctgcccgacgagatctccaccctggcccgccagcggtggtggaaggagcgggatggaacaagcggcgatgcaaacctgtggttccggcccctcaacctgaaaaaggaggggacggtgtaccggacggcccggcatgaggcctggcaggatgtgaacggcccggcggtgcccttcgacggggacgcgttccagagggacgccctgcgctgctggaaacgggccccggagcgggcggtgatgtgcgccatgcagcgggacgagacggccggcctgctccagatggatctggaccggggggccgccgagggtgtgggctatatccccttcctgtacatggaccccgcccaccggcgccagggcctgggggtgcagctcctgggccaggcggtatccacctaccggcctctgggcagagaccgcctgcggctgtgctgcgcgccggacaacgggattgcccagcgcttctaccagaagtacggctttgtcaagatgggagaggagccgggtgcccgcggcccgctggatgttctggaaaaatacattggatttgaagccaaggaatcatgaggaacctatgaatcaatttttgcctgtcaccaaagcggatctggcggagcggggctgggaggagtttgacttcctggtcatcaccggcgacgcctatgtcgaccacccctcctttggcccggccattatttcccgggtgctggaggccgagggctaccgggtggcaatcctggcccagccggactggcgcaaggctggctcctttacagcactgggccgcccgcggctgggtgttctgctctccagcggcaacatcgactccatggtggcccactataccgtggccaaaaagcgccgccatgacgacgcctattccccgggcaatcgggccggcctgcggcccgaccgggcggtgatcgtctacgccaacaaggtgcgggaggcctttggggatattccgctggtgatcggcggcctggaggccagtctgcgccgctttgcccactacgactattgggaggacaaggtgcgccgcgccatcctcttcgacagccaggcggatctgctggtctatggcatgggagagcgcgccacccgggaaattgcggctcgtctggcctccggaacgcccatccgggagattacagatgtaaagggaactgcctttattgccaaagatccttctgcgtgtgcctatccaaaggtggagtgcccctcctttgaggcggtatccacggataagcgggcctatgcccaggccaaccagatccagtatgaggagcacgaccccgtccggggaaaggccatcctccagcgccacggcgaccggctgctggtggtcaatccgccggccatgcctctcaccactgccgaactggacttcgtggccgagctgccctacgtccgggaaccccaccccatgtatgacgagatggggggcgtgcctgccatcgaggaggtgcgcttctccgtggcccacaaccggggctgcttcggggcgtgcaacttctgctccctggccttccaccaggggcggatcatcacctcccgcagccatgagagcgtcctgcgggaggtggaggccctgacccgccaccccggcttcaagggctatatccatgacgtgggcggccccaccgccaacttccgccgccccgcctgcaagaagcagatgaaggcgggaatgtgccggggccgggcctgcctggcccccacgccctgtcccaacctggacgccgaccacaccgactatttgatgctcctgcgcaagatccggcaggtgccgggggtgaagaaggtgttcatccgctccggcatccgcttcgactatatgctccaggacaagagcggcgagttctttgccgagctggtgaagtatcatgtctccggccagctcaaggtggccccggagcactgtgtgagcggcgtactggactatatgggcaagccccatatcgaggtctatgagaagttcaagggtaagtacgagcggctgaaccagaagtacggcaaggagcaatacctggtgccctacctcatgtcctctcacccgggctgtaccctggacgacgcggtgcggctggcggagtggatcaaccgcaccggccgccagccggagcaggtgcaggacttctaccccacgccgggaaccctgtccacctgcatgtactacaccggcattgatccccgcaccatgcagccggtgtatgtgccccgtgatccccacgagaaggcgatgcagcgggcgctgatgcagtggaagcgcccggagaagcgcccgctggtgcgggaggccctccaccgcacccaccgggaggatctgatcggctacggcaagggctgtctcctgcggcccaacggccccgccagaccgggggatcagccctccggccggggcaagcccgcgcccgccaagggcaaggcccagcccacccgctcccgccccgccaaaaaggtgggctgggccgtggctaagcccaaaaagaacgcccggccgaagaaaaagaaataagaaacgagcctcagacgcttgtgtctgaggctcgtttcttaaggaagcaccacccgttccagccgggggccgaggcgggagagcagctcgttggtgatggtacccgccgcctgggcggcctcctcggcggtaaggacggcgtccccgtcccggccaatgagagtggcggtatcgccgggggcgacgccttccatatccgtcacgtccaccagaagctgatccatacagataagtcccactatgggggccgttcggccgtggaggagcacccggcccgccccgttggagagggtacggggccagccgtcggcgtagccgatggacagggtggccagcacagtgggccgatgggcggtgtaggccccgtcgtagcccgccgcctctccggcggccagggtgtgaagctgggataccctggcccgcagggagagcaccgggcggagggggaggaccgccgtggtggcgtcgccgggggcgctgaggacgccgtacagggcgatgccggggcgggcgtagccgcaggggaggccggggtagttgagcaggccgtagctgccctggaagtggacggttccgggggcgtgtccggcggagcgcaggccatccaccgctgcccgaaagcgccggagctgctcccgggtacgggcttggctggcctcgtccagccgctccgtgtcggccaggtgggtgaatacgccggtcacccgcagatgggaacagctgtaaggggcggtcaggctctgggtgtcgtcccaggggatgcccagacggtggaggccggtgtccaccttgaggtggacggccagccgccggccgcatgcgtccagcgcccgggcgtgttcggtgctcaccaccgtctgggtcaggcggtaccgggccagcaggggggccagctccggcccggaatagccaagcaccaggatcgtcccccggacgccgccccgccgcaggcggacgccctcggcggcggtggccacggcaaaggcgtccgcgcccgccccggcgcacagccgggcgatctccaagtccccgtgcccgtaggcgttggccttgattaccggcataaggctggcccccgccggcagaagggagcccagggcggccagattgtgccgcagggcggcggcatccagctcgatccaggcccggctccggggggagggggcggggcggatgcgggcgaaggggagggccagaagggcggagagcaggaccacggccagatagtgtacaagacagttgtccaccagcaggccggtgaggcccaccaccccggcgccgccccggatgaggacgatgcaccaggggtggaggacatacaccgccgccgcccagccccggagggcgggagcggacgggagggacaggcgctggagccaccgcaggaggaacccgacgcacagggggagggagaggtagagggcgtcaaagcgggccagggcaaggcgctgcaccagcaggccctccgccgtcagcagcgccagggagaggagcagtccggccccgtaccaagccgcgctccggcgggcaggcctcagggccagccagccccccagcagcagaaagacaggggggaagaacaggccgttgcgtgtgtagtcgaagaggaggaacagggcctcgtacccggcccggaggggcggcagggcggcggtgaggccgaaatagctgtcccccagcagcccggcggcatagagcagaagggcgggaagccacgcccagcggggccccaggatgcgcagaaggccgtacaccaggcaggcccccagcaccagggcggggaagtaccacaggtggtaaaaggtgccgttgaagagcacatctcgcagcagggcgaagccgctctcctccagggtgtggttgtagaggttcagggggaggtagagcaggaccgcggccccgtaaagcagcagcagctttttgacaaaggggatcagggcggcccgcccctcccggagcagacggggcaccaggaaccagccggacaccgagaagaaaaaggggacggcgatgcgggccaaaatgtcggtcaaaaggtagttggcctccccgttcagggagagcagagggccggtatggatggcgatgaccagcagggcggcggggacgcggaagcggtcaaagccgccgagcgactcggttttcatcccgcatccctccacagagtgagcaccacgccgccctcgttggtgtcacagcgctggcaggggacgtcggcgggcagggtgagggtgtccgccgcccagacgggcaggtagtaaagctcaaacagacgccccagcccccggaaacgaagaggttcccctcccagcgggaagtcgtgaagccactccagatattcctccagtaccagatgacgctcctccatcagcttggcgtggggccagcccacgtaccggaagtgccacggctcgtatccgatgccggtaacatcctccttccccttggggtagcggaggacaaagccaaagtcggcggcccggcggcgcagcgccccgcaggggccggagtcggggaaggcggggcagaggaagtccacctccggcctattctcgcccagatcaatggccagcccggtctggtgctcgctgcacccggggcgggccacataggtctcggtgaaggctttgccgtgctcggccagggcgtcctcccagatggcctgctgctcggtttgagggcggtagccgctgaccgggacgatcgcgcccacgcttcccacggcggcgagaagctgatccaacatcactttggctcgctggtggagacgcacctcggtttgaccggagcggacggaggcgaggacctccgcggagggctcctccggcaggggatgggcgcggttgaccagatacagcgtacctttcatgcgtccaccgccagtccgatgagacggtccagcagagggccgaactccaggcctatgctccgcatcatgttggggtagcggctgtgagctgtgaaaccggggatggtgtttacctcgttaaagacaatgcgcccgtccggcgtgagaaacaaatccacccgtgcaaagccggaacactccagcgcccggtagatcaactgggcggtcacctgaatttctgtttccttctcctgggaaattcgggcgggcatgtgtatgctggaggtgatcaggccgtacttctccgtgtagttgaaaaagccgccggagagctcgatctcgtccacatgtcccaccgtcagaacctcattgcccagtacggcgcagcccacctcaaagccgggcacggcctcctcaatgaccaccttgctatcgtgggccagggcggcggtgacggcttcggccaacacgccgggctcctccaccttggtgatgccaaaagaggaacccgcccgtgcgggcttgacaaacaggggataggtcaggctggcagtgcgctccggcagggtgtccagcccttctccggcgcgaaagaggatggaagggggcaccgctacaccggcggcctggaccaagcggtgggccacgtccttgtccatgcatagggcggaggcgagcaccccgcagcccactacggggatacctgccagctccagcaggccctgcaccgtgccgtcctccccgtttttgccatggagtaccggaaaggcggcgtccagatagcgggtggagggcccagcgggggcgatgagcagcaggccgtggacgccgcggtcgggggagatcaccgccgggacggtatggcgggcgtcggtgtgccaagtgtcgtccagcagggcgtccaccggcccctggtagagcagccagcgcccatcccgtgtgatgcccaggaggacgggctcgtacctgtcccggtccagatgtgtgagtaccgcgtgggcggactggagggagatctcatattcggtggaagagccgccgaacaggacggccaatgtgatttttttcatgggggaacacctccgtcagaatgggctctcgcctgttcttttattatagagggagtatatcaggcgtttctgacttccaaccgaccaaaggcttacaatcctctgaaccaaatcttaaaaaaagcagtcaaaaagcggtatggtctcagaccataccgctttttgtcattttgtggctcgctttacaccgttgccgatgtctttggcggcgtcgccaacgccgtcgacgatgtcgcgggctgcatcgcccacaccgcgggttacgtccttggcggcatccccggcatcccgggccgcgtcacgggcggtcgagccgccgtccttcgggtgttcggtaccctccggggcgggcgtggtggtattgggggctgcgggggtgttctccggcatggtgctgggctgggaggtgacaaccggcgagggagtcggagtcacatcaggggctttatcgcgggtacaagcggtcagcggcagagccagagcgagcccgatgccgagcagagtccatgtgcgtttcatgtgtgttcctcctgttccttccaatggatttcgttcagatggattcacccagcacctagtatacgttattccacgctgattacacgcgggaagaagtgtcagagaaaaaagggttgcaatttccagaaagatctgctaatataataataacagtaatagttactgtttataatgtgccgagaaaagaggtggctcatgaacggcaagcgctattcccggcagcgggaattgatctatgaggctttgcggcagacagaacagcaccccacggcggagatgatttatcagtggctgaagccggccaatcccagcctgagcctgggaaccgtttaccggaatctaaaccttttggcagatgaaggtgcaatccgccggatggcatttccggtggagcgctatgacgcaaagacaataccccaccctcatttctgctgtgaccagtgcggggcggtttacgacctgcaccttccctacgatgcggagctggaccggcaggcactgctggccagcgggcacgatgtcacgggccatgaggtggtttttcacggaatttgcacaaagtgcaaacaacttcattgatcttttcttaaaatatgataagatgtgaccatcaaaattagaaaggaaggttgttccaatggaattcaagctgtatcgctgtgcccactgcggcaatgtcattttcaaggtggtcgacaagggtgttcctgtcatgtgctgcggccagaaaatggaggagttcgtccccaacaccaccgatggtgctatggagaagcatgtccctgcggtggaaaagactgcccatggcagcggctattccgtcagcgtgaaggtgggcagtgtggagcaccccatgctccccgagcactacatctccatgatcgcggcggtggatggggacaccgtcaccatgaagttccccaagcccggcgaaaagcctgagctgaagaccttctgccacagtgagaaagtggaggcgtacgagatctgcaacctccacggcttctggaagggcgagggctgagagggcccgtatttcactcaaaatctgatttagaaaggaaggctgagcattatggagctgaagggaagcaagacggaggccaatctgtggaaggcgtttgcgggggagagcatggcccgcaataagtatacttattttgccagcaaggccaagaaagagggcttcgagcagatcgcggccatctttgaggagaccgccggcaatgagaaggagcatgccaagctgtggttcaaggagctgggcggcatcggcgataccgctgccaacctgaaggctgcggcggcgggtgagaacgaagagtggacccagatgtataaggagatggccgaaaccgcccgcgaggagggctttgagaagctggctttcctgtttgacggcgtcggcaagatcgagaaggagcatgaggagcgctacctgacccttttgaagaacctggaggagggtgtggtctttaagcgcggtgacgagtatgtctggaagtgccgcaactgcggccacatccacttcggcaaaaccgctcctgaggtctgccctatctgtgcccatccccaggcctatttcgagatccgcagcatcaattactaagaagagacgtacgacaagcgctgtataaagcgggtccgacctgatggtcgggcccgctttggccgtctaaaaccttattttaacagatagactgccccgccggagacccggcggggcagtgtgcttttactttagcaggcggatccactcgctgttgtagagctcacggatttcaggggagagacaggcaaagctctccgtcttggcatatacgtcgtcggtagggtaggcatagggatcgttggcggtctcagggtccagctcctcacggacactcagcagaggggaggagtaccagatctcctcacagttcttgaggccggcctgagtggagcacatgaagttaatgaacttctcggcgttctccttgttctccgcgcccttggggatgcacatggcatccacgtagagattggtgccctcccgtggcagggcaaaggccaggtcagggttgttctcctgcatggtaagaaaatcgccgtaatagtaggcgccgatgagggcgttctcaccctccagcttgtcgaaaatctcgtccatgacgtaggactgcaccaggggcttctgttctaccagaaggttggtggcctccttgacctgggcgggatcctcagtgttataggagtagcccagcttcttgagggcaatgccaatggcgtcgcgggagttgttgaacatcagaatgtcgccggagagctcctcatcccacagaatgtcccaggtttccacatccttctccgcagggtcaatgtaggcgctgttatagatcacgcccagcaggccccacatgtaggggatggagtagaggttctccgggtcgtactccgggtttttcagattggggtcgatgtcggcaaagttgggaatattgtcaaagttcagcggctccagcatgtcctcctcgatgagctgaccgatcatatagtctgaggggatgatgacgtcgtagccgccggcgccgccggccagcttgccgtagagcgcctcattggactcaaatgtctgataattgaccttgataccagtctccgcctcgaaatcctccagaacggacatgtcaatgtactcgccccagttgtagacgttgaccacgccggcagtgccggtgttgccgctggaactctcgccgcccggtgtctcggctgtgccggaaggcgctccgccggtacagccgctcagggccgccgtgctgagggttgccagtgccagtacaagtgcaatttgctttttcaattcctttcgtttgcccctttcaaaaaataatattatatcaaggcgggctgcctttgatatccgtcagttcccatgaaccatgcggcgcttgtcctgccgggtctggcgtacattgacgatgaccagtagggtgaccaccaccacgaagagcagggtggacagggcgttgatctccgggctgacccgcttcttggccatggaatagatgaccatggacagggtggagaaggtggagccggcggtgaagtagctgatcacgaaatcgtcgatggacatagtgaaggcgatgagcaggccgttgatcacgccgggcatgatctcaggcaggatcacctttcggaaagccagaaagccgggagcgcccagatcctgggccgcctcatagatattggggtcaagctgctggagcttgggcatgacgcagaggatgacgtggggaatgtcgaaggtcaggtgggcgatgagcagggtgacaaagcccaggttccacttgatgcccaaggcagctcccagtgtgccgttaaagacgttgaccgccagtacaaagaacagcatcatggacacgccggtgatgatgtccgcgttggtcagggggatgttgttgatggtggtgaccaccgtgcggctgcggcggcggaagttggtgaagccgatggcggctgccgtgccaatgatggtggagatcactgcagccagaatggaaaccgccagtgtgacccacagggcgtccaggatcatggagttctggaacaactccttgtaccaatccagggtgaagccggaccacaccgaccggctcttggacgcgttgaaggagaacacgatgagcacgaagatgggcaggtagaggaacaaaaagaccagcagcataaagaagcggctgccgatgcgccgggactgtttcacaggaacgataccccctcttctccctcgccaaagcggttcataatggccatgcagaccaggacgatgaccatcattaccagggcgatggcggaacccagccacgggttataggtggtccccatgaactgcatctcaatgaggtcgcccagcagcaggctcttgccgccgcccagcagacgggagatgacaaaggtggacaccgagggaatgaacaccatggtcacgccggagagcacgccgggcagggagagggggaaggtcacccggcgaaagaccgtgaaggagttggcgcccagatcctgggcggcctcgatcaccttggggtcgattttctccagaacggagaggatgggcagaatcatgaaaggcaggaagttgtagaccatgcccagcacgatggccccctgggtgttgatcatctggaaggggccgataccaaacaggcccagaaagctgttgatcagcccccgcttctccagcaggaacatccaggagtaggtgcgcagcaggaagttcatccacatgggcagcatgatgagcatcatggccacccggcgcaccgcaggactctcctgggccagccagtaggacaggggatagccgatgagcagacagatgaaggtggcgatgatggccagtaaaaaggagcgcccgaacacgccggtatactgggccatggtagagaagttctccagcgtgaagccgccggcctggctcgtgaaggcgtaaaagacgatgatcagcaggggggccaccacaaagatagccatccagatgacatagggaacggcgatgcccttactcttcatcctcgattccctcctccgggccctcattcagctcgtcgtactctgagctgtaggagctgtagtcgccgaacataccggagtagcggctcttcttcatgatgtggaagccgtcggggtcgatcttcaccccaatcctggcccccactggggagaagtcggtggtctggatgagccacttgaagcccttgaagtccacgatgatgtcgtaatgcatccccttgaaggtgacctcggtgacagtgccggtgagctggccctgctccacggggacaatgtcgatgtcctccgggcggatgaccacatccacaggctcgttgggctggaaaccgccgtccagacaggggaatttcttgccgtacatccccaccaccctgtcctcatgcatgatgccgtcgatgatgttggactcgccgatgaagtcagccacaaaggcgtttttgggctcgttatagatatcctggggggtaccgatctgctggatacgcccttcattcatgaccacgaccgtgtcgctcatggtgagggcctcctcctggtcgtgggtgacatagacaaaggtgatgcctacctgctgctggatgcgcttgagttcgatctgcatatccttgcgcagcttgagatccagcgcacccagcggttcgtccagcaggagtacctgggggcggttgacaatggcacgggcgatggcaacccgctgctgctggccgccggagagggaattgaccgaacgcttgccgtacccggccaggttgaccagggccagggcctcttccacccgctcccgcagctccgcctcgggcactttgctgatgcgcagaccgaaggccacgttttcaaagatgttcatgtgggtgaacagggcatacttttgaaagacggtattgaccttcctcttatgaggaggaacgtcattaatcctcacgccgtcaaaaaacacgtcgccggaggtcggcttctgaaagccgccgatgatacggagcgtcgtggttttgccgcacccggagggaccgagcagcgtgaggaattccttgtcgttgatataaaggttgatatggtccagaatgacgtcgtcgtcaaatttcatgaagcaatccgacaggcggatcagttccttggacatgtatcctcccccatttctaaaaggtagtaaagggcgcacccaaaccggcggttgggtacgccctaatgacgaaacaaatcatatatgttcttgcgaaaaatgtcaataataaaacgaaatattttcagggattttatacccgctccccggtgggaaagtattccgccacgaaatccacctgctccacggtgaacacgcggccccgcaggtactccagcagcccggcgtcggtgggaaaggtgaaggccagcttataggaatagagggcctggaaggaacggccgtacttcttgttgtcccgctcccggccatacttgccgtcccccagcaggggatggccggcggcggcgaactgggcgcggatctggtgggtgcggccggtgagcagctcgcactctaccagggacagtccgcccgccgtccgcagagtcttatataaggtggcggcgctcttgccgccggggacggggcgggagaagaccttcacctgggcccggtcctcatccttgagtagaaagccctccagcttcccctgggatggcttcatgcggccgtggacaatggccaagtagaacttggcgatctcccggtccctgatcttctggttaaggatgcgcagggtctcggcgttcttggcggccatgacgatgccgccggtgttgcggtcgatgcggttgcacagggccggagtaaaggagtgctcgtcccggggattccactccttcttttggtagaggtaggcctgaatgtgggtgatgagggtgttcaccttttcgtgctcgtccgcgtggcacagcaggccaggccgtttgttgagcagcatcaggttttcatcctcatagacgatgtccaggtggggcttgaagacgctcagaaaggcgttctcctccctgggctgctcgaagaactcgtcgttgatgtataactggagtatgtcccccaactggagccgcacatcccgctgggagcccttcccattgaccttcacccgcttgaggcggatgtacttctgggccagcggcacggggaggagggggagggtcttggccagccagcggtccagccgctgcccggcgtcgttttttccgatggtgaattctttcatagtctgcctcacaattcatttgcatccattataacataagcgcacaaccggggaaagaggggaaagggcttgcgcagcacggtcaagctgtggtatcataagaaggaaatccgccgtaaagtagtacagcctgccggactttgaaaaaatgtgggtttccacgaaaaaaatatttgacattggccgcgggtttcgttataatgtctgctgtgccattgtgtgaggtgtaccatgcgactggatctccgttctattcttcatgttcccggggcttcgctccccttctcgtttgcgttggatctgtccggcctggacttctatggagagcatccatttgccggcccggtacaggtgtctggtacagtgcgaaatcaggcggatgccctcgttctggaggggacggcggagactacgctggagctggtgtgcgaccgttgcctcaagcccttctgccgggatatgcgcgttccggtggacagcctgctggccgagactctggaggacgaggaaaacgacgagatcctgcttctggataacggtacggtggatctggatgaggtctttaccaccgctttggtgctggccatggactccaagcatgtgtgctccgaggattgcaaggggctgtgcgccacttgcggcgcggatctcaacgagggaccctgcggctgcaagcctgaaattgatccacgttttgctgccctcgcgcagctgttggataaagagtctgagtaagttttgcccggccagggcatgaacctaaggaggtgtcatagatggcagtccctaagagtaaagtgtccaagcagcgccggaacaagcgccgtagctccgtgtggaagctggagactcccggcgttaccacctgccccaagtgcggtgcgttccgtctgccccaccggatgtgcaagagctgcatgagctacaacggccatgagttcggcaaggtggaggctaccgccgaggcgaagtaaatagcccgaaaagaacgaggggaatcacccctctttctttttgcccggaaatggggtagaatagaagcgtggagcgcccgggagcagggcaacagagaactgcgcagaccgaaaaacaggctggacgcagtccagcggtattttcggcggagcagtgagcagttgcccgtcgcggagggcgcgcagcgtgacagcgtggccgcaagctccagatccttcgcttcgccgcaggcggcaaagctcactccttccgctgcggctcctttccccaccgaacccgcggccgtcgccgctgggcttcggcgggggccccggaagtgggggagcgcaccgcgccgtatggccgggcggcggccccggagaatcgcagcagaccacaagggccgcccttgcaataagacgtaggggcgggtgcccacacccgcccgccgggccgatgaggacatcggcccctacgaaaagaaaggggcgggcggccgcagagccaccctctgtcactttatttttttgaggagcccaaaacgtatgagcctgacgaaaatcaaatccgtggacgcccacagtccggcccagagggcgggtgtccggccgggtgagacgctgacccacatcaacggacgccccattgtggatgtgctggactataaattttttgcttacgacccccggctggagctgaccctggtaggagaggacggccgcagccgcaccctgcgggtacgcaaggcggagggggaggagctgggcctcaattttgagacctatctgatggacaaggcccgctcctgcgcgaaccggtgtatcttctgctttgtggatcagatgccccccggtatgcgggagaccctctatttcaaggatgacgatgcccgcctgtccttcctgatggggaactatatcaccctgaccaacctgtcggagcgggagattgcgcgcatcgcagagctgcgcatcagccccatcaacatctcggttcatgccactgatccggccctgcgggaggccatgctcaagcaccggcgggcgggggagtgtctggccatcatggagcgatttgctgcggcgggcatcaccatgaactgccagatcgtggcctgccccggcgtcaacgacggccccgccctggaccgcaccctgcgggagctgggggcactccacccggcggtgggcagcgtggcggtagtgccggtgggggtgacccgattccgggagggcctgtgtcggatcgacccgtacactccggcccaggccgcggcggtgctggatcaggtggaggcatttgccgcttctttcctgaaaaagcacagcacacacctggcgtggtgttccgacgagttctacctgctggccggccgtcctctgccagaaaagggatactatgaagacatggcccagctggaaaacggcgtggggatgctccgcctgctcaccagtcaggcggccatggccttggaggacatggagctggaggaggccccgcccccgtttgccattgccaccggtgtgtctgccgcccccttcttgcagaaaatcgttgacatgtgccgggaaaaatgtggtaatataataggaaacgtctatccggtgctcaactgctttttcggggagaccatcacggtctctggtctgattaccggacgggatctgatagagcagctcaaggggagggcgctgggcgagcggctgctcatcccggacagcatgctccgggcgggggaacggatcttcctggacgacgtcactgtggagcaggtggaggaggccctgggggtgccggtgacggcccttccggctgacagcggctttgacctggtggacgccattctggggctgccggtggaggcgcccgcctatgccctgccgccggaggacgactattatcgctacaacccgtgacagagagagtgagggtgctattatgaagcctttgattgcaatcgtgggccggcccaacgtgggcaagtccatgctgtttaataaattggtgggccagcggttgtccatcgtggaggatacccccggcgtcacccgcgaccggctgtacgccgaggcggagtggagaaaccggaagttcgacctggtggacaccggcggcatcgagccctccgccgacagccagattctggcctttatgcgccagcaggcggagatcgccatccagcacgccacggtgatcctctttgtctgcgacatcaagaccggcctcaccgcctccgaccaagaggtggccaacatgctgctgcgctctcagaagccggtggtgctggcggtcaacaagatggaccaggtggggatcaccaacccagacatttatgagttctataacctgggactgggggatcccatcgcggtctccgccgtccacggccatggcaccggggatctgctggatgcctgtatggagtatttcccccctgaggacggggaggaagaggaggacgatgtcatcaaggtggcgatcatcggcaagcccaacgtgggcaagtcctccctggtaaaccgcatcctgggggagcagcgggtgattgtcagcgacatggcgggcaccacccgggacgcggtggacagctattttgagaaccagaagggcaagtacctgttcatcgacaccgccggtatgcgcaagaagtccaaggtggacgaccgcatcgagaagttttccgtcctgcgggccaccatggccattgagcgggccgacgtgtgcctgatcctggtggacgccaacgagggagtcaccgagcaggataccaaggtggccggtctggcccacgaggcgggcaaggcatgtatcatcgtggtcaacaaatgggacgccattgagaaggatgacaagactatggaccacatgcgccaggacatccgcagggacctgtcctatatgacctacgcccccattgtcttcatttccgccctcaccggacagcgggtggaccgtctctttgacctcatcaactatgtcaatgaccaggcatccctgcgcattaccaccggcatgctcaacaccgtgctggctgacgccaccgcccgcgtgcagccccccaccgacaagggacgccgtctgaagatctactatatgacccagatcggtatcaagcccccccactttgtttgcttctgcaacgacgccaagctgttccacttctcctaccagcgctatctggagaaccagatccgctccacctttggcctggagggcacgccagtccggctgaccattcggcagaagagcgacaaggagggatagtcatggcagatcctacaacagttcccacgggaatacagcctaaccttcccgccgcactgagtgagctgggggcggccctgttgcttccggccctgctgatcgcagtgatcgcctacttctgcggctgcttcaacggggcggtcatcgtctccaagtatatcctgcgggacgatgtgcgtacccatggcagcggcaatgccgggctgaccaacttctaccgcaccttcggcgggccgctgacctttgtggtcatcctgaccgatgtgctcaaagcagtcgtggctgtatgggctggcatcctggcggcaaagtatttggtggcggatgagcttctggtagtggcgcttggtaagtactgggcgggagctttctgccttctggggcacatgttcccctgtatgttccactttaaggggggcaaggggatcctctccggcggcaccatcgctatcatgattgattggcgggtggcgctggtggtgtgggggggattcctgatcctggccgcgctcaccaaatgggtctccctgggctccatctgggccggggcatccttcccctttgccacttggtttgtgtaccatgacgtggtgctgctggcgctggccattctgctgggcggcctgatcgtctggaagcaccggggcaacctgaagcgtattctgaacggaacggaatccaagttcagcctgcaccataaaaaagatgagggggcgccgaaagcatgaagatcgcagtgatgggcagcggcggttgggggacagccctggccatggttctgctggagaacggacatgaggtcaccctgtggtcctatagggaggaggagtccgctatcctgcgggagaagcgggaaaaccccatgctgaagggggtgcccctgccggatggactggcgttgacctctgaccgggagtgcgtgaagaactgtaaggtggttgtgcttgctacgccgtcctttgcggtgcgtaccaccgcccgtgctgtggcgtccctgttggagccctctgcggtgctggtgtcggtgtccaagggcattgagaaagatacctctctgaccctgaccgacgccattgctcaggaagtgggggaggggcatcccatcgtggccctttccggcccttcccacgccgaggaggtgggccgtggcgtccccactgtggtggtgtccgcctctcgagacaaggcggcggcggagctggtgcaggatctctttatgaatgagcggttccgtgtttacgcctccgacgacgtagtgggtgtggaattgggcgctgcgttaaaaaacgtcatcgccctctgtgccgggatctgtgacggcatgggcttcggcgacaataccaaggccgccctgatgacccgcggcctgacggagatcgcccgcttgggcgtggccctgggcggccgcagagaaacctttgcgggactgtccggcgtgggtgacctgatcgtcacctgtacctccatgcactccagaaaccgccgttgcggcattctgatcggccaaggcacccctgccgctgaggcggtaaaggagattggcgctgtggtagagggctactatgcggccgccaccgcccgcgccctggctcagaaggcgggggttgagatgcccatcacagaggcggcctatcaggtattatacggcggacgggataccagggccgtgattaaggagttgatgacccgcgcccggaagcacgagctggaggatagctgggtctaaaaaggttttcgaaaaaaatcgagaaaaattgaaaaaaacacttgcatcttttcgcaggatgtggtaatataatcaagccgtccgatgagggcggcgacttccgggtgtggcgaagtttggtatcgcgcttgaatggggttcaagaggccgctggttcgaatccagtcactcggaccaaacaatgataatccgaactacattatccaagtgggtaatgtgttcggatttatcatttctattgaatatgtgctttgatggacaagggcgggactatcaccccgcccttgtttttttagatcttttctgatattttgtgtctgtcagacaaatcaaagatttgcaattgaaaattatgcttattgtttcactgcaaggcaataattcgtattgtcaaaagcactcatttgatttttaggattggcctcattatagagcgcaaagtattgctctgttattccctggggctccaagtgctcatatatcaaaaattcatgtgctgaaagcaattgttcgatatcagagtaggaataacatgccaacattttttcgtttgcaacacccgccagcatgaattgcttttttgttcgttctccggctttttcagtatagctgttttcatctggataatcaaatataatggaactgcctttcgccacaatactacttatagaagaaattaccgattcgaaggattcctttgagagataataggcgacaccaagaatggaacagtaacttattttatcactattaaacgagttgtgattttgcatttctttcttccatgttccttttgtgaagtctgcttcaatgtagtgaacattgtcgggaattacaattccggcacttttcagccgctcttgtttatctcttgcggtagccggatggtctacctcaaaaatttgcaatgcctttgcccataatggttgccgatacgcaaaagtgtcatatccggctccccaaattaaatactgttctgttcccgtgcgaacagcccactcaagagatttttcggcaaaagccgccctgccaagtggcgagggagatagttgattatcaacaacccatcttaatgcctgttctggttctccaacaaatgatggattgaaaaatcctattccattcgacatattctttgctatttgattaaattcttcatcagtcagtaaatctcttgccaagctgtcattaaaaattgtaacctcattgtttagcgcatgatacgcccttgagaatgcgcttatcagtgcggttaagcttttttgctccattaaaaacacctcctgtatacttaatacatccttgatacaaaaagctcaagacttgaaatttccctgattttgtggtaatataaaagcacaaaaagggataattttatgaattttatagtaacgcccagaaataaactatggtataaggcgggagcatcgttgctgatgttcccgccttatgtattatgcctgttctgttgcgttggcgtcccgccgagccttccactctgcaaactcccgttgcccttcctcgctctcgaaaaggcttgaatttccgggagcaggacacgggccagggcttccgattcatggaggggaactcccgtgccctagttaaggcttgcgtgaatcgcccggccagctgtccattacctcccgaagctggctgtcctggcggtgcgccttttatcgctattcacgcgggggttgtatccgaaatactgtgtattcagttgtcagtgggagggggaccctcttatctattaggcggattttagggcaaaggtcctctcttgcagagaatttttcaaactattttaaatttagcagaccctgctgatccccacgccctcgaccctggcaatttttttactgacgctgagaatgtaataagcatgaacgcgccgggcctggacaggcgggagttggacgatggctgcatggagggggtcccgatcttcaccggtctctagaggctgctccggggacagcggcgggtagggcatgtcggcctcaaagccgtgatcagtgcccatggaacgctcgccatgatcctgcttgtggcgtttgtagctgtcacacaggcggccaccaatgaaagagtcacggtaatttcgtctgatgcctccagaatgacgcgctcggtcaaatggggatagtaattgtttagaatgatagttttcatttttagtctttatttcggtgttcagcagttgacggactggcggatcgaaatggaggatggcggggagcggcgcccaggccagccgcccccacctctggccgcgatggccagaggtagtctggtataacaacgtccgcacggcgcaagaccatgcggacagatataacatgattttctttcggacactggcagatttctgctacaaggccagacagggataccggcagaaaacgaccattttcgcagttgaccgcggaatggccccctaatagggccggactttctttgacgaataaccatcagtcagcttgctgcatggtaacaacatggcagtatcctcctataatccgccgtatcctgcgcataagtaaacggcagcttattgctaaaccgccgttagtacaagaaatccgagcatgagggaatatgtgcccagcggcggttttttctttcctgccgctgggcacataacttttgacgatttttacatagctgtcatcaggctaaatagaatccccctgtgaattttagctgtcatgcagacctttacgaaatctctcggattaggatgaagggggtaagctggcggtcttggcctgcgggattatctacaatcagagccaaaagctgagagtcgggccaattctggagctgttcactttttcccagaagttcgacagtcaaatcgttggcatccacgaccatcatcacaattccggttttgagatatacctcatcacagaccttatccggcttactgggaatacgaatcccaatatgcgcatactccgggatgtccctcccccaaaagccgtctagtcccctcacctcatcgtccagcatgtcgtaaaaagtaccgtggatgccgcggagcttattaaggccggcgcagacagccgccttgaggacctttcccaagccgcaaaagttgatggcaaactgcattttaacaggcaggcccatcccgggcccagccgccgtctgatggacaaagcgtgaaagaagcttggcccagaagcctggtttgacctgttcctcagtaaccacccgcccttggcatagggcaatgactttttcgctggcggaaagaatatctcccggttggtagactggtatgacatatctctccaggaggtcgatataattctcgcctacctggacgaaatgtgttgtaatcgcatggcgggcatacgtcttgccgttagcttgaatggtaacggcctttccttcgttggcgtaaaaatccatgggaaagattcctcctatataatacgtaaattgaaataagtatcttggtacgttgcctccttactctccgcgctttctggcggggtacagtttggaccattttataaggcttgaaatgcccatagattgctgatttgcggtttcaaagtatcataatcccacagcatattgctccgctccgtactgttgggatcattgactgtaaactgtccgtcctttatgccggtaatcacaataaaatgtccggttgttgtaaaatctccgggccgcatactgcaaatgatggggcggccttccttcaagacaccctccataatcgattttgtcaagggcagttcctccccgattactccgaagtgcttcgctccttcgctcataagtgtccaggcagtcccagcgccgggaacatagtatccctgctcactggcgtattgggccactacatacggcgtaatggtgtcatcgcccgttaagctggtaatcaccatggataagcaggctggcccgcatccactgacggcaacggagctgttgccatagtcgccgtaaccccagcgttgatcgtattgcagaagaagcggaacttctccgccttcaacctctccgacagtttcagcaaaaacctgccctactttctctggatactctaaaacaaaattcagcatatccaggtttctggacagcattttcaaaatatcctcgggatagatttcgcagttatctatgacctgctgaacccgctgatcctggctcaccaagtcttgcagtttctgacagacttcatgatccatcggcgcctgggtaacatctgtacttttttgcctgctgtctgccgtcccgcacgcatcatgccgggattgattggtgcccgaggaagatgcgccgctatcattctgaaataaggttcctctaaaaagccagactcctgcgatgacaaatgcaaaaacaaatgcgcaccaaaacatcactacccgctggttgcgtttgtgactccgcctggttttttggccgaatgtttctttcataggtatgctccttttctaaaatgcaaaataaaccacgctcctgacagttatcattgtactgaacaggagcgtggcaagtttgaatattcagttgtttgtttcttgagaaaaacttgaggaaggatagatgttttctgaatctgccgcaggcagttgaaccgtaaatgtgaccgtgtcattttcgctcgatgcatggatcgtaccgccatgtaaaagaatgatttcctttgcaattgccagcccaagccccgtgccgcctgtatcagaggcgcgggattcatccaagcggtagaacttatcaaagagggaggacaacttctcagccgggattgtattccccttgttttgaaaaatgacgaagacatgtcctctcactttctcggtagagattctgatttctgtattcagatagctgtatgccgccgcattttttaatatattgctgaatacacgggccaactgatccgcatccgcacaaactgttaaatcttcatcaatttccagtttaattgagagcccgcgctgagaaaagaccggagacaactcatcggataattgtatcagcatataggagaggtctatcgactcttttattagcttgatttgctgtgaattgtacctggtgatttcaaagaattcattgatcatcttttccagccggtacgctttttccaatgtaatacgtacatgcttcacacgctgaggggctggcatatccggatcttcgtgcaaaaggctcaagtagccgataacggatgtgagtggggtacgaatatcatgggccagatacattaccaactcatttttccgctgttccgcaagggccgtttccgccttttgtcgctccagtgtctgctttacagcatttaatttactctcaaatggcagcatttctggtgataggcggatcgcttttgaatcgtccacctgcagagcgtcaattccctgatcgatctccttgaagtatttggtcatccatcggaataggcgcaggagcaaaaacgcaaagacgaatgtaattgccgctgcgaagaacacttccctgtaacttcgaaaatagtagaaatagatcatgttcgcagtttcacggtctactccaaaaaaatgcatcaaaaagtatgcaattaggtttcctcctcgctgtctccacagcaacacataaagaacaattacgataaggatcgataacaaagcgttaccgcaaaaacgacgcgtgattttagcccgaaatgtagcataatcgttgctgaacttaatcttcaattttataaccgaccccccatatcgttctgatatattttggattatccatcgtatcattcagtttttctcttaaatggcgaatgtgggacgtgattgtgttgttcgttttactgtaatattcatccgcccaaatcctgtaaaaaagctcctcggagctgacaaccgttcccttgctttctaaaaggatctgtaagatcgaaaattcagtaggcgtcagcgtaagtgattttccatccaacaaacactggtgtgcttttacattcatctccaaaccggcgtgggtcatgacatcaccggcctccgcttcagcttgcgcgggattgtattttttgtaccgccgcagctgagatttcacccttgcaactaattcaagcggacgaaaaggttttgtcatatagtcgtctgcaccaagtgtcagaccgttgattttatccgtttctccgtctttggctgtcagcataataattggatatgtgtgtcttgttctgattttctggcatagcgtatatccatctatatccggtagcatgacgtccaggatcgcaaggtcaaggtttgttgtgttgatacactcgagggcttcttttgcagaatagaatttaaacacgctataattttcgttgttcagatatacttcaatcaaatccgcaatctcgacctcatcatcgacgactagtattttgtccggcatgatacttcgctcctcctttgcatcgtcctccacatattgtaatagaaagggatattataattgttgagccttacatgagaaaatattaagattttcctcagatttctattgtgattgggggaatcgtcaactactattgcagcaaaatccttgaatacatcaaggataggaagataattcgattttttgcatttccgcaggtttgtggggtgcacgttagtatcaagcaaggcaagtgtatagatacttgacgtttttgcaccgcaaaaatgcttgttggggtgcccccaaaccctctggcacttctggccacgatgaagccgctgacaaagtccccaattcggacgtacttgggctggacctcctggaccgggtgccggaccacagtcccgtctcccagctgcggtggaggaagccctccttcggcaagagcttccggcggctgtttgaggaaatagtacgccagtgtgtcccaaacggccctgtgaccggtcggctggtgggtaccgacttatgtgaaggccaatgcctcccgtgcctcggaggagctgatggagctccaggagagcccagggaattattgagaccgtctggacacctacggggaggaggggctggaggaaccggcccagtggaccggaaaacaccgttccaaacgaaccaaacagctcaaaaaggatagctgccacaccagaaagcgtgtgtgccacactgacccggaggacggccatctgaaccgccccggcaggccccggggggcccactacttgggccgccagacggtggacaccgaccacggcgttatcatcggcgtcacgggtttaaccgtgcttttcatgcgtgcgaaaaagtcctttgaatggaggacttgcaaatcggtgtcaaagggattgtcatggtggggctccgtgtcaggcattggagcgcccttggagataggagcggcgtgaccctgcttccggcgttcatgttggatagcctaagggtgtatcaaatggaaaacattagagaaaataagagggacgacaaaatcatttcctgccgcttcacggtctgtcttgggcgggacataaaatagaggttggtcacatcgtcccgcccatggccgaggaacccggccacggccttttgggccgcatagggagatgttggcttcgtaccattcgaccgcgtaggtgtgccggaggccgtgggaggccattgagcgagtggcgtccggctcctgggcgtaggaacgaaaagcctggaggaccgtgatgtcctgatgggtgggcacaccgtccgggataaggagcttgcatccctgtagcgtctgctcgagatgataccggaggcgtggctccaggatgggattcagtgaaaccggcggccgctcttgcttttcaaaatcaaaaaaggacgcagtgcacccaacggcgcgggccgactgtttctggcagatttccgcgggaaactcccatcacagtcagcaccgggagcggtaaacgcattgaggtgactggaatgagaggatggaggccagccgggctcccacagcggccgcgcgtccttgggtgaggggcagatgatactgccggcgtccgtggtccgcccccggcagcaggacggaaagatacactgcatactggtgaaaccggcatggggagcgctcctctgcgccaggtttgtgttatccttttggacagaaaaaggcccgaaaacaattcgtgcttgttttcggaccagatgggtgaatattccaaatgaaggccggtctgtttttagctctgtcaagtctccagggagttggaataaatccacgggtgagaaatgccacctgataacggaattagcatagcataaaacaacacagccatatagctgcactttttactatcattctaattatgatgattaaaataattcgtctttacataaccagtagatcagggcgcaataagcccattgccggcatacaaacattacaacgtgcacaacgcggatcaaagtccgacgaacagacggccagcaatccggcgcatgccccgtgatttcagcgagtgggtacaaaaatcaatcacagctttgataccataatatatcctgctttttaaccagtaaatctgtatgtagtatccggataggggcgcacttatacaaggtgatctgccagtcctccttaacttacaagtaaggtttaccacaggagcctgagggatgtataggcgaagctttttcaactgtttagaagctgcttcttgcatttccggtcggaacattccgtgtcccacgcgggcggcatgtattgttggaatgccgaataggagccgtgggagtacccggcaaagacgagaagtccagcggctaagcgagtatcctgtaggccgagggaatcattatcccatggcgtgaatacaggtggcgctgatctgcggggggatgctatgcgtcattactccgttgtagtggatgcatacttgacagccagggcaaaaacagagagcgttaccggcgtgcacaacgacggcttgattggtgcaatggtcgcacacaagaagctgtgaggcgcaggatctgcataccgtggcgtacatggttacggacttatctggttccacagtagaacctcctctcccaaatacggtagagtatcctatgaccgcaacggttgagtagttcgaaatggtccacaaaaagccgccccatgaaaggggcggctcaggactatagatcttccagatcagcagcagggaggtcattctccaggttatcccgcgccagatcagtgtccagctcggggtatgcgtcaacgggaatcggacgctcgtggtaaaccagcattgtggggccggaggtgcctgccacaatgggattggcctttttcttggtgtgcttcgccttgccttggagctcggggacgggcggggcgtcgttgtggggctgggtgtgcgtccgctcggggcgggacataccttgctttgccatagtatcacctcaccactagggtgccacgggcagaggcaaaaatacgatacaaaatttgaggtacggcatgaaattattgcagcccggcgcccattccattattgcgggtagcaatcaagtccaaaattccgcaagtaccgcgcttgctgactgagcttgcggaaaaggaatcacgccggattcgctccgtcgcctctacagcggggatggggtggtgctcatccaggtatggaaccaggttggcaccagcctggataaactggatgtgtccaagtcggacacaaatggtaggagggggcatttgtcaatcttcggtgggggagagctctcccgttatggcgtctacataataggctccgctgtctgtggtgatgcgccagaccggtgtgagctcgacaggccgcgtggtgccgctgacaatcagatagcccgcgttcatttcgtcaatgcggctgcacacaaagccaccctctgtcacaccggccagaaaacggaccaggactgtggcggcagagagggtctcttcctcgctggacgaggttacggtgccggacaggcgctggccctccatgcggagcagtgtgtcatcctgccagagcagggtgacctgacaggaaaaaaggggggtaccctcccagttctggtagtaggtcagtaccgtttgccccgggcgctcaccggactcggaggagataagagtgccctggaaatcgattcgctccaggcatgactgggaggcatcctcgtaggagcgctcatgttccttggcccaggcactaggttgaaaacgcactgagaaggtgccgttcatggagaattcagcggtgccctgtacactggaataccgatgccggacatcgttttccccctcacgagagacatcgcccagcagagtctgcgccacgatggcctcgctttcccggtcacgggtgacggtcagaggggagagtccggcctcctgggggacccgctccgggccgaaggtgatgccgctctgctccagaacgcgcacggccgcctggcgcgtatcctcctcatagcgggcggcacggctctcctgcacacccaccagaatcaggaggaaggcattgacggataccagcagaagcaggatgatgttttttaatttggaccattccacagggcatcattcctatctggcggcccagtcggcctccacagtgtcaccgccattatccgtataaaagaccactaactcccttccctcgggagacagggcctccagcgcggcggcggcctgccgctcgggaagaagcaggctgtgctccgcagtctcctcatagcggcggaagcgcagggtatagtctatgatctgtccgttccgcaccgtgaaccgggcggcgcagccgtcctctggaaggagaacggccgctccgctcaggctgtagccatagcagacctctgtggtgccgtcggctccttctgtgatatccatcaagtagagttgggcggcgccgcaggaggcgcccacagtatctgcggccagccgccgggtggtttccaccagctccgacaccgtatagccatctgtggttccgatgggatagcgggaggccgcatcctctgaggtgtggtaggacacggtgccgtcattgccgatctccagagtttcccgtcctacccggaggcgcaggccgccagggatttcgtacagggcatcgctctgtgtctggaaggaaacagcggcctgaagggccgatatggtggcctcgtccggggaggagagggggttggcggagtggtacaccagggggctcggcgtggtggaggtgagcagtacataggggtccagcccggcatagccccggtccgcctccaactcaaagacaaaaaatgcaccgttgctcccatggccggaaaccagctcgtccatatggccagtgtaggcgacctccgtttcacagacataatacaggccatctgattcattatgatagtacagggagaccccaccatccagatcctgggccacggccaactggcgggctgtagcagtaagggaggggttgctgccaccctcgcccatccaggcgtatagggcctccaacgggagctctcccaggaagtcgaaccacacgcccggggcctgtagggcgtcccgccaggctgactccggaactgtatggggagaggcggcgctggagagagcctcgctgagcaggatgcctaccgaactgaacaggcggtcggcttgggctgggtcatactgaaccgcaaagcggtccaccccatcgcagacagcaatacgcacgggctgggcggcggctccggcctgtccggtcgcctcgggggcgtccgccggaacgctctgtcctggatttaaaagtgagagaagatgatccagccagccccgggggcccttatccaccagcccgttgaacatcagcacccggaccgtgagcaccacggcggagagggtgagcagcaggatcagcaggtttttaagccgctccacggtgtttcgtctgcggcggcgcacgcgcttattcccttccatggtgcgggccctccaccagcagggtgattcgtaccgtcagaccgggaccggagcggtccaccaactcgatggtgccctcatggcggtctatgatctccttggcaatggagagccccagtcctgtgccgcccgactcgcgggagcgggccttatccacccggtagaaccgctcgaagatgcggccccggtcctccttggggatgccgatgccgttgtcggccacttccatccacacccgccggtcctggcggccggcggagatacggatgcggccgccatcgggggtgtatttgatggagttggataccacattcatcatcacctgtacgatccgctcacggtccccggtaatctcaggcagctcttccgtgatgtccagctccatggcgtggccgtggcgctgggcctccatcaggttggcgttgtagacatcctgtaccgcctgtccgaaagggaagggggccaacttcagctcggcccggccggagtcaaagcgggagagggtgagcagatcctgcacaatgtgggtcatacggtcggattcgttgagaataacacccaggaagttcttttccgtgttgggagggagctctcctgcgttgtccgccagcgtctccgcataggagcggatgttggtcaggggagtgcgcagctcgtgggacacgttggccacaaactcccggcggagctcctcggtcttgcgctgctcggttacgtcgtgaatgacgacaagaacgccgcccagacgctcctggtcaaagggagtgagcagaagctccaggctgcggccgcccacatcccgctcaccgtccaggtagccgggctgctccacggccagcaccccctggaggggagcaatgtcggagaagagtgtatcgtagttctcgctgccgccaatgggaatggatcggcccagcatctcctcggcggcggggttggactggattaccgagccgtcccgggagaaggccaccacaccgtcggtcatatgcagaaagagggtgcccagcttggtgcgctcgttctccacttcttccagggtgcgcttgagctgctgggccatgtcattgaaggtgccggtgagcacgccgatctcgtctcgggaggccacctcgattttgtgggaaaagtcgccgtccgccacccgttcagcgccctcggtcagccgctcaatgggggtgatcagcgtcttggacagcaggaaagagagaagcacggagatgatcaggccgaagatcaacgcctctacaatcagcgtgatcagctcactgttgagggcggacacattggcgccgttgtcctgcacatagacgatgtagcggccctcgccccgctgtactgccacggctacgtccatataggcggcggcgggggagttatcgtcgctggcatcctcacccgccagcacccgcatcaggttgcgggaatcattgggcatcgcctgtccggactccttatcgtcggagcctgccagccagtggccgtcggtaccgtccagtacgtagtatttccggctgcggttgtcaatgccgagggtgctgttggtatccagaatgtgggcgatgctggatgcggcgtcctcctcaccctcgatgggagtctccagatccttccagaagtccgggtcgccaaaggcctcggacatctgggtatagaagtcctgcgtgtagtaattggcaaccgaattgatcagaaatgcacctaccaccgtcatcagggagataatcagcagcgtcatgatgagcatgagcttcatgtgcaggcttcgaaacatggggacaccccctcccaattcttccaagagatgcaacggcgtcctgagccgaagcgttgaagcagtacccgatggcctcccggttatgatgaactacagggccgcggagtcgtccgttccctgcacgccaggccgcacggagactccatagggatgtaagatttcaggcaacacgaattcaacctgcggcttgccttgctggagttttatgcgttgaagtaatagcccaggccccttcgagtgacgataaactgcgggactgcgggattgtcctccaccttttcgcgcaggcggcgcacggctacatcgacggcgcgcacatcgcctacataaccctcatagttccagacgtgctccatcagagcctcccgggaaaagacctttccgggctgggaggccagaaatttcagtagctcatattcccgctgtgtcagctccagggggtgatcatccttgtagacgatcatcaggtcgacatcaatgacgatacggccgtgctcaatacgccgactgccgccgaggggagcagccgcgccggcggcgcctaccatctcattgcggcgaatattggcctttacccgggccagcagctcccgcatggagaagggcttcgtgatatagtcatcggcccccagctccagtcccagaaccttgtcggtctcctcttcacgggcggtaagcatgatgaccggtgtgctccggttttccctgcgcaggctgcggcatacgtcaaaaccattcatcttgggcagcatgagatccaggagaatcagatccgggttttgctccagggccaactggaggcccgcctcgccgtcgtaggcctccagcgtctcatagccctccttggacagattgaagctgagaatatcgacgatgtttttctcgtcctccacgatcaggatacgcttgttcatggcaattcctccacacactcacagtcccagcagcttggccttcagcaccagcgccacggttttggcgtccttgatctccccctgccgtacctgctccaccagggcggagaaggggatgcgctccacggagaggaactcgtcctcgtccggatgacaggctccctcagtcagctcttgggcgagatacatgtgaagcacctccgaggaaaagccgggggaggagtagagacaccccaggtaggtcagcctcccgcaggaggcgcccacctcctcctccagctcacgcagggcggccagacggtggtcctcgccccgctccaacttccctgcgggcagttcggccaccacctcctggaaggggtagcgaaactggcggaccaggctcaccgtgccgtcgtcaaacaggggcagaatagccaccccgccggggtgctccaccacttcccgggaggccacgcggccgttgggcagttccgccttgtccagccgcaccgtgatgatctttccctcaaagagcacgcggctctccactgtcttttccatcagttccatccggcatatccctttctttgcacagcctttgcactgcggcatccagattaaaccacattatatcatagattccgcccctttgccaatccccccaatcattacagctatccaaagtccacggccatccggtataataccatcaacggtcggattgatttttgcaaaaggaggcccgttatgacgatccagccaatcggaagcgccagcgtggcgctgtacatcacacctgcggacttgaaggagcacggtctcaccccggcagggctgactctggaacgggcgctggccattacacagaccgccttccacgaggcggggatcactctggagggctccatcgagatcgaggcctacccggatgcctgcggcgttctggtgtttgcccatgtccgcgcgccggagcgggcctggttttcttttgacgagctggagcctgtggtggccgcggcccgggatctgcccgcaccgcggccggatgcggcgctgctctggtgggaggaccgctggtggctctcgctgggagcgggggaggagcaggccattgcgcggctgtcggagttcggccgctgtgagaccgcacgcccccatctggaagcccggctggccgagcacggccgccccgtgtgggatcaggacgccctcaccgcgctgctctcctactttcccgtctgacctattgacaagcgtggtataataaaaacctaggcatatacagccggaacgcaggccgggggtgaggacatggacggcaagggaatcaaggtggttgcaaagaacagcaaggcttaccacgattactttattgaggataagtacgaggcgggcatcgagctggcgggcaccgaggtcaagtccatccgccagggccatgtcaacctcaaggactccttctgtatcgtgaaagacgggcagatgcacgttcacggcatgcacatcagcccctatgagaaagggaacatcttcaacaaggatcccttgcgctctcgccggctgctgatgcacaagcgggagatcctccgcctcttcgccaaggtaaagcaggatggatacgcgctggtgcctctgtgtctctacttccgcggtcccaaggtcaagctggaggtggggttggccaaaggcaagaagctctacgacaagcgggcctccgccgcggccaaggacgccaagagggaaatggaccgcactatgaaatcccgccgcaccggcggttattgatgtcaaagaggggggcatccccctgggaaaggaaggaatccaatggctcaaaatcccattgtcacctttgagatggagaacggcggcaaaatggtcgctgaactctacccggaggtggcgcccaacacggtcaacaacttcatcaacctggtgcagtccggcttttataacggcctgatcttccaccgggtaatccctggtttcatgatccagggcggctgccccaatggcaacggcatgggcggccccggctattccatccgcggtgagttcagccacaacggggtgcagaacagcctcaagcacgaccggggtgtactctccatggcccgcgccatgaatcccaactccgccggtagccagttctttatcatggtggagaaggccccccatctggacggcgagtatgccgccttcggcaaggtgatcgagggcatggacgtggccgataccatcgtgaacgcagaccgggaccggatggataagcccaagcaggagcagcggatgaagtccgtcaccgtggagaccttcggcgtggactaccccgccccggccaagtgctgattttcaggagagctcaacgactcaattccacgcagaaatgtcctgcaacctcatctctcccggtgaagcccagcgtcagcgggttcaccgggaaggtgaggagcaagggagcggcctgacggatgtccgcctttggcgggtgtccggaagaaagcggactttgcgacgagccgggggcgtactggtttcgacggggacgtagaggcgggaatagcgggcggatgcgcctatcatccttaaaatgggcagcttataaattaaagaacaacgataacgttgagcttgtcgcggcttaagccgtgaccgtcccgtccggaaggaccacgagccggaacggggcgtcgtttagtggtgcacgtgtgtgcgcaaagctttgagcgcaccatgaacaatgaagctaccaagccctgtagtttgacggcctacgccggggtaagggaatgtaaatgaccgtctgcgcccggagaggttcccgaggaagcgttttcggacgggggttcgactccccccgcctccaccagaaaagaaagacacgacgaaagtcgtgtctttctttttgtgttcaatccgctgatgtgggtaccagtaattatgacacaccccggataccatgttctgggacagaaactttaaagggtattattatgtacaattttgaatcaattttatctctgggggtattttggtatacagcaaaagatttggactataccaaaaaataaatatggtacttttgcttgaggaaagatactgatataattctcacaaattgttagacatacttggagagtgcacaagacacttttcacaaaagagaggggctgggcggcaggtgggagaaggatgaacatcaggatcaatcgcagcagccagacccccatctatctccaaataaaatgcgccattcagaatttgattttatcgggggagctcagccctggctacaagatgccggcagagcgaaagctggccggagagctggatatacatcggaataccgtcatcaaggcatatggagagctggttgacgagggatatctgatcgtctcctcgaagcggccgaagggttactttgtcaaggagattgccgacgacggagtgccattcaagcgctttttcccgctggagaaaatgattcgctatcattttacggacaaggagaagctgtttctggacatcttcagccggtcggagcgggaggaatgcatctcgatgggcgggatcatcatggatgatgcggcttatcccagagagggcgtagagaagattctgcagaacatgtcccgggagccgcgaaacgaggccgaacggatgaagaaaaacatctgttctgtactttttcaggagaacatgtacgtcagcccaaagaatattcagttggttgccgagaccaatcaggcactgagccatatcatgacactctatctggaagagggggactacgtgatagcagaggagccggtggtacccgacaacgccagcattttccgcaacaaggggatcaacctcgtaacagtgccgatggagccggacgggatggatctggccaagttggagacagcgatccgaaaatacgcaccgaaattcatctataccatgccaaactatcacaatcctacgggcattgtgatgtccctggagaaacggaaaaagctgctggagctggcgggaaggtattgtattcccatcatcgaagaggactcccagcgggattttcgatacgaaggaaaccggcttcccagcctgtacgctcaggatcggtaccggtcggtgatctatatcgactccttcacgctgacctttccttatgggattaagacggggtatattgtggggcctaccgacctgatcgaaacgctggaacggctcattgttgtggacgagacctttgtaagcagcctagggcaatatattcttaatgagtatatcgagcgcggatattatcaaacccatatcggacacttggtgaagcactatgcgcacaagcgggatctcctttgccaatgtctggacgggattgcggacaaggggattacctataccaagccccggggtgggctgcttctctggtgtgatctcgaagaacgcatcaatgaacgcaggctgtatcacgaggcggagagccgcgggctgttaattatgcccggcttcctgttttacccgaagggctatgagggcggcggtcatgttcggctgtgcttttccaatatcagcgatgccgacattgaacgaggtgtccaaattttgagtgaagcgctggaacacagcgtggaataaacctgtggagggatagcatgaaccagttaacagagtaccggagagagttccataaatacccagaaaacggctggcgggaatttcgaaccagcgcccgggtggccgagatactgaccgggatggggtatgatgtggccatgggaccggacgtgatcgagcccggaagcgtgggggagcctgagcggctgagcgaggagcagatccgtcaggagatggagcgagccgtccggcagggagccgatccggcatttgtgaagcggacccagggctggcccggcgtgatggcggtgctggacaccggaagggaggggcctgtctccgcgatgcggtttgagatggactgcctgccctacgacgaacctcagaggccgggataccgcccctgtgacgagggctatctctcctgcaacccccagtcagtacacgcctgcggccatgacggacacacggctatcggcttgggcatcgccgcagagctgatgaaacggaagggggagctgaagggaaagatcaagctcttcttccagcctgccgaggagacgttctatggcgcccagtccatcgtggataaggggcacctggacgacgtgatgaactttatcgcggtacatatcgccctgagcgcggagaacaagcctctgccctcccataccgtagcctgcgggtgccgggatttcctcagcgaccggcagttggatgtctatctggagggaaaggccgcccacccctgcggggcctcccaagagggaaagaacgccctgctggccgcctgctccgccgcattaaacatccacagcatcgccccccacgaggagggcctgtgccgggtgaatgtgggcgagatccacgccggtgtgtgtgccaataccattgcgccggacgccatgatgcgcattgagtaccgggggcagaagcccgcgatctccgaatacgcgggccagcggatcttcgatattctggagggcactgcaaaggcctacgacctcaagtatcactatgtggattacggagaggtgcccgcaggcgccagcgactatgccatgatggaggttgtccagcgggcggccaaaaaggtgccctggttccagacagtatattttgagggcaatgtcggcggtacggatgacgccgccgtaatgttgaccaaggtacagcagaacggaggaattggctcctatgtgggcattggtgcggataccaccggccccgttcacaaccccgaatttgactttgacgaggactgtctgcaggccgccatggagctgtgtgtgtatgccctggaggagctccatgggatggatgcttgacttagaaagaagaggacagtgtaaaaacattaggaggtaaagagaacgatggctgagaaagttgtatccaagttgagggggaacatgtggcggctgatcattctggcagtggccggctccctgatctacggactgccttatttcaggacctattactatgacgcgtatctccaggcgtataacctgaccaacacccagatgggctcgctgggctccatctttggcgtattcggcatgatttcctatctgttcggcggtgtcgtagccgactttatctctcccaagaagctgatctccatctcactgatcctgaccggggtggctggattctgccacctgttcgcgaccaactattccatgctcctggtgatttacctggtgtggggttttacagcgctctttgcgttctggcccgcattggtcaagggtattcgtagtctggcctcctctgaggagcagggaaaggcctacggcttcatggaggctggacgcggcgtgaccaacgcggcccatctcgctatcgctctggccatcatcaccgccatcaccagcaagcgtggcagcgccgccggcctcaagggaggcatcatcttctactctgtcgttgtgattgtgctgggcatcctagtgctcctcttctttaaggatcctgagacctctgacaagtccgagcgcttcaacttcaagcaggttctgaccgtgatgaagctgccccaggtgtggatcctctgcctgatcctgtgctgcacctatgtcatgaacatgtcctatgcctacttcaacccctacgccacctctactctgggcgtggccatggtgggcggcaccattgtaacgattatggcggactacatccgtccctttgcctctgtgggcggcggcgtcctggcagaccgtctgggccggcccaggatcatgaccatcgcctttgccatcatggcggtcggtacgtttgccatcgccctgttccccaagatgagcgtgcccgtctttgtggccctgtgcgccctggtgtatgtgggtatgtactgcaactacggcatcgtgttctccctgatggatgacggcggtattcccatggaggtctccggcaccgccgtgggcgtgatctgtaccatcggctatctgcccgaggtggtctgccccgcgactgccggtatcatcctggatacatttaccgaagcgggctataagtattacttccttgccgtcggtatcattatgctcatcggtattgtgggtattatgatctggaaccgcagcatgaaaaagcagaaagcactgaacaagtaaacaaaagagctggtatccattccggataccagctctattttatttgtacgtttccagtgcggcatctgaggggaaacggagccggagaaggcagacggcaaacagcaggccgcccaggaaccaggtcagcggataggcccagtagatcacccgaatatcgggaatgaaatgggtgacggcggtgatgtaggcgatgcgcagggcgcaccaggtggccagcatgatagccatggggatgattggccgcccggtcccccggagaatgcctgcacagcagtgggagaaggccaggaggaagtagaacaggctgacggtccgggcgtcggccacgccgtaggcgatgacctccgggctgctgttgaaggcggcaatcagcaggggagagaggacaaagatccccagcccgatggcctcggccagcaggggactgcacagcagcccgaaccggatgccggagcggacccggtcatagcgccgcgccccgatgttctggcttacaaaggtggccagggccatggaaaagcaggagaccggcaaaaaggcaaagccctcgattttgctgtaggcaccgcagcccgccatggccgccgagccgaaggcgttgatgttggcctggacgatgacgttggccagggagatgaccgagttctgaacgccggagggaatacccagatagacgacctgccgaagcatatcgccgtgaaagcgtacctgccgccaggacaggcggtagctgtgcccggtgtgggtgagcttgcggaaagccaggagggcgctgagggtctggctgaggatggtggccagagccgcgctggccacgccccagcggaagacggccacgaacaacagatccaataccacgttggtgagggaggcgaaaatcagatacttcatgggactgcggctgtcccccacagactggaggatgctggcgcacatgttgtagagcactacggcgctggagcccaggaagtacactcgaaaatacgcaatggaatttccgatgacatcgccgggtgtgcccatccagcgcagaatctggggggtcagcagaacgcccaccacggtgagcacaagcccggccgcgatgcccagcgctacggtggtgtggagggcgcgggagagattttcccggtcatcggcaccgtaaaagcgggcaataaccaccccggcacccagggagactccgttaataaaccctaccagcagcataatcatgctggcggaggagcccaccgccgccagagcggcgctgccgatgaaattgccaacaatcagggagtctacggcgttgtagagctgctgaaacaggttactgaggaaaataggcagggcgaaggagagcattttgcggggaacgctgccctcggtcaaacggttctgggcggtttcatccatgcggtacgatcacggctttctgtttgatagagtacagcccggcgctccgccggcggccgcctgcactacagggaaatgtccgcggactttgcggcggcatcgagcacgtggcgggccagcacggaggtggtcacggcccccacgcctccggggacgggggtaacggcgcccaccacggcttcggccgcagcgaaatccacgtcacccaccaaatggccggcggcgtccacattgatgcccacgtcgatgaccacttggccgggggagaggcagttggcaccgataatcccggcccttccagcggcggcgatcagcagctctgcccgacggcattcggccgccaaatcggcggtgcgggtgtggcagagggtgacggtggcgttccggttcagcagcagcatagctgccggccttccgatgaccagactgcgccccaccaccacggcgcgcctgccggtaggctcaaaaccatagtagtccagcagttccaggcaggcctgagcggtgcaggggggataaccctgcccgtcaccggagaatacactggccagggaaccgctggtgatgccatccacatccttgacgggggagagggcggcacacaccgccgcctcgtccaagtgtctgggcagaggacggaaaaggaggcagccgtgaatggccccgtcctcgttgatccggcggatgaccgtcagcagttcctcctgggtgcaattgactggcaggataaaatgctttacagaaattccgatcatttcacagcgcttgctggccccacgctcgtaggagagatcctccgcccgctctcccacccggacgatggccagggtgggggaaatgccgcgggcccgcagcctctccgcctgtccgcacaggcgctcggtgagcgcggcggccactggcgcccccttccaaagctccgccatcaggtgtacctccccatcaccgactcatagatctgttcggcgcgcttccagtactgctccacaaggccgtcagcttcgtcattcatggcctccgcatacgaccggtcggccatgctcttggtattcaccttcacgttgagccatgccccatagagggcaccccagcatagaacagccccggttcccacatcggagagcaccatcacgcttcccttgtccagcatctcgctgtgaaggtcaattgcctcacagcaaagccggaggatctccatgggtgcggcggcggcgtcccgcagacagcgctccatcacctcaccccggctcgggtcctccttcgggatggcgtaggcccgcgagaggggctcaaaggcggcggcatcggtatccaccaggcccagcaaacgggcgcggagatcctccgcccgcgccatcagggccttgacatcctcctccactgcggcgtatttttgcttgcccacggtgtagttgccaaccatggtacacagggccgcgcccagggcgcccgccaaggcggaggcccctccgccgccggggacgggggccttggaggccagtgcgtccagaaacgcgccgcagctctgttccgcggtattcattcgcaatccctccttcatgattcggataggcggcctacggccgcctatctgccgtttcaatgggctaagaattttgccgttctcgtccacgtccaccttcccggtcgcggacactttgggcgggcctggcatggactccccacgtgagaatctcccgtgggggctccatataatcttatctgcgcgggcgaagtaaattcgcccggcatcaaggttttgctggcgcaaaacacttgtacgccgcattggcggcgggcatgcccatgctcgtcttaaaacaggccggagattctgccgttctcgtctacgtctaccttttcggccgcgggcactttgggcaggccgggcatggactccccacgcgagaatctcccgtggggtcccatataatcttatctgcgcgggcgaagtaaattcgcccggcatcaaggttttgctggcgcaaaacgcttgtacgccgcattggcggcgggcatgcccatgcccgtcttaaaacaggccggagattctgccgttctcgtctacgtccaccttttcggccgcgggcactttgggcaggccgggcatggtcatgatgtcgccggtgagggcgaccaggaacccggcgccggcggacaccttaatattgcgtaccgtgatggtgaagcccctgggcgcgcccagaagggcggcgttatcagagaaggagtactgagtcttggccatgcagatgggcagggagccaaagcccagctcagtgagctccgccgcctgcttttgggcagcgggggtgagcaccacgccgtcgccgtgatagaccttcgttacgatagcggccagcttgtcctcaatggaggcgtccagctcgtaggagaaggtgaagcggttgggcgcatcgcagaggcggatgacctcctcggccagggcaacgccaccctcgccgcccttggcccacacctcggagagggctacgttcacccccagtgcacggcaccggttctccaccagctccagctccgcctcggtgtcggtggggaaacggttgacggccaccacacagggcaggccgtagacctcggtgatatttgccacgtgctggagcaggttgggaaggccggcctccagggcggacaggttttcactccccagctcggccttggggcagcccccgtggtgcttgagggcgcggacagtagccaccaccaccaccgcatcggggtggagccgggccagacggcacttaatatccaggaacttttccgcgcccagatcggcgccgaagccggcctcagtgatcacatagtcgcccatcttgagggccacccgggtggccatgacggagttgcagccgtgggcgatgttggcaaaggggccgccgtggatgaaggcgggggtgccctccagtgtctgcaccaggttgggcttgatggcgtccttgagcagggcggccatggcaccctcggccctgagatcgtgggcggttacgggggcgccggagcggctgtaggccaccaccatccggcccagccgagccttcaggtcggtgaggctgtcggccaggcaaaggacggccatgatctccgaggccacggtgatgtcgaaaccgtcctcccggggaacaccgttgaccttgccgcccaggccgcacacgatgttgcgcagttggcggtcgttcatgtccacgcagcgcttccaggtgatacgccgcacgtcgatgtccagagtattgccctgctgaatgtggttatccagcatggcggccaaaaggttattggctgcgccgatagcatggaagtcgccggtaaagtggaggttgatgtcctccatagggataacttgggcgtagccgccgccagccgcgccccccttgacgccgaagacgggccccagagaaggctcccgcagggcgacaaccgtattcttgcccaagcggcgcatgccgtccgctagccccacagtggtggtggtcttgccttcgcccgccggggttggattgatggcggtcaccagaatcagttttccatcggggcggtccgcccggtcgttcagcagcttcagatcgatcttagccttgtattttccgtagtactccaggtattcctcgtccacaccggccacggctgcaatgtcccgaatgggctttatcgcacaggcctgtgcgatttcaatatccgacttcacttccacatccacacactcctttatacacttcggctgggaaagagagaggaagatggcggtgtgcccccgacatcttccgttcaccttccagaatttcaagtttatcgtaacatcctttgcccgccttgtcaaccggagggggaacgggaaatggaaggtccgggggacaaaaacggaaaaggcaaattcagcttgcctagggcttgtttgaaaattggcgatgtgtccagcggcgaggaattttgggccgctggcaagcaattttttcgcaggaatcctgacggatttcaaggaaaaattgcgccgtccagcggtcaaaaggcccgtcgattgggcatgtcgacatttttcaaacaagccctaggtattaaaattcagaaatgtggaggtcacccgtggaggctggagtaaaaaaagaaagacacgacgtacgtcgtgtctttcttttttggtacggctgaagggattcgaacccccgaccttttgattcgtagtcaaacactctatccaactgagctacagccgcatgtcattgagaggactgtatttgtcctgctcgctgacggcttgattatattagcacaggttggaacagaatgcaagaggaaaataaaaatttctccaaaaattttcttcggccgggagagaaccgggtcaagtggagcgctctccctctgcaacaatgcgctccaggcaggccatcagatccgacatggtctccagcttgacatccatctgcaaaatgtgctcccggagctcgggtggcatggagtcaaactttgcacggatagcgggattgacataggacatggaaatcacctcgccgatagtatggacaggggtacggaaattcataccatgaaaggaaataaaaacgcgctccggaaccggagcgcgggagtttttggtctgtcccccacagagaggcgtctgccaccctgcgggggtacagtggttttgggtgtttgaaaagagaggaaagagaggaggagtcttgattgattgctctggtatcctgacaatctctattttaacaggtctaagcccaaagtgatgaaccattttcaaatttagtatgaacgttttatgaacgcggaaaacgactttttccctgggtaaagggaaagaaaaatggccatataccgccaggcatgccaatgagcgagcgtactcgcagcgcatgaagtgctacacagtacgaatgcggtacagggcgttgagcacccgccagttctgggggaagggccgcatcaggttccaatagccaaccccgtatagaccatattcggggatcaaggccagcttggcctgtatgctacgggcatcctcaaaccagacctcatgggttatgccgtagccatcagtatagcggtaccagggggcctgggcctgctcgctgtattggatatccacaccgtagcggaccgccctggccaccgcctcctggggggaaatggactgagccttggtacgtccctgcacaaaggggagcggccagtcgtagccgtagagggggacgcccagccagattttggaggccgggatttccgtcagggcatactccaccacttggcgcacattgggcaggggagccactgccatcggcggaccataggtataaaaccatataagccccctgtaatggctataattgttcgccatccgtttcaacacggggaaatacatagagattcatatcgcttgcctcccaccggctgccggttgtcttggtgtataagatcttctccaggacttctttcaagatggtgtttttttcgcgggggtcggtcagtgtggggtagagggcaagcacacgctcaatccggggaatgatctcgaagcgattccgggcgatgcgtcgggaggcagtaagggcggcctgggtactttcgatctgctggttcacctccgccatgcgggcggtcagggcctgggatcgctgaagaaacaggtcggtggagtagacaccctgctcaaccaggttatagagattctccatctgcgcctgtagggtaccgagggtacgctgaagagaggtgatttcctgctccgccgtggggccggtgtgggagatagtctcctgggactgtgccagttttaccttgtagtcggacaaccaaatacgcagggaatcaagcatacccgcctctacttcctccaggacagagctcttgcaggtacagtccttattcggacaagccacggtatcgcggccgtgcttgaacttccggcgctccatgctgcggccgcatttggagcagatcagcaggccggccaggggatttcgtatattggtgctcttggggacgggagcgtgggagcggttcttcagcatgagctgggcgcggtgccagagcacttcgtccagaatcggctcatgccggccgtcggaaaggtggacggcacgatccaccgggcgggttttcaccagctcaccgtccaccatgcgcttgacggtgggccgatagctccagcggagctttccgatgtaggttggattagtcagaatgtccttcacggtgcagggcggccatttaccgccggtgggggaggggatgcccctggcatccagccgcttggcgatcgtataggagccgagcgggcggagggtaccgtcagggaggagctcaccgttgacgtaccagtcgtagatctggcggacgatttcggcctgctccgggatgatgcgcagggagtaccccttttcaccggacagcttatagcgttcatagccgtaggtggccttgccggcgatatactttccctcggacagagaggcccggcggccgcgctggagccgtcggttgatggtcttatactcccgccgggacataaaaaggccgaactcaaaatattcctcgtcaaattcgtcgcccgggtcatagaccttatttggggtgacgatttttgtatcgctgtacttgaaggtgtcagccacgacgccctgatcggtggtgttgccgcgggccagacgttccacctccatgaccaggacaccggtccagcggccggcctccacgtcattgagaagccgctgcatttcagggcgctccgcgatagattcgccgctgcgtacctcctcataacacccggtgatattgagtccgcgctttcgggccagcttgagcaggtcggcccggtgccgggccagcgtatccccctggccgttggcttcggcctccaggtctatacgggatttacggagatacagacaatattcgtccatagggcggccctcactgttctggcgggaacaccttggacagctcgataaagcagccggacagggtgttgaccttggccacggcctcagccgtgtagagctcctggacacggtagcggccatccaccagggtgctgacctgtacggtgcgctcctcggggctgacaatccaatactccggcactccggcccgctcgtacaggttatacttggtcagccggtcgtggcgttgggtggagggggacagtacctcaataataaggtcaggtgcgcccttgcagcctatatcatccagcttgccggggtcgcagaccaccgacaggtcaggctccaccaatgtgtcaacatcctccggccgatcgtccgcccgctcaaagagccggacggcgaagggggcggggtagaccttgcacttctttccctccaggtagttgtaaagctgggccagaagggcggtgatgatctcctggtgtaagcgggagggcggagccatcatcaccggcgcgccgtcgatcagctcgatgcgctctcgttcatcccaggtcagggcatcagctaaagtgtaacggtcttccttcggtagtggcataaaggctctcctttctgtctacaggccgtagagaggccggggcgcggagggccttatagtaacgctcctgcaccccggaaatgacgacggcggcctggcggtcgtcatagatatgactggtggtctcaatccgcacctcccgcgagggaggtgacaacaaaaatcctactactcaagcaaagcacattatatgcattttggaatttttccattttggcattcgggcaataggaaaggcaccaccaatctggggaggcgttggcatggcggtgccgctgttctactggatcccgctaaggaaggcgacggccaagccgatgacctcataatttaacgggtcaagctctttcctgcggaggatgatgggggaaaaggtggggctttccgcccggagctccacatatcccttcccgcagtaagctcgcttgagcgtgtattcatcacccgcacttaccaccgcgatctggctgttgtccccgcgggcgcgggaaccgaataacaccaaccgccgggcggcgtactttcgggccaagccggccagatcggcagtcaaggacggagaaagattcatttgttcaggttctcgtggttctcgtaagcgatctcttgaagctgcttatacaacggctgaatgttgtatttctttgggaactcgaactttttctccccgatggaaacgccgccgttggccttgtagtagggagaggaaatataagagatattgatctcactgtcatccagaccaaagccggaggtttcggcagagacgtggatgatgctgctcagattgatggaatccacgcgcattttttgcccggtggcaccctgcttgtcaaaatccacaatacgcttatcggtaaagagaaccacgtcgcggacgagccggaatccgagctgaattgactcgccatccatcagataggcgccgtattccttcgtcagttcatcaaccgatacctcactcatatttccgagcacgccctgggtaagagagccgcccagctttccaatcagtcccatttcaaaatcctcctattatttatattaccgcgcttcagcggttggattactatcattcgcttgtttgtctatctgtcattttgtttggaggtgacaacctatcatggattatgcccaactgatcagcgggcggcggggcagaatgacacggccgtagtaggtcagaacggtatcatcgccacgggcgctgatgaagcggtcggcatcatggcgggcccggttgagagagagcagccggacgttgcccgcgtcgtccttgtaatactgcttgcacagcatatcgccgtccacgtagaagatgcccacatccccattctccagaggctcccggttgacatagacgatagaaccgtccatgatatagggctccatggagtcgccgtcgatcttcaccgcgaagtcggcgttgcgcggggcatcattgctgatctcgatataatcaaaatcctcgccgactgcgggagaggtcatgccggcggcggcgggggtgtagtaaagcggaatgattcgagtaccccgcggctcggcctcgccggtctcccggcggcggcgctcctccgccatgcgcttctgctcctcggtaatcacaattttggtcatgttccgcccatggcggtccaagccctcgtagtcccttgctattttcttcgcctcgtccgacagctcggacggggcgatttttactccttttggtggtgtggtattccctatcaactcatcaacggaaacagaaaataaagaggcaagttgtattaaaagcctatgtcctggctctctttgatcggtttcatagtttcgaagggttgtatacggaatatcaagtttctcggccagttcttttcttgatagcccattttgttctcgtagggagattagattactcccaaaactcatagcgttcacccctttcacgattaggatatatcaggcgcaaagaatagtcaagaaaaattttgctcgctttgggcattatttttctaaaagtctcttgacatttgctcgttatgagctatactaacagtgaaaagctcaaaacgagcaaaactgattgggggtgagtaaatgaacctacctgtaattgaagcagagaggattaagcgcggcgttagccgtgatgggctggcctctttactgggagtatctcgtcgtacaattcaaaactggcaaaatggtacaacagatatgcctctatctaaactggtatgtctctctaaagaatggggctgctctgttgactatctgctcgggattcaaccagaccagacgggcgcgtaagaaaaccccgcccctgatggggcggggccgtgaaaggaggtgaaacccttgaactggctgtatcggctaatggataaagttttcgatccaccgcccaagggaaccgacaaggccggcatagtgctctactacaagtcccaggatgaaggttataagcggtacaagcacctgtgctatcgaaacctgattctggaatctctgctggcgtttctgttcggtctgcttgtctcgttcctgctcaaattctaaaagtgcatcttgcccggcgcttgtgatgatccaagtgtctggcgcttgaaattggcccatggagccaagatgaacggcggagaagtggtgtatttttataagattcttctctttcaggaaaataaaccgctcatattccgaccggctgggtgcgtgaggttccgtgtatttttgcaactccaggtagttggcttcagaaagcataaaaatcatcctctctcatgaattctagcacaatggaggagggaggacaagcactggccgggccaacgagcagccgggcgcgtaagaaaaccccgcctctgatggggcggggcagggaaggaggtgagcgtttgaaactgctgatcatcgtattggcattgccgctttatggactctgcctctgataccgcaaagactgtaccataatcaggactattcgccccggcgaagggggcggacgatggaaaccggtttgaaacagcggaattagagaggaggtaacagataatgtctccccaaaggaagaaacccgtctgtgatgtgcggaaccacagacgggcgctcgataggttgattacgattgcgatatcagcgctcgtagccagctcagtatactgggtccccatgctactaagccagctgtcagggccgaaatgaggacattggaaacaatctcacgtcttcgtgcagagcggttttcttttacatccgataggaacgcttttccttcgcttgtgataaacaatgctcctccacacggattcccattatcatcatagccctggtcttcgaagatgaacccaagctcttttaactcattgatccttgcccagttctcatcatcggaacagccgttgacagctaaaaatatttggattttcccatcattttctaaaacaaattcaagcaattttaatgttttacttggtatgtctttatgggtataggccatgtctgctcccccttttttattgttgcttatattctatcatgacgagggatgaggggcaagaaagaatgcatgtagggctacgccgagggcgtgatctctatggcccagcagttggaggccaagtccgcaggagaaaccgatcgaaaaattgttctgccgaaacgatgaccgggggcataagaaaacccgccccgttaggggcggggcgggaaagggggtgagcggggtggacttagaactcacccagcacaacaaaaggctggacgccctcgtgtcccgcatactggaactatgcgaaacagagggcgccacagtgtttgaagtgcggatgctaagtcgtcgcctggaaagaatcattccggcggtgctggacagtcaggaaaaaaagacgctcttcaaacggaactcaacggaaaaacctagtcccagcgctccgaaataactgcttccattttgcgtacggcagaaaagaacatttccttaacttgctccggagtacattcacgaagatcttgaccggcaagccaaatcttggccaattccaggtctatgtcagatggaatatgggtcatggtttcacctcccttctaccacgaatattctaccacgggcggcagagagagggcaagccggagaccgacaacaagccccgccccatcaggggcggggcaggaaagggggggcgtttgaaacttctgatcatcttattgacgttgccactttatgggctctgcctcccgctttataaaaaactgaattcaactgggtttccgatatacctagtctggacggtattttgcgggggtgtgtggctgctgtttgtgctatttgcgctgtagggtgcgcggttgcaacccgcgcggatgataacggaatattggagtctggatagagagcggctggccagctcaggtctcctcacctccgatcaatcttctccgcttcttccactccgagttcaataataatccagtgcattgtcaattggatcagctttttcagatcctccagatcccggtcggtatgtttctgagtgtagtgggcctggtcatttccgagccatgcggcccggcttgccacgattttaagccgctcatattcgatgtaatccctgatgcagttgctcaacggcgcattttcgatggtttgggccttctctggatgccgctgtttgcaataatccttcaccagaaattccagtgcgcggcggtaacctatccccgagatttgatccaaaccagatttttctgcttggacagcctgctgatagatcgttacaaattccggggagaccgttttgatctccggatcgagcggttcgggcttgaaggcctgtgggtcggatcgctggtgcaccgcattaaaatggcttccgaggtctccgccactaacaatataggtggacaggaagccctgcttgcaaaccggacactcctggatgagatacacacgttggctctgtctatctctaatcatgcttgcagtatggaagattggttgaataccgcgaccgcagagcggacataccgatatttcctcataagaaaccgtgacatttcggttcatctcccgaaaatatgccgaaacaacctgtctcatatctatcacactccggtcgaagcatagcacaaaaccggataaagaacaagtacaaaactatagttttatgaaagtagaatcaaaagagaggcttactccctaagcacataggacaatctgagcatcacataggctgacctggaggtgagcagcattgaggacaatcaaggcccaaaacggattcgttttcacgtttccgtttgaaccgccctgggaggatctgcgggcggaggggagcacgccgaacggcggcaagttctacatatttgattcctgcgtgattcgagatccggaggaacgggccgccattgaccgccgtgtcgctgacgtattcgtccaggcggagcgccggaagttcctggcggctctggaggcggaggagcagaaagcccaggccgccggagaagggtagcgaaagagcgggaccgccctgtgggcggcccgcaagagaaaggtggacaagcatgcgaacactaaaaacgtcccggcgggagctggagcatgtggcggtgtgcgtcacaggagaagtgagcgcggaatttatccgggatatccaggagaccatgcggcgggagaaccagcggcggcgggatgcgggccggccggggatgtcctacacggtatcgggtggggagggtagcccggaggagtggctgcggaaggcgctaaaccaggacctgggaaacggggccgcccggaccgtccgctgcgtccaggggccggttatccgcctcgctctgaccgggaggcaagcaatggcgcttcgggcagccgtggaaatggagctggcccaccagagaggccaggagttgaggctgtcgaggctgattggcgcgggcctggcgggtgttgtccggtgcggcggcgccgcggagcagtacatcagcgggatacggcgggacatagccgcggcggcggagcttgcggagctgctggacagggctatccgggccgccggaggtgtcggggaatgaggcggcagcttatcgcggcagtgctggggctggccctgctgctggcatttgtggtgctggtggagtatcacgcaggggtatgaattatgaatggggtgtgccgcccctgggccggcggggatcaggcggagcctgcggcccgatgcagggcctagcgggccagggcgccgcgcctctctcggcgtcaccgcaacccgccgggccaggagcggcacaccagagtaaggaggagaaccaaatgaaagttgcattgtttggggctggggatattggcctgcaccagcttccgggggagcacccggagggagagctggaggatctgctgggcggcgagaccgagatggtgcccatcaaccggcggctgacgttggtgacccggcgggacggggaggccgagcgcctgaccatccggtacgccctccatcggctgggacatgaaccggagcctattgccggcgagtgcgccgtggtagccgtgggggcggagggatgcctgctggacatggggcgtcacgaccttgccgccgccgcccggtacatacgacccgtctgatgatggcctgtgttacgggcgcaggccgaaacgccccaccgggggcgtcacgggaacccgtcggcaacgtgggaaatcgccgccacgattcgaatagaagcattttgatgatatggggcgggcatctgccgccccgcgaacttatggaggaatcaccatgtatctctattgcgggaagcgtattacccgggaggaaaagcggcgccggcagcgcctccgggcaaacctgatcggcgtggcgctggcggccgccctggtggcggcgggcgttatcctgggcctgacagcgggggtgagactatgaaggggaccgtctatctctacgaggtatcccacccggactaccccacggtgacggtgcccagcattgggccggacagcgccacggtagaggctgcccggcgctggggcgtgcctgagctgtggggccggattgcgggctactgcacggtacgccgcggcggccgcgccgcccgacccaggtgtacccggtgcggccgggagtttggcacggccggacaggcggcgggcaagtgtccggactgtctgcgctcggaggagctgcaccggcggcagatggccaatatccgcggctctgatcgccggccggggatgcggggatgatcctgtcacggacagacccctacggcctccggggagcggtcaagccgggccgcctgccggagacgcccatccttccgtcggccagggacgagccggagaatgtgcgccggtgcgtctcctgcgacgtgccgccggagcggtgccgtgggaagtgccgaacggatgccgaccaggaacgggcgcgggccggcggcgacggccggaaaaaggttgatgcggaggcggtgcgacggctggccgccgccggacgaaataagcaccagattgcccgggagctggaggtcagtatatccagcgtccgcagggcgttaaagcgagaataggaggaagcgtcgtgacaacacaacagactgccgcactggacaagctgcgggagcagcagtcggacgtcagggagcatacagctccttggatggtcgcccagcagttgatggacatttgccggcacgagccggccagcgccgagctgattttgcaggatctagaccgcccggccatgtctatcgtggaggccgagaagaaagtcaaagcctacgcggacacccacaagaacgggtccttcgcctgtgtgccgccggatgagtcggaccggattcttcgggagttctacggcctgcctgccatggaggccggggagcaggccggacagggttctccggaggaacaggccgggggcttcctggatctcatggattttctggggtgagcactatggaggacgtgaggaagctggtaccacgcaccccaccggagggcctgctggagtggacggcggagcgccacaaggagttggaacaggacggcctgctgatcgagacagaatgggccgaggattaccgcctggaggtcatactggacgagtgggcccagcggaagaaggtgcgggccatccgggccacctgctcggcctgtaaagagagcgggctgctatggcgtggccaggatggacgcggcgagtgggggtttatccatccgggcacctggacagagggagagggcggcgaggtgtgcgccgatggggataagaccacctgtccctggtgtggcgaaccggtcattgtccgcaggaaagccgatgtgcggaaaaagggatggttcgtggcggcggagagacatgtcatgagcgcgtcggtgctggggaaagaccgcctgctgacgctgacgggctggacggttcagcggagaatcacggcggcggccgagcggcagctggtagccatcccggcggaagcctacgtgttcagcgccgacgactgcgcccagctgatgggctgggtcaattcttacagcggcacggcgggatacttcgtccggtacagccggtcgtggaggcagccgggggactggcgtgaacggtggggagaggaggagaatatctatggcctgactccggagctggtcgcttcaagctgcctgccacattgtaagctggtggagtatatggcgaaccgaataccgatggggcggaggtatcccgtggcatatctccgtttataccagagacacccgaacgtagagagtatcctgctccacggactgcctcaggtgctggacgaactgatcatcgagcagaccgacggggcggactggagtaaaaagaacaggaaggcggagctagagctgccggaaatcagatgggaggaaacccggtcggcgcagatgctcggcctgaaccgggacgagctggtcacggccagaaaacggggatggggcgtgctgttctggcggctgttcacccgggccaaggctgccggggagagactcaccgacgcggatatcacacatgctttttacctgggggacgaggacattctggagctggtgggccgggggccggtgggcaagagcatgcggtatctgctccgccagatcgagcaggtgggggtggagccggaggacgaagaccctcagccggagggagtaatcgacgtatctattctgctggactactggcgcatggccgagctggtgggtcgggatctggcggatccggcggtccgctggccggaaaatctgctggaggcacacgaccgtatgtcggccacagcggagcagtttgaggcccaggaggtagccgtcaagttccgtatccggcggaagcagttggcccggtatgcgttccagtggaggggcctgctgatccggccggccgccagccaaagagaactggtggcagagggggacgtcctgcaccactgcgtgggcacctatgccaaggactacgctaatggcgagacggccatcttcttcgtccgccgggtgaaagaacccaagaactcctacttcaccctggagctagacgagggaaagctggtggtgcgccagaaccgggggcggcgcaactgtgcccgcacgaaagaggtggaggaacttgaagccgtatggctagcatggctgaaggccggcgcacctcgggacgccaaaggccggccggttgtgccggagcaatcaaaacagaaggaggtaaccgccacatgagtgaattgagcaccacgaacacccagccggcgcggacagtggaggccgtcacgctggaaatccagaccctgcagcgccaagcccagcagctgctcctcggctatgccattgagatcggccgcaggctggtggaggttaaggcaatgctaccccatgggcagtgggggacgtacatcaaggagcaggtgggctattcccagtccaccgccaacaacctgatgcgcatttttgaggagtacggcacggcccagcagtccatatttgggccggaggcaaattcacaagcgattggcaatttgagctacaccaaggccctgcggctcctggccctgtccgccgacgagcgggaggcgtttgtggaagagcaccaggtggaggacatgagcacacgggagctggaggccgccatcagggaacgggacgacgccctccgccaggccgaggaggaccgggcggagcgggaggccgccgagcaggcccgcgccaagattgccgaggatatgcggctggccaacgagcgggtggcgcagctctcccaggagctggaggagttgcgcagccgtccggtggaggtggccgtgcagcacgccgaggaggaggaactggatcaggcccgtcgagaggcggcggcagacgcccgcgcccgggtagaggccctggagaaggagctggcagccgcccgaaagcagcagagcgacctgctgaaccagcaccaggagatggaccagaagctgaaggaggcccgccaggagcgaagggacgccatggacgcgcagaaggccgcccgggaggagctgaaacagaccagggaggcgttggagcgggcccggaaggagctgcgggcctccgggaataaggagatcacccagttcggggtctactttgaggcgtgccaggaggacttttcccgcatgatgggcatcctccacaagctgaaggccggtggggacgacgagggccgggccaagctgaccgccgccggcggcgccctgctgggagctatggagaagcaactggcgcccttccgggaggagggggcggcatcatgctgattgaggccccctgccgcctgggggagaagttcacccaccaccggagttacagcaatcccaaagaacagtatctgctagggattgacctgtctatatggcactgcaatatcgacggcgtgacactgctggggggtccatacaaaaaggggacggtggacttctttgaacggaaggacatggatgcgctgccgatctcctttgaggtgccggaccggctggtggaaggagactgtcggccagaggagctgggcatggaaccggggaagaagtggaaactgcgagggattcggctatgcggggaaaccgggtgggcgttcagcctgtttgatatggaccgtgactcccgcctggtcagaacggatgtgctggacaagctctttgccccagttctgccagcggtgcaggtggatctgatggatttcatttaaggggggagacgatacggagagaccaattctgttcaacacctccatggtgcgtgccatcctggagggccggaaaaccgtcacccggcgggcgataagaccgaagccggacggcaggcccatccgcatgacggaaaatagctgttaccccggctgttatgcaatcgaggggacgccgagggtaattcagccaccatgccagactggcgacattctgtgggtgagggagacgtgggctcggcttccggccagtcctggagggcatttcaggccaaacggcgtgtattactaccgggcggacgaggatatacggccggaacagtacaagagcagtggttggcgtcctgctgttcatatgccaaaggaggcagcccggattttcctacgggtcgccggcgtgcaggcggagcggctgagggaagttacctgggaaagtgtggccgaagaggggtgcgtaaatcctatgcgatttgatgaactgtgggacagcaccataaagcctgctgagcgacacctctacggctgggatgccaacccatgggtatgggtgatcaccttcgagcgggtcgatcggccgaagcccagtacatgagcggatggacaagcctgctcaccgccggggatctggaggaactgcgggaagctctgcgccgggggtgggtcacatccctggagtgggaggcgccggccctccggttgcgggtgcgggtgagcacccagcaggtagcgcccgtctggtcggtgcccatgctggtgcggctggagagatggttcccaggccagtatagcacccagctatttgatagtttggaggcgatgctggatggatattgacctccgacgcctgggaataggcgcgcagttacagattgccctcgccctgctggggagagatagagagaggagggacaagggtggcgaatgtggagctgattgccctgtgcatcgcggcgcggcggcgcggcctgacttatggccaactggtggcgcagacaaccgaggcggagcgccggaggatcgtggacaagtaccgacgaggccccaaaaggaaggaaaataaaggaagataaacaagggcgggctttggagcccgccctttgcggcatgacattgtgcgccgcctccggccctccgggggcggcgcagagggccaatgccctaccttatatatcaaattgaggaacgcgcgcgtgttcctatgcggggcccttagaccgctaagatctcaaccagcaccagccaaaggaggagaaccaggtgaaaaagctcatgcgctaccggatcacagcgggccgcgccgtggaggtgcgggacgtgctcatggaggcacgcgggggaacaccgcggggggccagaagagggaaatcgtccgccaagcagctcaagcgcaatgaagacgaggcggtgctgatcctggcccggcagctcaatgctaactgcaagggcggagatctgttcctgactctgaaatactccgatagccgcctgcctgccacacgggaggaggcgaagcgtattgcccgaaacttcatgcggcggctggccagggcgtaccggaagaccacggggaaaaagctcaagtggtggctggtgactgccagcgtgtccacgaagacggggcagccggtgcgcctgcaccaccacgtggtcacggatgccatggactgggagctgatcgcccagcactggccgccggaggagttttcataccgacgcctggatgcgactggggactataccgccgtggccaggtacatgatacgcaacgccgggtacggaggagcgcgggcctggtcccactctcagggtatccgacaaccccagtattccacgcccatccctgtggccagagcgggcacggtgcgggtgccgccggaggcccgcgtggttgagcgggagatccgggaggacggggaaaccggtttttcagccgcttacatacgctgggtaatgccgctggaggataatgctacacgacacgggaggaggaaacgacacgatgaatgagacctttgccgtccgcttgcagaagctgcgggagcgtcgaggaatcagccgccgcgtcctgtctgagcggtgtggcctgagcaaaaacatgattgcggtctatgaacgaggagaggcagacccttccaccgacactatctgcctgctggcggatattttcggtgtgacagcggactatctgctaggccggaaagaaaatttttagcgtgcccgatcttttgggcatcttgcggcaggggcatggtagcataaatctgtgaaggaatgcaggcaggagaggtggcaagatgatatccggcagacggttggcccaactgcgggagctgattgccgagggccgagaggcggagttttacagttggggcgaatggaaagccctgcggcctgatgtgcttcggctggataaccgcgagtgccagcggtgcaagcagcgggggcggtaccggcgggcgcgcatcgtacaccacgtcaagcacctgcggaagcggccggacctggcgttgagcatttgggacacggatacgggggagcggcagctgatcagcgtgtgcaagcagtgccacgaagagctccacccggagagtcagcggcaatatcggcgcttctatgcgccggtgacggttgagcggtgggactgatacccccgtcgaaaaaaacaggttttccggtacaggccccaatcgggtgggtaatggacattcccggcggatcgcgcacccgcgcgcgccccgctgcccaggccggacggacagggaggggacggcatgacaaaaccggagaagacaaaagaatacaaggccctccgcagcgccatgctggagagcctggaggctcgggggatggtggaggagccgtacaccgacaaggtgcgggaatacatgaacttctggtgccagctcaagcggctggaggcggacgtggccgagcggggtgtgtcggtcatggacgccaagcgggggatgccggtggagaaccgcagcgtctccctggcggtgcaggtatcgcggcaaatgctggccatctataccgccctgggatttaaggacgaaccctcccaggggggcggggacgatgagctgtagcctgccgccggaggtgctgtgctatctggaggcggtggaggcggacacccccagggcctgcccggagcagcacgccctcgcggcctatgtccgccgagtatttgcggaggaggacatccgggtggatgcggagcagcttcggcgttacctgggcctggtgaagtattttccctttgagcggttgttcccctgggaggagttcctgattgccctgtgggattgtacctacaggccggacgggacgccccgctggaagaccctgctgtgcatggtgggccggggcgccggcaaggacgggctgatcgcgtttgacggcgcctgctccatctccccgtataacccggtagggcactataacgtggatatctgcgccaacaacgaggagcaggcggtgacgccggtgaaggacctggccgaggtgctggaatccccccgctacgaggctaaactgaaaaagcactattaccacaccaaggagctcattcaagggcggaaaaacaagggcgtcatgaagggacgcaccaacaaccccaagggccgggacggcatgcgctcgggcaaggtggtgtttaacgaggttcaccagtttgagaactacgataacatcaaggtctttatcaccggccagggcaaggtagcccagccgcgggtgggcatattcacctccaacggcgaggtgagcgatggcccgctggacgactatctggcgcggggccgccgcatcctgctcgaaggggaggccgaccggggcttcctgccctttatctgctgcctgagcacgaaagagcaggtacacgacccggagaactggtatatggccaacccgtccctggcgtacaagccagagctgcttcaggaaatccgcgacgagtacgaggactggctggagcacccggagcagaacggggattttctcaccaagcggatgggactgcgagcgggcttcaaggaggtctccgttaccgactacgagaaggtgagggccactaaccgccctctgccggagctgcgggggtggagctgcattgtggggctggactacgcggagctgtccgactgggcagcggtcaacctccatttccggcgaggagaggcccgctttgacatcaaccatgcctggatctgcgcccagtctaaaaccctgccccgggtgaaggcgccctggcgtgcctgggcggagcagggacacgcgacggtggtggacgatgtgagcatccacccggatctgctggccacctatatccagcaggcggcgctcctgtataacgtccggctgctggccctggatcaccaccgatggacgctggtatcggaatccctgcgcaaaattggctttgacgccgccgataaaagccgggtgaagctggtgcggccctcggacatcatgcaggtggagccggtgatccaggcgtgcttcgaccgccagctcttcgcatggggggacaacccctgcctgcgctgggcggtgaataacaccaagcgggtgcgccgcaggcaggagggtgtggatacgggcaattttatctacgccaaaatagaacctaaaagccggaaaaccgacccgtggatggcgctggtggcctccatgacaggagagccggcgctgggaaccggaacgccggtggagctgccccccatcggggcaatacgattgtgaggagacaggcagatgggaatcaaattctttgagtggctccggggagaccggggcaaggggagcacggtggaggtgtcctgccgggagctctttgaagcggcccaggagtaccaggtgcgggagctgtgcttctggatctgcgtcaacatggtggccaatgccatcgggcggtgtgagttccgcaccttccgggatggcgtggagctccaggacagggagtattacctgtggaacgtctcgcccaacgtgaaccagaactccaccatgttttttcacaagctcgtggccaagctgtaccaggataacgaggccctggtggtgaacactctgaagcgggaggaaatggacgccctggtggtggcggacagatgggagccgccggaggagtggccctcccgacagaacgagtaccgggacgtcgtggtgggagattattcgtaccagtttcccctctatgagcccaatgtactccacctgcggctgaaccacaccaatatgcgtcccatcctcaacggcctgtatcagtcctattggcgcatggtatcggcggcgatgcgggcgtacacctggggcagcgggcagcactggaaggtgcatgtgtctcagttagcccagggagcggacgatttcaaggccaagtttgccgaaatgattgaggagcagatccgcccgtttctcaacagcaacggggccatcctgccggagttcgacggctacgcctacgagaacgtgggcgggagtgccgactccgggggaagcaaggatacccgggacatccgggcgctgattgaggatattttcgactttaccgcccgggggttcctgattccggcggtgctggtcaacggcaaggtggagggcaccgccgacgccaacacccggtttctgacgaactgcatcgacccgctatgcgaccagctccaggaggagattattcgcaagcggtacgggtatgcgcagtggaagaggggcagctacctccgggtggactccagcagcatcatccattttgacctctttgcaaacgcggccaacgtggagaagctggtgggctcgggaggctacagcatcaatgacgtgcgccgggcggctggacaggcgcccatccccgagccgtgggcggacgagcactttatgacgctcaacatctcacccatgggggaggctgcccgaaagctgggcgcacagaagggagtgacgacatgagaaagaccatgtgggagctgaaacaggcggctacgccggggacactggagctgtatatctacggggacgtggagggtgatgggcgtaactggtggacagacgaggtgatccgcagcgagaccagcgccaacaccttccgggaggatctggccgcccacccggatgtcagccagatcaatatctacatcaatagctatggcggctcggtgtttgagggcaccgccatctataaccagctcaagcgccacccggcccgcaagacggtgtatgtggacggctttgcctgctctattgcctcggtgatcgccatggcgggggacgaggtggtgatgccccgcaacgccctgatgatggttcataacatgtggatgggcgtatgcggcaacgccgctgagctgcgcaaggcggccgacgacctggacaaaatcaacgaggctgggcgggcggcttatctccagaaggccggggataagctgacggcggaggccatcacccagcttgaggacggcgagacgtggctcaccgcggaggagtgtatccggtacggcctggctgaccgctacgccgagcaggacgcggacatgacccaggccgccgaggttctgaaaaaggcgaacctggatgtggagcagcgcatcaagctccagcggagcctggcggcccagctccggcagttgacggcgcctccgtcgggctggcctggcaatgggccgggaggcaacgcgattctgaaattgtttgaacaggaaggagactgactatgagagcgaacgacattctgaaccgggaggagatccggggcctgatgcagaaggccatccgggagggagacacggagggcttttaccaggcgttcgaccagatgctggagtgcatccagacagacatccagcagaagtatgaccagcgcatcggggaaatgcagcaggagatggacagccgtatcctggccgcccggggcgtccggcagctgacgaaggaagagcgggactactatcagaggctgggcgaggccatgaagagcgccgacccccgccaggcggttaccggcctggacgcagccctcccccggacggtgatcaacgaggtatttacggagcttcagaccagacaccccctgctgagccgcatcaatttccgagcctccggcggcgcggtggagatcatggtcaacaccaacggctatgaggaggcggtgtggggcgacctgtgcgacgagatcgtcaaggagctgaccgccggcctgaagaagatccccaccactttgctgaagctgagcgccttcctggcggtgtgcaaggccatgctggagctggggcccgagtggctggacgagtttatgcgccaggcgctttatgaggcgctgagcaacggcatggaggcgggctttgtaaccggagacggcaacaaaaagcccatcggtatgacccggcaggtgggggacagcgtggtggtatccggcggcgtgtacccggagaaggagagggtgaagctctacgacctgtcccccgccaccgtgggcaatctgatttccattatggcggcggatccaaacggaaagccccggcaagtacaggacgtgattttcctggtcaacccccaggactacttccagaaggtcatgccggctaccactctgatggcgccggatggaagctaccgcaacgacgtgatgccctaccccatgaccatcatccaggtgccggccctaaagaggggcgaggcggtcatgggcatcgcccaccgctatctggccctggccggaacctcccccaacggccgggtggagtacagcgaccactaccgcttcctggaggacgagcgggtctatctcatcaaggcgtatgccaacggtatgccgttggataacaacgccttcctgcacctggacatttccggcctgaagcccgccgcctggaagatcacgatggtagaggagcctgcgccgtccaccgacgccgccctgtcctcactggccatcggcggcctgacgctgacgcctgccttttcctctggaacaactacttacacggcggagacgaccaacgccaccaacaccatcaccgccacgccggctgacgcgggagcgtccatccaggtgctggtggatgacaaggagatctccaacggaaccgcggccacctggaagagcggctccaatacggtgaccatcaatgtcaccgccgcggacgggaagaccaagaaggcgtataccgtcacggtcaccaagagctgattatggggcgggacagtctgcccgaggggctgctgtccgacgtgaagaactacctggacatcacctgggacgacgaggccaccgaccggaagtatgccggcctcgtcgcctcggggatggcctacctggacggaaagctgggggaggcgggggactacacggcggacgggatgccgcgcaccctcctgtttgagtttgtgcggcatgcccgggacagcgcactggacgtatttgagaacaactatctggccttgctgctggacatgcagcacgggagggcggtgaagcggtatggcggagtggaaagccccgatgcggccccggacggataatggggtcagccagacttacaacgacggcttggtggccgtctacatggtcaccgacgcggcccggcccggctaccagccggtagagcggctgacaaaaaaggctgtgctccgctatgaggagcggcagctgggtcttcaaagggcttacctggccaagcagaaccaggtggacgtagagcgggtgctgaggacgccccggctgcggggcgtcagtacccaggatgtggccgtcacggaggacggcaggcaataccgcattgacctggtgcagagtgtggctgacgtctggccgccctccatggatctgacgctggccaggctggagcaggactgcggtgcgtccgattcggacacaccgggaagggggatgccgggatgacctggcaggagaaacttatcgcagcgcataccgccgtcaccgacgcggtgcgccatgggcaacggatgaaatccagccggtattttgtttggcaggaggacggggacaacgatctggcggcgggcaacggccacgccgagcgggcggtcaccggcaccaccgacctcttcaccacgcgggagtttgacccttgggcggaggcgctgggggagtccctgagcgaatacggcatcgcctggtatatcagctctgtccagtttgaggaggataccggcttctggcacaccgaatgggtatgggaggtagcgtgatggcgaccatccaattcaagaagggtgacgagtatctggcgaaaatcgccaagctggaggccagcctcagagacgagatctgcggctcggccatctatggggcggcggggattgtggccgacgaaatccgagcctcactggagcagatcccgaccgatgaaggatttgggaccagcgggagcccggtacggggcccccggaaggtgcaggtcaaagggctggaggaggggctgggcatcgcctccatgcaggacgacggcacaggttacttccacgtgaagatcggatttgacggttacaacaaggtcgtgaccaggcggtggccaaacggccagcccaaccagatggtggcccgctccgtggagagcggaaccacctggatgcagaaaaatccctttgtccggcgggctgttatggccacccggaaacgggcggtagcctacatgaaggaaacggtggacaaaaagatcggagaaatcatgaagtgaaggagtgtaagccatggcaaccattggcctgagtaagccctactatgccaaatacagcaataccggcagcacggtcagctattccaacggggcgctgctgggcaagtatacagagctgtctatcgagctggacagccaggacgccaatatcctctatggcgacaacggtgcggcggagagcgaccagcagttcaccggcggcacagcgaacgttaccaccgacgatctgcgggcggatgtgatggttccggtattcggggtcaaggaggaggctatcactgacgaagggatcaccacctcggagccgaagtggattgtgttcgacgatgaccaggaggccccttatgtgggcctaggaggcgtcatcaagaaaaaggtggatggggccgtcaagtgggtggcattcgtcctcaataaaatccagttcgccaccccgggcatctctgcggtcacccagggggaaaccattgaatggcagacgcaggagttgactgccaccatcctgcgcagcgacgcggcaaagcacccgtggtttcggatatccactcccatggacaccgaggcggacgcggaggccgccgtcaagaagtatctgagcatcacggaggggccctaaatgcgtactgcgaaattgacggtcaacgggaaagaatacctgctctgtttttctgtccgggtgctccgggcggtgtcagaacggtatggggatgtgacgcacatcccggaggcgttggaccaggaggatacggtccgggcgatggacgaggcgttctggatactgtctgccatgatggaggcggggagccgctatgccgcccatgagggaatggagaaccctgcgccgcttaccgtggaccagctctacgatctgtgcgatatctccgactttatggggctaaagaacaagatcgcggaaaccatcacagccggaagggctgtcaccgtggaggcggaagcgccaaaaaacgccggaaccgcccgggggaaacggtcaggctgacccccgagtggtttctgtggtatggactgaagatcggcctgacatatgaccagacaatggatcttccgctgggggaactgcttgatctggtcgccattgaacagatcaaacacgaaggcgccaggctgaagcacagcgccggggacggagaagaggagttctttgcgctgctgaacaggaggtgaaaccatgtccgtggatatcggcccaaagattgggattgacggtgaagctgagttccggaaggaactgggcaatatcaaccagcagctccgcacactgggctcagaaatgaaagcggtgacctccgcctttgctggcaatgaaaaaagccaggaggccctgtctgcacaggcgggcgtgcttacccggcagattgaggcccaggagcagaagctctcccggctggaaaaggggctggcctctgccgcgcagaaatacggcgagaacgacacgaagacgctgcgctgggcgcaggcggttcaggatgccacggcggatctcaataaaatgcgcgcccagcttactcgggtggagggagagctggacgataccgccgacgcggcggacgagctggccgactccatggatgacgcgggcagcaagtcaagcggctttggtgatacgctcaagtccgcgttcctgggcgggggtatttctggagccatccagtccctgatcggcggggtaaaggatctggtggagaacacatccgagtaccggaagatcatggcctccttggaggtgtccagccaacgggcaggctacagtgccgaggagaccgccgccacctaccgcaccctgtatggcgtcctgggggacgaccagactgcggccaccaccaccgccaatctacaggccatcggcttggcacaggagcagttggagcagattaccagcgccaccatcggcgcatgggctacctatggagactccatacccattgatagtctctccgaggccatcaatgagactatccaggtagggaaggtcacgggaaccttcgcggacgcgctcaactgggcaggtatatcagaagacgccttcaatgaaaagttgtcggcggcggccacgccggccgagcgggccaatctggtgcttcagcagttggccagccaggggctggtgcaggccgggcaggcgtggcagcagaataatgccgatatcgtggccaacaaccaggccacggccgagctgacggagacaatggcaggctttggagctgtcctctctcctgtggtggccagcgcgaagcaggggcttgcggagctgctaggaggtgtgctgagcgttgtgcaggcgttccaggaggacggactcggcggtgccgtgcagcaggccggaacattggtcgggcaatttgtcggcaatctcaaggaaagggccccgcagatgctcgcagcctcccaagagatgatggggcagctttggcagggcgtggtagacaatatcccgcaggtcatagagggattttctcagacggtgagcggtgtgcttaactttctgtctgagcatctgcctgatatgatccaaaagggcggcgatatgctgggaagcctggtgcagggaattgtggaggggatcccggtaatgctccagaatctgccgaggattatcacatcctttgtcaactttatagtgcagaatttgcccgccattgtggacgcaggctttgaactcttgggtgggctgattaccggaattgtcaaggccatcccggagctggtagccgcgctgccgcagattattgtggctatcgtggacggcctgggggccttgcttggctctatcgtagaggtcggcaccaatatcgtggagggcatctgggagggcatcaagggggccgctggatggctgctgaaccgggtgaaggaatggtgcggtagtattctggacgggatcatgggttttttcgggattcactcgccctccacggtcttccgcgaccaggtgggccggtacatggcccagggaattggcgttggatttgaggaggagatgtccagcgtagcggcacgcatgcagcgcagtatcccgacgcccaccgtggagaccatccaaaacgcagcggcgggcatggtcaacggactgagcgccgcgagtgcgggacaggcatgcccatccaccatcgtgctccagctcaacaacggcatggagattgcccgctggcagctgccctatctgcgccaggcaggccgtgccaacccggaggtggtgagcggcgtatgactcagttgattctcgcagataacatctatctgccgcagaccagccacgacaagtacaagtgctacccggcccagcttggggagcaggtggacatgatctccggacggcgtgtcctggaggtgcggggctgggtgcagatgatcgagtacgagtacgactacatgggcaatgaactcatgcggaaggtcaacgcagtactccgctccggcaagagcttccaggcggcctatctgcccgacgacagggacagcctggtggtgtccaccttcctgacggagagtttcccgcagcccacctttgctttttcgcggggcgggaagccctactggcataatgtggcgtttacactgagggaggtcaagccccatgcttagcagctccgccgcctatgaggcggctatcaccggcgacacgcggcggatgtatctcaaggccgtcatcgatatcatcgacccggatatcgtttacggcacggtggacagctccggcgtggccaatgtatgccggccggagcagatccacgacaaggagatggagctgatcccctacgccacgctggagcccaaccgctgggcactcaacgggcagttcaagctgttccctctccagggggcagaccatatcggcttcctgggggatgtactgtccggcgcggagggggtattctccccagcggtgtgggtggaggagcagttttccaatgtctccatcctccaggcgtgctccatccacttcccaatggcggagtgggacggggtgcccgccgactttaccgtggaggtcaggcagggaggcacggcctactataccaaggaggtcactggcaacaccgcatccagcattgtcctggacggctttaccgtcaacaacccggacgctatccgaatgacagtaagtcgctggtcacggccgggccgccgcctgcgggtgccggagattattcctggtttgtatgaggagtgggacagctccatcctggcccggttcaccctgaaccagcaggtcaatttttcctgcctggcgctgccctacggcacctgctccctgtccatggacaacctggaccggcggtttgagccccgcagcaagagcggcgtgttccgctccatcgaggagcgccagggcatcccggtgtccattggagtagctctgccggacggcacggtggagtacaagcccaagggcgtctattaccagtattccggcggctggaagaccggcgacaacggcctgaccatgcagtgggagctggtggacatcgtgggcctggtctccggccggcagtacatccctcccgcccagcttccctccacgctggagggctggatagcctccattgtggcgcagcttggggacaacttcgcgggtcggtaccatgtggaccctgagtatgccggccgctccgtgacggcccggagcgcggaggacgtgagcgggaaatcctgcggcgagctcctgcgtatggcctgcatggcggccggggtgttcccacgggccgacgatgaaaccggggaccttaccgctgaccccctctggaaccagggggcaaagatgaccctggacaacatggaggaatacccggtcatgaaggccaacgacgacctggccgccctcatttttaccctggcggacgggaatggcactgagtatgtggtatcgggcaatgccacggcatccggaaacacggtggcggtcaataacccgttcatccacacccaggctgaggcgctgacagcggcccggatgatcctgtccacctatggcggcaaccagttggagactgtggggaggggcaacccggcgtcggagctgggagatgtggacacagtgtggctcaacgaatccacggccaccacagggcgcagaatgtcccagacgttcgatatgtcctccggtgtactgaaaggcagccagagcacaatcctccaggccgacggtgcgtttttgtacgagaaccgggaggttatcaccgaggcatgtgtctggacagctcctgccggtgccacacggctgcgccttatccttataggcaagggagagaatggcggccacggagagcctggcaccatggggagagcggaatctgaggatggctttggcgaggccgtcacgggcggctatggagccgacggagcggacggggctggaggcagagtctggacagggacgattagcattaacccacagcagcagttccagatctccttcagcgggctggatactatatttggtgcatactccagcgccaatggcgtgcagtatcccaccgggttctcagatgtggccagtggagatgcgtatggcaggtctggcgtcgagcagcccatccccggcagtggggatggaggagctggaggcaggggcggagcccccgggtatggcgtgtataagcacaacatctggccgggcggcggttcggttacatttaaggtgctcgtcgagccagagccggggaaacccggagcggcaggggcacagggctgtgccgttatctattgggataaggaggggtgagtatgtccgaaacatggacgccgctggttatttcggccagttttgcacccaaccccgtatcagtcgggctacccaccgtcctttctgtcgtcgtcatcgacgcccagggcggagagcgggaggatctctggtacagcggcgaactccaggcgggggaggtgtagtgcgtggcgattacccaggtgcgggcgcagttcaatggtcagtggtacacgctgacctacaacgaagacgccagagcctatcagacggctatcacgccggacacattctccggcggtcagccggatgggtattacgacgtaacggtagaggctaccaacgacagcggcgtggtggtgactacagacggggacaatctgccgggcctccggttggtggtgcgggagaccatcccgcccatcctgaccctggtatccccggaggcgggctatgtgaccaccaacacgcctgcggtgacgtggaccgcccaggacaacgatggcggctccggtatcgacccggacagcgccatagtgaagctggacgggaaggcagttccggcggagcaggtgtccgtcacggcgggcgcaggcgggacatataccatcacctatacgccagggactgctctggcggaggggccgcacaccgtccaggcgggtatcagtgacaacgatgggaacgcagctacgatggaggcaaactacattgtagataccgtaccgcctgtgctgtccgcgttgctgtccttcgaggaggtggtggtggatgcctatacggttaccatcacagggcagaccaacgatgccaccgctcctccggtgacaatgacagtgatggacaacggggcggcagcgggggctccggaggtggggccggatggacggttttccttcctcctgaatctggaggttggggagaacaacgtcacggtcgttgccaaggacggggcggggctgactaccacggccagctattacatcatccgcatggttaccgaccgggcacaggccgatgtggacgctctgaacgaccgtgggacatacaacgcctctgatctcaaccgggtcaatacggccatggcctacctggacgggtggctttcggaggcgggatacgtcaccggatatgtcggccagggtattgcctgggctatagatgacatcccgctacaggcacagatggcggactacctgtccaacgttggggcgatcggtggcacgttctcccttgccaacgccccagcaatcccggtctcgatggagcttctgacccatgaaggggccaatcacattgagcgggttttggtgctgacggaccagatccgcgctcgtttgaagcggtcgccatttatgagcggcgaaatattttgtggtgaggtgtaacaatgcaagatggaattattgctggaaacggaaacagccggtatttgaaaacggtggcggcagcgctttccctgtatcctacctatgaggattttatcacggcgctgatcgctgggacatttcctattgacctgaacgggatcaatgaggcagggtggtcgcagaaggggacacccctgaacaaatttaccctggtaagtgacaccacagaaaccaagatatggggttcagccgggaaccatacagttgaccaggtgttcgggaagatacttggctcaatcggatattatctgataaaggagtacacatcgccggggaactacacctatacgttcgaccgcaaacatgcagatatttttgtggttgtggttggcgctggcggcggcggcggttcgcgtggcgacaaaggtggtggaggcggcggaggcggagctgcggcgtactatcacattttggacagcgatagcatcgaaaataaaaatattgttatcgggacaggcggtgccggggcgaatgcatcagtcggagacggggttgagaagagtggaggaaacggagggaccagcagcgcttttgggattatagcgcctggcgggaacggaggtaatggtaacggtagtggcacgggtggaggcgaacctccttggacaggcggtagcggaggcgatgggggctacaataccgggaaaccaggtgaggacggtcctaatcttgatattttggggtttaaatttttctgcggcggcggcggaggcggcggggatgaagcccttaatgaccctcctacattaggaggggccggaggcgctggtgggggcggtgctggaggtgcgggagctaccggccagaccaatgcaacaaatggtactgatggaacccgcggcggtggcggaggaggtgctggagcgggatgggctttccgctccagcgggaataagcccagcggtaatggcggtaaaggtggcgatggatatgtggcgatttacgcaagaggtatttcttgatgaaaacagtctatttaaatgaggataacactgtccgcgaaatcatcccggaatacgcacttccaccggagaagtggtatagcgaggcatttgcacggcgctgtgtagaggtacaggacgatgtagagcaggggtggcgctacaaccccgaaacaggccaggccgccccggacacaagacagccggggcctgaatcgccctcggcagaggacatcacactggacatgctggccgagcacgaggcgcggctgtgtatgctggagctgaccactaccgccaccatctaagaaaggagacactatgacaaccgtatacaatctctgcaagatgctcattgaccggggccgcaccgacggcctccaggacaagatggatgtctacctggccgccgaccgactcacccccgaggagtaccaagagctggccgctcaactgaccaaatagaaagccgccctgtctgggcggcagaggtcaatcctttggagcaaagcgggagggtgcttccagcggcttcccggtgcgccaatcacggttggggtcgtgtgcagcccaagcctctgcgccgcacgtctcacatttctgcccctcccacagccattcgcgctgaccattgacccatgtggatgggcacacagctccgcacttggagcagattacaacaatattcataaggcacctcccgataaaaagaccgtggcggggaaccatctacagaaatcgttaggatggatttcgtgttgttgatggaaaggagtttgccagccgccacggctgaaaaaagtataccacaaaacaaaaatgaaaggaagtacaacaatgaaaaacatcaactggaacgagctcacccccgcctgctacgcgatcgccaacgccaacgatgtggatgtgggtgtaggcggcagcatggtgcagaacaacatccgccacggcagggcggagcatcccggcgcggaaaatctgcccgcggcctttcggcctgactgggtagcactgggcgccgacgcagatctggctgcggagaacgacgaatttaacgcctggatcagaaagtgccagagtaacgtcaaggccctggccgccctgtgggatgcaaaggactatcagggcatgattgagctgatgaagaacgccgccgaccccggccccatcaacggcgagaagcccagcgaccatgagtaagtacatagcggtcatcaccagggcggacatcacccgcgccgccctggtggaggccagggggcggtctatggagcaggtcaaggccgcctgcgggtgccagtatatcctcaacgcctggttttatcacacaatcaccgggaagcccgtcggcaatctcaagatcgacggcacggtcaaggccacggccggctggaattgctgggggctgacctgggacaagggggccgacatccgcctggacatcgtacccgacaacggcggtgcctcctacctcagcggcgtagagctgctgacgcccaccagagggccgggcaaggccctcagctactccccggagtacggggacacccggggccgctccgccgtcctgctggccggggcacgggtgatcctgtactgctccggcgacggcacccgcgatgccaagacccccgaggcgctgcgggacgagctggtgagcatcggctgccggtacgaccaggcggccaacctgcgggccctgggcctcgacgcgggcagctcctcaaactgcgactttggggacggccagcgcatcagcaacggtaagcgggtcaagggctatctgtgtatctggacgacggagggcggccaggagccgccggaacaggaggagagtatgggcaagtacaaggtgacgcccagcatcggcgtcaacattcgccgaggccccggcaccggctatggcaaagcgggggcgtacccctgcggggccgtggtggacgtgctggaggcccgtgacggctggggcaggacgggcaagggctgggtgtccctggcctatctggaggccgtggaggctccacagcgggtcacggacacgggcctcgccatccagacgtaccttatcgcccaagaggcggataatcggcccggaggcagcaatccctgcaagtacatcaccatccatgagaccggcaacgcggccaagggcgccgacgccgcggctcacggggcctacctggacggcgcggccggggaggacgatctggtgagctggcactacaccgtggacgaccacgccattgtccatcacctgcccgactacgagacggcctaccacgccggggacggcaaggacgggccgggcaacaccaccagcatcggcgtcgagatctgcgtcaacgccggaggggactttgaggcggccaaagccaacgcggccgccctggtgcgcctgctcatggccgagcacggcatcccgctggacaatgtagtccagcacaaccgctggaacggcaaggactgtcccaagaccatccgggccacccccggggcctgggaggcgttcctggccctctgccagggcgaggcggcggatgtgtccgacttggacaccgacgtggacacgctggcagaggcgggcatcatcaacagcccggactactggcgggccggggattactccgccgccaacgtccagacgctcatcggcaagatggccgactatgtacgggaggatgagtgacatggagcacatcaacgggattaagggcaccatcgcggctgtgctcggctgcctgacggccctgtggggctggttcggctggctggtggtggcctgggtggtctgtatgctgctggactacgccaccggcaccgcggccgccctgcgggtgggggagtggtcgtccaaggtggccagggacggcctgtggcacaagctgggggccgtggtggccgtcctggtggctgcgatcctggacggggtgatcggcctcatcctggccaacgtccccgcgctgacactgcccttcgactacacggtgttccttaccgtgctggtgctcgtctggtacatcatgaccgagctggggagtatcgtggagaacatcggcgccctcggtgcccccgtgcccgcctggctccgcaaggccatcgccgccctggagtccactgtggacggcgcgggggacaagctgggcggcgaccagcatgaagaaaaataaattgccaagcgattggaaatatgaatgcccccggggcctgcgggcctcgggggcgctgtgcttatttgctggtatgatcaaaatcatcgggaaagagttctccgcgtgtactgcccaggccgaactcgtggtgaatccgcgcttgggcctccggggtgagctcgcgccatacatgttcccggccgtcacagaccaggagaaaatcggcttcccaatagtttgtcatggtgtgctcccttctgccctcgtcacctccggggcgggtgtttgtttattcgtcatcctgcgggtcttgatcctagatttgagctattagatcggcccggatacgtttccacatttcccggctgctgctgccctcgtcaaagctcagcattaccgatgtaagagcggttctgatgcggcacatatccgcacggctcatggttacggttctcatttcctgatttaacatctcgtgtttcctccttgattcctctgccttacgctgttataatcaaggtggccggggtaaggctcccggctcaccttttcggtgtgtggggcggtggctttgtgagggtcagccgccccactttttactcattcatgatgcgcttgacgctttcccggagctcttccagcgtgtcgcacttctcaatgagttcgaggattgcctttagcaatgcctctgtcacgttcatttcgtccattcacctcactcctttctgtaagagattttgcatccctgccttacgagcatagtataatacatgcatgcatgtatttcgagaggtattccgcacaaacatgtatgcatgaatttgtgcagattatacatggatgcatgaaccgaaatgtgatatagtaaagccgaggtgatgtaagtggctacgaaagcgcatttggaagggaataaacggtacctggaaaagctggatcacatcacgatccgtgtgcagggaggcacaaaggagaaaataaaggcccgcgcccagcaggagggcatgagcctgaacgcctatatcgtggggctgatcgaaaaagatatgggggaagaaaaagcgggtacctgactatggcacccgctttttcttgaaaaattatcacatataacttatttggctataagtatagccccactcataggtcataaggagtacctgattaactgccgcaccgatggcggcgaagtcgtggccctcatacagtgttccgggctgatcggcggcaattttgggggccaaggcggcgataaccggatagcccaggggattgagccgctctgtgaggcggcccagaaatgcggcataggcccccgcatcctcggcgtagacatattcaaaatccacatccagcccccggtagcccttttgcaccagcatggcctccagattgtcaaccagcgtatcctgtaccgcaggctgagtgagggccaagtgggccagctcattggagaagccgccctcttcggtcagggtggacaggtgcatcagaggagcggctccaccttggcgggctgcggcgagcagggcctcgtcatccaactccaccagcgtgccgtcaggggtaaagccataggtaaagggggtcagataggtgagataagggacggtggattggagcagcgccgggtcgataaagggataggcgtagccgttgacggagagggtggcctccggcgtgctgtcgtaggcgagcaccagggtctggccaggatagatctccgggataccgccaagtatgggattgttgcggtagagctggcgcagtgggagctgataggccgcggcgatggaggccagggtttctcggggctggaccgtgtgggtctgggttggaaattgaaccaccagcgcctgccctacagccagacgggaggaggtttccaggccattgtccaagatgagctgggacatgggaatgccgtactccagggcaatggagtagacagtatcgccgggtttgactacatggatgagcatggcagtacctcagagcagggtgatgaaatccgcgttggcccaacccaccacgctgtcaaagcgcaccacataccagttttgccactggttgaggacggtgagccgcgccccatcataggccctggccaggacgggagaagaggtgtccggcttatcccggatattgagatagccccaggagacatccactacggcaggacgcgaggggcgaggctccaggaagggcacgccgaagtattcggtcagggagagcacgatgttgcgggccacggcctccagattgtttttaatccacgcagcatcgtccgcgttgtcgtggtagcccagctcaagaaagacggagggagcgcggacacggcgtacctctccgacggaggtagtgggctccgcccgtacctggttgggcagtggatagagggttttcagcccgtccgccaccaatgtggccgcccgctgcccctggacagagccgggatagtagaacaccagaattccacgggcctggccgtactgcccctccggggcggcattggagtggagggccaggtgcaggtcgtagttgccagcgttagaggcacggatggacgaggcggcggtcatgtcgggggtattgcgggagtatcggataccggatgcggtgagatagggctccatggcgtcggccaggcggttcatccactcctcttcggtgcccccgttgacatacaggttgttctcctgggtggagggggagagatagatgatgggcatagggatacctcctttttgctccatcctatgcacggagacgccgtagggtcattgcggagataaaagcagggcccgccgtgttggcacggcgggccctgcttattcccatcggctcgattcagttgagccgggcatccaggatatccagctcctccgagagctgacggggcagcttgtcgccgaacttctggtagaactcccggatgcccttgacctcgtcccgccagagggcggtgtccacgcccagcaggcccctgagagtgtccggctccacgccggagtcctctaggtcgatgtcctccggccggggctcccagccgatgggggtctccaccgcctcggcctcaccgaagcagcgcttcaagatccactccagcacccgcaggttgtccccgaagccgggccagaggaacttcccgtcctcgtcggtgcggaaccagttgacgttgaagatcttgggggccttgccgcccagcttctcccccatgtccagccagtgctgccagtagtcgcccatgtgatagccgcagaaggggagcatggccatggggtcccggcgtaccacacccaccgcgccggcagcggcggcggtggtttccgaggccatgatggagcccacaaataccccgtgggtccagtcccgggactgatagaccaggggggcggtcctggcccggcggccgccgaagacgatggcggagatgggcacgccccggggactctcaaactcgggggagatgcaggggcagtttttggccggcgcggtgaagcgtgagttggggtgcgcccccttctccgaagaggtcttgccgttccaggggcggccttgccagtccaccgcgtgctccggaggattcttgtccagaccctcccaccacacggtgttgtcgtccaggttgtgaaccacattggtgaagatggtgccctgtcgggtggtggccagtgcgttggggttagatttgacattggtgccgggggccacgccgaagaagccgtactccgggttcatggcccacagccggccgtcctcgccgatgcgcagccaggcgatgtcgtcccccacgcaccagaccttccagcccgccttccggtagtgctccggggggatgagcatggccaagttggtcttgccgcaggcggaggggaaggcggcggcaaggtagcgcacctcgccctgggggttctccacgcccaaaatcagcatgtgctcggccatccagccctgctgccggcccaggtaggaggcgatgcgcagggcgaagcacttcttgcccaatagcacgttgccgccgtagccggagttgacgctcatgatggtgttgtcctcggggaagtggacgatgtagcggttctcggggtcaatgtccgccttggcgtggagccccttgacaaagtcgtctcccatcacgtcggccacggcccggcctacccgggtcatgatggccatgttgagcaccacatagatggagtcggtcagctcgatgccgtacttggcgaagggggagcccaccacgcccatggaataggggatcacatacatggtgcggcccttcatggcgccggtgtaaagctttttcagcttggcgtacatctcctgggggtccatccagtggttggtggggccggcgtcctcctgctttttgcagcagatgaaggtgcggtcctccacccgggccacgtcgtttaccgctgtgcggtggaggtagcagcctgggagcttctcctcattcagcctctcaatctccccgctggcgcaggcctgcttccgcagctcctccagctgggcctcgctgccgtcaatccaaacgagctggtccggctgggtcatggccgccatctcgtcaatccatgccagtaccgcgcggttgcttgtcaatgccatgaaagtgtcccccttttgtgatgtaatgcagaaaattctgttagctgtattgtaaaagaaacgggcggtttttgcaagtccttttcgtcggatttgcaaaaactgcccggtatactggctcagagacggttctggagggcggaggccagagtggcaaattcaggaatacccagccgctcgccccggatatcggcgggcagcccggcggcctcgatggccccgcgcagcgcgtctttggacaggcggctgccgaaggcggaggagaggccgttgaggagcgtcttgcgccgctgggcgaaggaggctctgaccacctggaagaagaagctgtcgtccaccaggttctgaggaggggcggagcgggggacgagccggatcaccgccgaagtgaccttgggggcggggaggaagcactccggccccacctcaaagagcagttccggctgggtgtgatactggcagaacacagagaacgccccataatcgctggaaccgggggcggcgcagatgcgcagggccacctcccgctgaatcatcaccgtgatggaggcgaagcacccggcctcaatgagggcggtgagtaccggtgtggtgatgttataggggaggttggcacaggcaatcgctgtaaggccagaaaacttgtcagacacaagagcggccagatccagcttcatggcgtcccccggcaccacctcggcgttggggtagggggccagcgtctcggccagaatgggatagagggtgcggtccagctcaatggccgctaccttggccgcccgccgggccagctgcaccgtcaaagggccgatgccagggccgatctccagcacgccggtatccgggcctgcgccggaggcctccgcgatgtccctgggtacccatccctcaatgagaaagttctggcccatgcttttggagaagcggaagccgtggcggcccagcagggcgcggatgtccttttcattgcataaatccattgggaatcacctcgtgtcccagggagcacatcacctggaattcctgttgaaaatctgtaatggctttttcctttacgcggaaaagggcgtcaaaagcgtccagcgcggccgcgtcgggggcataggcaaagccctcgcggaagcgcccggcggcgtttgccagggagccgggggccagctccactgcctggaggccgggcaggtactggccgttctccagggagatgccccagcgctctccgcaccagaagccgtagcggccgtagtgccggggatcgcccagaatcaccacggcctgttcccccagggcctgggcctgccgcagggcatggcacaccagggcgcgggccagtccttttccctgaaaggaggggaggacggccaggggaccgaaggtgacggtgtccagatacccgcctgcctccagctcgatggagctggaggcgcaggcgatctgcccggccaggacgccgtccgcctcgcatacgaaggtcagctccgggcggaaggcgggggactgacggagcagatggagatagtagtgctcgtcgcagccgggcttgtagacgttccaaaaggcctcccgcaccagcgtttccgcggcgcggcggtcggcgggggcctcgtggcgaagggtcagtgacatagtgaatacctcaagcagcagattttgttcgtataccaggaagcatgagcggaatggtataattgtgatatgttttccggctgccccgcaaggggcggcaaaacggctgaaatgcaagcgtaagagccgctttcccgctattataccataaaaaacagggacaggctatgcctgtccctgttttttcagcgggcgcttcaacatcagcagggtcttgatgtcttccacaacctccggggagtccacctccagggacagccaccgcccggagcccatgggcttgaccgcctgccagcaggcctgggtatactccgagagggtggggagaagggcctccgcctgggccggggccaccaccaggcaggcgaaggcgccggaggcggggtagagggtacacagggccttgccgccggagcggtacttgacgttccagccccgccccatggaacagctgctgtagctgtaaatacgggaaagggaataggcttcacagatccagcggttcaatggttcccacagcggatgggatacataggcggagagctgctccgctgtgggctcctccggcccgggatagatggcgttccagtccattagttgcgccaccggagcagactggggaagaactgggccatctgcgcccgggcctgctcgggggtcagctcggggttggcccgcaccatcatgggagtgcagaagtcgatcatctcctccatggtcatctctccggtaaaggctccctcctgataacagtatttgcagtagtgctcgctgggcgtgccgccccgctccgtgccgcggagggccggggcgtcgatgggcatgccgcaggattgacaaaaggtgtgattcatgtgagattcctcctgtgattgagatggctccatcctatcacagttatcctgacaccccatgtcatggtttccgtgatgcgccgccatttttcccgccagcagcgccagccgtttccgcaggcgctccggttccaatacctccacccccaggccgaaggagagcagatagccatagagccacggatcctccgggaagcttaccgacaccacaaggctgccgtccgccccgcgggtgacgcagccctcgtcgaattcgtcgtagacccggtaggcaagggcgggggagaagcgcaggcggacaggcacgcagaagccctccggcggctctccagcctcgatgggcgggggagagagggggcgctgaaagggggcgcccggctccggctccagcatccgggtgagcttgaaggtgcggtaggccgcccgctccaggcagaatccctggaggtaccagtcccggcccttgaagaccagccgggcggggaggacgctgcggcgggtggtctggccggaggcgcccacataggtgaaggacaggacgcggcgggacagaatggcctccttgagctggacgaatttggcgttgtcggccccggcgctcccccatcgggacagctccacctgcagccagtccggttcccgacgccggaacagggcggacagcttggacagggtccccgccgtcccctgaccggcgtccccgggcaggctccgcagagcggtgagcagcagctgctgttcttcctcggtgaaagcggcccggtggagggtatagccctccagcagggacaccccgccgcccttgcccggcgcgctgtataccggcaccccggccgccgacagcgcgtcgatgtcccggtagatggtgcgcaccgatacctcgaagtgctccgccagctgcggcgcggtcatgcggccccgctccagcaggagacagagcagctcaaacaatctgccctgggacatcagcggtttctcagccgggccatcaccagcgtgtccacgtaggcccccgctttcacggcggcctcccgcttgcacccctccgtctcaaagcccaagcgctcgtacaggcggatggcgcccccgttgtcggcgtagacctccagctccacccggcggagcatcagccaattgtccgccagatccaagaccgcctccaacagggcggtgccgatgccctgtccctggcagtcggtgcgcaccatgatgcccaggccgccggcgtgccgccgccgggggttggactccacggtcagcatgaccaggccgagcacggtatggtccggcgatacggccagcagaacatgccggccctgtcccggctggcggagaagctcctccatacggcgggggcggtcggaggggagggaggccgcctgttcaaatacgccgggcatccgccgcagtgcggtgatctccgcggcgtcttccggcccggcggggcggatggtgtaggtcatggcgcggtcacccccggacgaatgcgggccatcttgtactcatccacatagcggccgttccgcaccgtggtcatgcgcagcaggccttccttctcaaagcccagcttctcatagaggcggatggcctgctcgttgtcggcaaagacctccagctccacccgcaccagcatgagccagtggtccgccagatccagcagtgtttccatcagggtggtgcccacaccccggccctggtagtccgcatgcacaaagaggcccaccgcgcccacatggcgcatccggggattggagcagaccgtgaggccggcgcagccgattaccgtgccgtcgtccagaacggccacaaagttatggtcgtcagggcccagcccggcgatgaacgcctcgctgtcggcggtgcggtaggaggggaggccgagcgtattctcaaatacgcccggcatgcggcgcagagctgcggccccctccgcgtcctccggcccgatggggcggatggtgtagttcataaaagcacctcccaaaactatttttgccatgatagcacaggcaggggcaaaaaacaaccgcccggaggaaatttcctccgggcggttgcggaatggcttgatcgaaatcaataggccacgacgatgccgccgtcgttggcatagacggtgctgatgccgccggtatcgctgatgaggatctccccgaaacggcactgcttcatgaccagctccttgacgtggaaggcccgctccaggcagttgcagtggacgatggacagccggcgcccctcgtgcttgggatccgccgccatcagggacaccatcttggacagggcctgcttgatggacatggcctggccctttttgcagatctcaccctcgggggtggcgcccatgagcagcttgatgtgcagggtgctggtaaccagggactgcaccctggtgagccggccgtttttccgcaggttgtccagggtttccagcacaaagtaggtctccatctcattgatgtagcgggagacctggctgaccaccgtggtgaagtccatgcccgactgggccagctcctggattttcagggccaccagaacctcgcccgccgaggcggagcaggagttgaagatgtgcacattggagttggggtggtcctccagccagaggctccgcgcctgggccgccgcgttgtgggagccggagagcagggcggaaagagtgaccacatacaggtcgtcggcgccgcagtcaaacgcctccagatactggatgggggaagggcaggaggactggggagccgtggcactctccttcatccgccagagcagggcaccctggtcaaaggaggcatcgtctaccacgatatgctcacccacccggatggtcagcgggacgctgacaaagcagtcctcccggagctgggcgggcgttaaatcgcagcaactgtcgacaatgatcttaaaactcatagctggaaccctcttatataataatgaaaattagattactagtgtgcagtcattgtagcacgggcgggcggaaaagtaaaggggaaacctgtaaacaaatgattgcgttagaattggggggcttcctcgtccagctcccgcagtagcttttgatcctccttggaggaaagatccagtctggcgtagagatccgggcggcgctggcgggtgcggaggatggactgcttgcgccgccaacgggcgatgttcttgtgatcgccggagcggagaatgggggggaccttccggccgtgccactcctcggggcgggagtactgggggtactccagcaggccgttccagtggctctcctcctcgaagcactccgggtcggagagcaccccgggcaccagccgggccaccgcgtcggccaccaccatggcggccagctcgccgccggtgagcacgaagtcgccgatggagatctcctcgtccacacactcctcaatgaaccgctcgtcgatgccctcatagtgcccgcacaccagaatcaggtggtcgtaatcgtcccgcaggcggcgggcgtcggcctccacgaaggttttgccggcgggggacatgtagatggtatgtcccgggccgaaggtgtccacaatgtgcttccagcactggtagagggggtcggcctgcatgaccgcgccgtggccgccgccgtagggatagtcgtccacctgcttctgcttgttgagggtgtaatcccggatctggtgggcctcgatgcgaatgatgtcccgctcctgggcgcggcccaggatggactcgttcatcatatcgcccacggtcagatcaaagagggtcataatatcgatcctatacatcggtacgcattccctcgatcagacgaaccttgatatagccgccctccacattggtctccgccaggaactcgtccacggcggggatcatgtattcatgctcgcccttcaccacgtagacctcgtgggcgggcggggtgagcacgtcggccacaacccccagcttctccccgctgccggcgtccaggacctccaggccgagcagatcggcgataaagtgccgcccctcgggcagcaccacgccggagcgatcgatggagacgatcttgcccttgagggccatggcggcattcacgtcggcgacgccctccagcgcggcgaggacattgcccttgtgtacccgggcggcgcgcacccttacgggcgttccgtccagatagagggtgccgaactggagcagaaactcggggctgtcgcaccaggggacgattttgacctcgccctggatgccgtgggtattcacgatctgcccggcctccagaaactgatttttcatttgaaatacctcccgcaggcggcgcgtccaggaggccgcgccctacattgaaaaagcggcggggctcgctaccccgccgctttttagtcgacgatttcgacggaaaccttggtgccctggcgctgggccacggagcgcatcagcgtgcggatctccttggcgatgcggccctggcggccgatcaccttgcccatgtcctcgggggccacccgaagctccagaacggtctcactctcgcccttgtgctcggtgaccgacaccgcgtcggggtgatccaccaggttccgggcgatataggtcagcaattccttcatgccagccgtgacctccattagatggcgccagcttttttcagcagagccttcacggtctcagtgggctgggcgccagtcttgatccaagcctgggcgcgctccgcgtccaccttgatctcggcgggctgggtcagaggattgtaagtgccgatctcctcgatgaaacggccgtcgcggggatagcgggagtccgccaccacgatgcggtagaagggagccttcttggcgcccatccggcgcagtctgatcttaaccattgtatcttcacctccatgtaattgttgcacatctatggaaacgcgccgcagcgcgcttaccaaccggtcagaaggggagtcccggcagcttgccgagctttcccatttttccaagtttgcccatgcgcttcatctgcttgccggagaactgcttggtcatctgctgcatcatatcgaactgcttgagcaggcggttgatgtccacgacctgagtgccggagccggcggcgatgcgctttttccggctgttgttcagcagggaggggttctcccgctccgccggggtcatggacaggataatggcctcggtgcgggccagggcgttctcgtccacgctggccccttccagtgccttggcgttcatgccggggagcatcccggcgatgtcggacagggaacccatgcccttgatctgaaccagctgatcgtaaaaatcagccagggtaaacttgttcttgcggagcttctgctccaactcggcggctttcttggcgtcaaaggtctgctgggccttctcgatgagggagagcacgtcgcccatgcccagaatacgggaggccatgcggtcggggtagaagagctccacctggtccagcttctcgcccacacccacaaatttgatgggcttgccggtgaccgccttgatagagagagccgcaccgccccgggcatcgccgtccagcttggtgagcatgacgccggtaatgtccagcgcctcgtcgaaggtctttgcggcattcaccgcatcctggccgatcatggcgtccacaatcagcaggatttcggtggggtcaatggcggccttcatcaccttgagctgctccatcagctcctcgtccacgtggagccggccggcggtgtcgatgaacacaatatcgttgccgtgcttcttggcgtgctcgatgcccgccctggcaatgtccaccgggtcaatctggcccatctggaacaccggaacgtccacctgctggcccaccacctctaactgggtgatggcggcggggcggaaggtgtcgcaggccaccaggaggggccgcttgccctgcttcttcataaagcccgccagcttggcgccgttggtggtcttgccggcgccgttgaggccgaccagcatcaccaccgtggggggcttgggggagatcgtcagcttggtgttctcgccacccatcagggcggtcagctcctcattgacgattttgacaatcatctgggcgggggtcaggctctccagcacgtcggagccgatggcccgctcggtgacggtggccacaaactgcttgaccaccttgaagttcacgtcggcctccagcagggccatgcggatctccttcatggcctccttcacgtcggcctcggagaggcggcccttgccgcgcagcttcttgaaggcggcggagagcttttcggtcagtccttcaaatgccatgggttactcctgtttcaactgggccagaacgcccttgagctgtccgcacagggactccagctcgtcgtcctgccaatgggcctcgttgcgttgggcgatggcgtccaccgccgtctccatctggccgaactgctcctgcattctgtggaagcggcggatgatgcccgtcttgtcctccagctcggtgaggatggcctcggcgcggacgatcacatcccggacgccctggcgggtgatgccgtagttctccgcgatctcggccagggagagatcctcattgtagtagaggtcgtagaactccttctggcggtcggtgagcatgtcgccgtagaaatcatagagcagggccatgcggtatgcctggtttttcatcgctgccgcctcctcccgtgtgccggttttctgtaaaggtggtaaagctacggagctttacaacagaagtgatgatactataaattggccggattgtcaagagaaagattgcgtcttttccggctctgcggcgtaccagagggggaggcccagcaaaaccgcgccgcccagcaggttgcccaaggtgacccacagcaggttccagcccatggaggcccagtccgcgccgccgttcagcagggcatggagtgcgaaataggccatgttggcgatggagtgctccagtccggtgaggacgaaggtggtgatggccagggtgatcaccagggccttggcggtctcgctctggaggcggaagccggcgaacacgccgatgcacaccagaaaattgcacagcacgccccggaggaggagcagataccagggggcggacagcttgcccgggacgatcagggccagataggcccccaacagctccccgctggagccggagccggccagcagcaggcagagcaccagaatgcccaggagattgcccaggtaggccagcgcccagacacggagggttccggccaggcggacccggccgtcgtagagggatacgctcatgaccaggatacagccggtgaacagctcaccacccagcaggacaatgagggtgagagcggcagagaaggccagggcccccagcagcttggccagagggagattggtgtcgtagaaccaggcggcgcagaggctggagagcagggcgcccacaaagataaatgcccccgccagggcggcccgggtcaggtagcggcccggcgcggtgccggagaagcggagcttctgcactccggcctgcgtgatctgttccacaacggttcgtgtcatggtgtggcctccttataaaatataggtaatttcattttaccggaggttgggggcgggagcaagctgccgcggcaccaatcttttttcgttttcctagtgtcaaaaccgtcaaaacgttgtataatatccgatgttgatactttggcagttcccataaggaaaggaatggtaaagctgtgattgaggtcacccggacacagcttctgcccggcgtccatctgacggcggtgcagacgcagaaattcaaatccagcgtgctggggatgcagttcctgctgcccctggcccgtgaacaggccgcgctccacgcgctgctgcccatggtgctccgccggggcaccgcggagcacccggatatggaatccctctccgccgttctggacgagctgtacggcggttccctggagcctacggtgcgcaaaaagggggagacccagtgcgtgggctttgtgggcagcttcttggacgacgcctatactctggacggttccgccgtgctggagccgtcggccgccctgctgggggagctggtgctccgcccgtacacccgggacgaggtattctgccccgactatacccgccaagagcgggagaacctggtcacccgtatccgcgcccaggtcaacgacaagcgccagtatgcccaggtgcgtgtggtggcggagatgtgcgccggagagcccttcggggtggacaagttgggggatgaggcgtccgcggcggccatcacaccccaaaagctgtgggactgctaccagcaggtgcttcgcactgccccgatagagttctactattgcggttccgcccccctggagcgggtgcgggcggcggttcaggccatcgtggacggcctgcccgcaggggagcgcgcgcccctcgcgcgccccgaaaaggggaacgctcccgcccagccccgccgggtggaggaggcgctggacgtgacccagggcaagctggccatggggttccgcacctgcattgacgcctgggacgaggattacccggccctgatgctgctcaatgcggtctacggcggaaccaccacctccaagctctttctcaacgtgcgggagaggctctccctgtgctactatgccagctccggcctgatgaagtacaaggacgtgatgctggtctcctccggcgtggagttctccaaggtgggccaggcgcaggacgagatccttgcccagcttcaggcctgcaaggacggcggctttacagacgacgagctggagtgggcccgccgctcggtggtgagcaccctgatgaccaccctggacgcccagagccgtctggaggattactggctgggtcaggcggccgccggcctcaccgaggcgcccgacgagctggcccagcgggtggagcgcaccacccgggcgcaggtacaggcggcggcccagaagctgacgctggacacggtctatttcctgaaaggcaaggagtgagcccatggtaagcaaagaatacccccgcatcggggagaaaatctatcacgcggagctgcccaacggcctgcacatctatgtggaccggcggcccgagtttcagaagagctacgccttttttgccaccaactacggcggcatggatatgaagttccggctggatggccagtggcgggacactccggcgggggtggcccacttcctggagcacaagatgttcgataccgaggacggcaacgccctccaggatctggcggccaacggggcttcccccaacgctttcaccagctcggccctcaccggctactattttgaaagcacggagaaattctgcgacaacctgaaaattctcctctccttcgtgtccattccctggtttacccaggagagcgtggacaaggagcaggggatcatcggccaggagatccgcatggtggaggacgatccggacaaccaggtgttttacggcctgatggagtgcctgtttgatcaccaccccatccgggtgcccatcgccggcacccaggagtccatctcccacatcaccgccgacaccctctacgcctgccacaaggcgttctacaccccctccaacatggtgctcactgtggcgggggacgtggagccggaagaggtggtgcgcattgcccgggaaatcctgccgaaggagccgggcgggcacattgagcgggattacggcggggaggaggacggcgcggcggccaagccggaaaaggagctgcgcatggaggtgtccacccccatcttccagcttggcttcaaggccgagcccgcccccgccggggaggagcacctgcgccgccagctcatgggcgagctggcctgcgaggcgctgctgggcaattccagccccctgtatgccaggctctacagcgagggcctcatcaacaagaactttggctacggctttgagctctatcccggctgtgccctgatggcggcgggcggcgagagctgcgatccccgtgcggtgcgggacgccgtgctggccgagggggcccgcatcgcccaggagggtgtggacgagggcctgttccgccggctgaaaaagggggtgtacggcgccaaggtgcggggcctcaactcctttgaaaacgtgtgcatcgaactggcccaggcccactttgccggtgtggagtacctgaccttccccgaggtgttcgacggtatctccaaagccgatgtggaggactgcatccgccgctgggtaacgccggagcggtgcggtctggccgtggtccggccgggggaggaggcatgatgggaaccgtctcctttcccggcctgggtctggaattccacctgaaccgggtggccttccacatcgggagctggccggtgtactggtatggcatcatcattgccgccggattcctgctggccgtcctgtactgctgccatgcggccaagcgcttcggcatcaagcaggacgacatcatcgacatgctcttttttgccgtgcccctgtccatcgtaggggcgcggctgtactacatcctcttttacctggacctctaccgccgggaggacggttccctggactttggagccatggtccgcatctgggacgggggccttgccatctacggcggcgtcatcatggcggttgtcgtcctgctggtgttctgcaaggtgcggcagatccgatttctggcctttgcagacctgggggtgttcggtatgctcatcggccagatgatcggccggtggggcaactttgtcaatattgaagcctacggcggccccacagagctgccctggcgcatgggcatctatgcctatgtggacggagtgcggcagtacatggaggtgcaccccaccttcctctatgagtctctgtggaatctactgggctttgcccttctggtgcagattgcacggcgctggcggaagtttgacggccagatgttcctgagctattttgcctggtacggcgtgggccggggctttatcgagggcctgcgcaccgacagcctgtacctgttcggcacctccatccgggtgtctcaactgttcggatttgtcaccgcggccgtcgccatcgtgctgctggtggtcaacctgggcttccgcaaccatgacccggccaagctgtgggtgaatcagatgaagcggcgggcccgccgggtggcgctggtgtatccggctggagtgcctgcggcggagaagtggctcaaggcccagaagaagagcctggagcaggagtttgccaagaccgaggagtatgcactgcctaagggaaccccggctgaggaggctgcggagttggtggcctccctcaaggcccgggaggatctcagcgaggtacgccagccaaaagcgggcagataaaaaataacagaggcgacggacatcctgtccgccgcctctgttatttataggtagcgtctgaccgagccgcagtagcgctcgtaggccgcgccgaaggtctggcggcaccagcgctcctcggcccggatgacggtgtgggcggtgagctgaaagacgaggagggcggccagaagcggtagcgactgcgtgaggaggacgcagcctagaaagacgaaaaaataggaaacatacatgggattgcgggagatgcggtagacacccttgtggcgcacgccgctctccgagggggccgcgaagccgatgacggagagcaggagaaggagcaggccgaatgcgtagagggccgctccgctccagaagaggggggcgggcgcagtatggaccgacgcgaagaaggggcccagcagcagggcggcgctggagagctgatagagccagtaggcaggcttttcgggcccgcggaacggggggaagtgggcggcccgccggagtgcgctgctgtccagcatggagagcactccgaagcgcaggcttagaaatggaatcagcagaacggccgccatgatatgtcctccctgtgtcatgataacccattatagcacggggcggcggggaggggaagaggaggaaagggcgggatacccatgggtatcccgccccttcctgttgtttgccgggctcagcccagcagcttgctctccagatcctggagcataatgtccagagcggtgatgccgccctcggcggtgtaccatacggcggggtgggccagatagacgatattgccgttcttgtaggcatcggttcccatgaccagctcgttctccatgatttcctgggcgagctgggcgccgtcagtttgaatagcggcgtcccggtccatgacgaagatgtagtcggggttcttctccacaacgaactcgaaggaggcctcgttgccgtgggtggaggtgtcgatgtcagcatccacgccgatgttctcaaagccgatctcccggccgatgatggagcagcggccgtcgttgcccagcacgttgaagccgccgctggtgcacatacccacaacggcggtcttgtccgcggcgaagtcggccagggtctggatgcgggcgtcaaagccggccatcagctcgtccaccttgtcttccagaccaaacatggaggcgatggtagcggcgttttggcggacgctctccaccacgcccagctcgctgtcggtggcgaggtagaccacgggggcgatctcgctcagggcgtcgtaggacttggccaggcggccgccgatgaagatcacatcgggctgggcggccatgaccgcctccagatcggcggttttgatggtgcccagattggccacgttctcatcggtcacatagctctggaggtagtccagggaggtgtcggcggagccgacaacgcggcccccggccacgcccagggcatccagaatatccagggaggccatgtccagaatggcgatgcgctgaggatcgtaggggacctccagctccacggcctccttgtcggcgttcagggaggtgatggtgacggtttcgggggcggagggagcctcggtgccggccgcagggctctccacggcgggggaggggctgccggtggaccgggtgtcgtctccaccggtggagcaggcggtcaggcccagtgcgagggccagggcgagtgcaagagagattccttttttcatgtgtgttctccatttctaagcgaatgttcgcggttgtttgagcggcagggtcaatagtagatggacagggggcgaccctcgatctccatgatttcaaagtccacctgatagatctgcgacagcgtttccttggtcatcacctcctctacggttccgaatttggcgatccttccgtccttgaacgcgcagatgtagtcggaatagaaggccgcgtagttgatctcatggaggaccagaatcaccgtctttcccagctcatcgcagaggcggcggacgattttcatcatgttggtggcgtgatagatgtccaggttgttggtgggctcgtccagaaggataaactcggtgtcctgggcgatgaccatggcgatataggcccgctggcgctggccgccggagagctcgtcaatgaaccggtcctgaaagggctccagctccatgtaggcgatggccttgtcgatgatgcgctgatcctcctcgttcagatggctgcctgagtaggggaagcggccgaaggtcaccagctcccgaaccgtgagcttcatctgtatgttgttgctctgggtgaggatggccagccgcttggccagctccttgctcttccacttgccgatgtcccggccgtcgaagtccaccaggccgctgtcccgggcgatcaggcgggagatgatgttgagcaccgtggacttgcccgcgccgttggggccgatcatggagatgaccttgcctttcgggatttcaaagctgacggagtccaccaccgtcttgccgtcgtactgtttggtcagatccttgacacgcatgggttacaccctcctgttggacaaaagaagatagagaaagtagacgccgccgcccacggtgatgaacacgctgatgggcaccgcgtagtggtagatacgctccaccacaagctgtcccgccaccagcaccaccatgcccaccagggcggagcccagaatcaaataggtgtggcggtaggtcttgaagagctgacgggcgatgttggcgataatcaggccgaggaaagagatggggcccaccatggcagtggccaccgcgatgcacagggtgacgcccagcagcaggcggcggatgctccggtcgtagtccactcccagattgatggcctggtgcttgcccagggtgagcacatccagcagggccagatcccgccgcaggacgaagatcagccccgccagcagcaccagggcgaagacgatgatctcggagttgatgttttcaaagtccgccaccagggtggagagcaggctgtcgtactcattggggtccatcacccgggtcagcgtggtctggatgctggagaaaaaggaggagagcacggtgccgatgagcaggacatagagtacattgtggttcgttttttgaaagagatagctgtagataatggtggccacaatgcccatcaggatcacatccgccgcgaaggacaggttcgcgctgcgggccagaaggctgcccgagccggcgaaaaagaccaccgccgtgtgaatcagggtgtagagggagttcatacccagcaggcagggggtgacgatggtattgttgatgatggattggaacacgatggaggcgccgccgatggcaaaggcggtgatgagcatgactaccagcttgggggtgcggattttcatggagtagagcatcaactgctggctgccgaagttgaccgccacaaccatgtagcacaccgcggccagcagaaccagcagggccagcagagtcaccttgcggacgtttgcccggtaggaggcggagggaagggctgtgcttgtccggttcatgcggcgtcacctccatccagatgggccgccggggcgcagccgcagccggcgccgcctcccgtgagacggatcgccttgcggccgtggcggagccggtagagcagcagcaccacgaagataaggctgcccagtatgcccacaatcagctcgatggggagctcgtaaggggcgatgaccacccggccgatcatgtcgcaccccagcacgaagacggcgccgaacagggccgtgtccatcagcgtgccgcggatcttgtcccccttgaacatggccaccacattggggacgatcaggccgatgtaggagatggagcccacgaccacaaccacgctggcggtgatcatcgcggcgatggtcagcccgaggaacagcaccaagttgtagggcacgcccaggttcttggagaagtccttccccataccgacaatattgaagtggttggcaaacagaaaggccagggtgaccagcggtacgatcaggtagaccagctcataccggccgcggagcaccatggagaagtggcccacggtccaggtggacagggcctgagtcatctcatactggtaggccagatagttggtgaggccgccgatgacattgccgaacatgatgcccaccaggggaaccatgaccacgtccttgaactggatgcgctgaatgaaccagacaaaggtccaggtacccagaacggcaaagacgaaggagaaaagcgcccgtccccacagagtggagtttggcaggaacaggagggccagaagaatgccgaactgggccgaggagatggtggctccggtggtgggagagacgaatttgttcatgcagagctgctgcatgatcagaccggccacactcataccgaccccggtacacaggatcgccagcaggcggggcagacgcgagatcagaaaaatctccagttgttcgagctctcccgacagcagcccggacaggtttatatcgatcacgccgagaaacagtgaccagatcgacagcaccagaagggccagtgccaagagcagggtggaaagatgtcgtttgatgggaggtcctcctctcaaggttgtaattagctataactaacttttgggcaaaaaaagacagcgcaccttgtgagcaaactggacttacatgccgcatcacattgcacgtcgctcgggactcagtaaagtggttagcaataacaaactgagttcgtccatagggtaccatatccggggagaactgtgcaagcggtgattccgacaaaattatgaccgccaatctatggaaaatatacaaaatagataggaatagtgaatataaatagaaggggcataaacggggacaggcgttcataggatgtgccaagtacaaaagaaggacgtgagggtatgtcggaagaacgaaatgcagtccggttccgccaggcggcggctctgctgccgccccatctcaggcggccggtggaacggctggatgggacaagccaggcccgggtggaggagctccgcctgcgggcggggcgtccactgactctggtctgcccggagggtgagcggacggttcctggtgcggaggcgccggtgcgttccatggatctgagcctggtgctggagattgccactcaggcctccgcccatacggcgctggaacgggtgcgcaacggcttttttaccgtacgcggcgggcaccgcatcggcatctgtggaagcggcgtggtgcgggatggggaggtgcgaaatctgcggcagctctcctcgctggccatccgggtggcccgggaggtgccggggctctccgcggcggtcctggacaggctgtggagtgggggcgtgctccagagcacactgctcctctcgccaccgggaggcggaaagaccaccctgctgcgggatctgatccgtgccgtctccgacggggagggcggccccgccctccgtgtgggggtggcggacgagcggggtgagctggccgccatgtatcagggggagccgcagttctccatcgggcggcagaccgacgtgctggacggctgccccaaggggccggccctgctgatgctcctgcggggaatgaacccccaagtgctggcggcggatgagatcaccgcgccggaggacgctgcggcgctggagatggcggccaattgcggcgtgtcgctgctgtgcaccgcccatgcggggagtctggaggagctgaaggcccgtcccctgtaccgccgcctgctggacgaggggctgttccggcggctggtgatcatcgagcgggcggggagggaacggcgctaccaggtggtggagctatgctgaagctgatcggggcgctgctgctggccggcggggcgggggcgctgggctgctccgccgccgcccagctctcccgccgggtggcggtgcttcgggctctgctgggggcactggaggggatggagcgggagattgccttccgcctgacgcccatgccggagctgctggagcgcgccgcggcggagagccctccgccggtgtgcacgctgtttgcccgctgccggaccctgctggacgagctgggagagcggtccatggcggagctgtggcgggaggccctggagcaggtgcccctggggctggacggcccggggcggctggccctggaggagctgggggaggtgctgggccgctatgacggggacgggcagcgggaggccctcgcccacacccgtgcggagctgtcccgggcgctggagcaggcccgggaggcccgggaaaaacaagggaggatgtaccaggtgctcggtatcacggccggggcattcctggttatcctgctgctgtgagggagcgtgcgatatggatgtggatttgattttcaagattgcggccattgggattctggtctcggtgctcaatcaggtgctctcccgctcggggcgggatgaacaggccaccatgaccaccctggccgggctggtagtggtgctaatgatggtggtgcagcagatcagcggcctgtttgaactggttaaaaacctgttcgggctgtgaaccatggaggatattctgaagattgccgccgccgccgtagccgccgctgtgtgcgccgtggtggtgaagcagcgggcgcaggaggtggggctggttctctctctggccgccggagcgctggttctgaccatggccctgggggcggtggagagcgtgcgcgccctgatggacgagctgggcgaggccgccggcctgtcgccggcggtgctggctccggtgctcaagaccgtgggtattgcaatcctgacccacatttccgccgaggtgtgccgggacgcgaaggagagcggcatcgcggccttcgtggagaccgcgggggccgccgtggccctgtgcgtggcccttccgctgctgcgggcggtgctggacactgtgacgggactgctgtaaaagacgaaggggatacgaatgagacgaagaatactgatgtgcctggcggtcctgcttctgctgtcgggcatgggggcggcctcggccagcgatgtgctggccgcccagtcggaggcgctggatctggatgcgctccaggacgcggcggggggctatctgcccgacggagcgctggaggcgggcatcagtctggatgaagggctccaaaccattctggataccggcagcggacagatctctggtgtggtgcgcaaggctgtgcgcagcggtgtgctgctgctgacggtggtgctgctgtgcggcctggccgaggggctgtatggcggcatgggggtgagtcagaccaccgatgtagtggccattgtgggcgcactggccatcactgcggtggcggtggcggacgccaactccctcatcggaatgggacgggaggcgctggaacagatggagaccttttcaaagatactcctgcccacgattacggcggcggccgccgccgcaggctctcccagtggggcagtggcccgccaactggccaccatgctcttttccgacatgctgattaccctcatcaaccgcctgctgctgcccctggtctatacctacatagccgcctgtgtggcctatgcggcggtgggaaacgaggggctcaagcgcatcgcaggcaccctgaagtgggtggtgaccagtgtactaaccgtggtcctgctggtttttgtgggttatctgaccgtcagcggtgtgattgcgggctctaccgacgcggtaaccgtcaaggcggccaaatttaccatgtccagcctggttccggtggtgggcggtatcctgtccgacgcggcggaaaccgtattggccggggccggaatactgaaaaacgcggtgggggtgttcggcatgcttgcggtgctgtgcatgtgcgtggcacccttcctccagctcggtatccactacctgacgtataaagtgacctccgccctcagcgctaccgtttccagcggccgggtggcggggctcattgaccagatcggcggcgccttcgggctggtacttgggatgaccggagccagcgccctgctgctgctcatctccatggtttccgccattacggcggtggtgaggtaggggctatgctggaactgattcgacattggctggttgggatcacctgtgcggctatgctcgtggctctggccgagagcctgattccggcggggagtatcaggcgcattgcccgcctgaccggggggctggtgctgctggcggctatcctgaaccccctgctaaagctggataccacggcgctgacccgggcactgacggagtacaagctggagctgagcgcatacagcgcggatctggaggaggagaacgaaatcttgatgaaggacatcatagaagaacagtccggcgcatatattcaggacaaggcggccgccctgggcatcgactgccaagttacggtggaggcggacggggaggaagagtggcctattccacagtcggttaccgtcatgggcagcctgacggcagagcagcaggaggcgctggagcggaccattgaggaagacttcgccatcccggcggagcggcagcggtacgaaagcggggacgagggatgaaaacagagggcttcggggtatggggcagcaagctgcgcagcctgtttgaccggtacaaatttgtacttgtggtgattctggccggagtagtgcttttgctgctgccttccttcggcggggagaagcgcgacggcggggcggttgaaagcagtcaggaatccggttccgaccctttccaggtggaggagctggagcggaagctggaacaggccctggcccagatcgacggcgttggggaggtgcgggtggtgctgaccctacagagcggcccgcgccggattctggcccaggactcccagagcacagtagatgaggggaggacggaggcggaggtaaccaatgtagtgatttcagccggctccggtgtagagggaacggtgacgttacagcagctttcgccccaattccagggggctcttgtggtatgctcgggaggcggagagccgacggtccagcttcgtctggtggaggcggtttccgcgttaacgggacttggcgcggacaagatatcagtttgtaaaggaaagtgaggaagcaaagatgaaagtgtggaaacgaaatgccgtggtggccgcgatcgtgctctttgtctgtgtggccgtctatctgaactggtcgtatcagagtggagagacggcggatgcgggcaagacactgggtgaggcggccctggtgaacggccagaccagcgacccgctggtgggaggaacggcagcgagccccgacccggcatcctccgcctcgcccgaggcagggaccaccggcggcgggagctatttcgactcggcccgtctgaaccggcagcaggcgcgggacagcgccctggcgatcctccaggattccatcgccaatgagagcgccgatgagaccatgaaggaggccaacggcgaggcaatccagaccctggccagttataccgtctccgaggcgcagattgagaacctggtgacggccaagggctacaccgactgcgtggcctttatcggcgatgagagcgtcagcgtggtagtatcggcccgggagggcggcctcaccgatgcggacgtggcaaaaatcactgaaattgtcaccgacgagaccgggatggaggccagccaggtgaagattatcgaggccgagggataggtggttctggagcgcgcggagaaaaaccagttgtaatttctctattttgtggtacaatgaaaacgaccgagtagagaaaaggagcgtgaccggaatggcggatggaaaggaatatgtctcccgccctgacgagcttgggaacatccatatttctgaggaggttctggcggtgatcgccgctgccgctgccatggaggtggagggggttggaagcctcgccgccaatctgggcagtgacatcgccgaactgctgggcggaaagaagaacctgtccaagggcattcatatcgcagtggaggaggagagcatccgcgtggatgtctctttactcatcaagtatggctataccattattgatgtggcgaaggaggtccaaaacgcggtatacagtgccatcgagaacaccagcggcctgacggtggagtgtgtcaacgtccatgtgctgggcgttgccttcgaccgggatggaaagaaggcccagtaaaggaaaaagcaccagacgcgtgccgggttccggcacgcgtctgtgtacgtttttcctggaaaacccggggtgcgtagggcgcgccctgggctttttgacgttgcgtggaatttgctcttttctttttatgcatggttgttgtataatacaatcatctatgacaaaaagccgcgggattatcccgccatggaggaaccggaatgaccagaactgctgcccgagagattgccgtccactttgcctttgagctgggctttaccaaccagacggcagaggaactgctggcggaggcgctgaaccgcaagacctttgagcagattggggaggaggagccgctctatgcggagttccccaatgagaagcagcgggagtatatctccaagctggtgaagggcgtgtatgaacacagccccgagctggatgaatacatctcgaagtatgccatcggctggaaatactcccgtctgaaccgggtggccatcgcgatcatgcgggtggccatgtatgagatcctgtatatgcaggatatccccaacgccgccgccatcaatgaggcggtggagatgaccaagcactatgaggagccggaggtcgtgtcctttgtcaacggcatcctgggctccttcgtccgcaacgagtgcccgccggagccggtgggcctcaagccagcggcggagcggccgcaggacgaggcgtaatatgcgcgcactgggcatcgacacaagcaactacaccacctcggcggcggtatttgacggcagcggcggctataacgccggccggctgctggaggtgcgccccggcgagctgggtctgcggcagagcgacgcgctgttccagcacatcaaacacctgcccgggcgctttgccgagctgcaggcggagggctggctgaccggcctgtccgccgtgggggccagtacccggccgagggcggtggagggctcctatatgccctgctttctggcgggagaggggcaggggaggacgctggcggatgcgttgggcgtgccgttttacgccgtatcccaccagcagggccacattgccgccgccgcctggtcagcgggacggctggagctgctggaccggcccatgctggcctggcacctgtccggcggcaccacggagctgctctatgtggagccggacggggtcaatgtcagggcgcaatgcgtgggcggcaccagcgacatctcagccggacagctcatcgaccgcaccggcgtgctcctgggcctgcccttcccggcgggaaaggcgctggacgtcctggcgtcggagagcgacttgatacggggatttcctgtaaagctgaacgacctgacattctccctgtccgggatggaaaataaggtaaaggcgctggcagagcagggaaagccgccggcggagatcgcccgctttaccctggagacggtggcgtcggcagtacgtcgggccaccgacgcggcccggaaacgctggcccggcctgccggtgctgtgctccggcggcgtggcctccaaccgcctgctgcgtactgttatgagcgacgcagcctttgccgcgccccagtactccaccgacaacgccatgggggcggccattctggcttggcgcagtctgagacaggaggccgaggcatgaagaacgccccaatttacagcgtaacccaggtcaaccaatatatcaaaggcctgctggaccgcgacggtgctctggccggcctttttgtgcggggagagctctccaactacaaggcctatccctccggacaccactacttctccctgaaggacgcggaaggggccatccgctgtgtcatgttccggcgggaggccatgggcctgcggttccgtccggaaaacggcatgaaggtggtcgcctttggccgggtaacggtctttccaagggacgggcagtatcagctctactgtagtgagctgacccccgacggcgtgggggacctccatgtggcctttgaacaactcaagcagaagctctaccaagaggggctgttcgacccggcccacaagaagcccatcccgcgctatccccgaaaaatcgccctcattacctccccggcgggggcggcggtgcgggatatgctccgcatactgggggctcgctggccgctggcggaggtgctggtgctgccggtgcgggtacagggggcggaggcccctggggagctttgcgcggccatcgcctgggccaacctgcatagggtggccgacctgctgattactggacggggcggcggctccatggaggatctctgggccttcaacgacgaggacgtagcccgtaccatctatgcctctgagattccggtcatctccgccgtgggccatgagcccgacgtgaccattgcggattttgtggcggatctccgggcggccaccccctccaacgccgcggagctggcggtgccggatcagaacgagtgctatggctggctggagcagatggaaggccgcttgactggggccatgggccgccgactggagcgggcccgccgtgaactggagcaggccgggcgctgccgggcgctgcaggaccccatgaactatatcaacgaccggcggatgctgctggactaccagcgggaccggctggtccacggactgaccggggccatgggccgggagcgggagcgctttgcccgactggcggcggcgctggacgccttgagtccccttaaggtactgggccggggctatgccattccccagcggtcagacggggcggtacttcgctccgcgaaggaggccatgccgggcgagacgttgcgcctgcgcatggcggatggcaaggtttcctgtaaagtgattgaacctgccggatagggaaaggacgaaatagatggcggaaaagaaagtaacctttgaacaggccatggcgcggctggaggagattgtaaaacagttggaacagggtgacgctcctctggaggatgcgctggccctctttgaagaagggaccagactgatgaagaaatgcaccacacagttggacaaggcagagcagaaggtctccaagctcctggccgggccggatggaaaaccggtagaggagctgtttgagggggagggatagccatggcggagctggaacggctggaggagcaccgggcccggatcgaggactggctgcacgcctgtttccaggactgtgcgccccgtgggaacctgtatgacgccatgcgctacagccttctggccggcggaaagcgcctccggcccgtgctgttgctggaggcctgccgcctgtgcggcggagcggtggaggatgccctgccctttgccggggcgattgagatggttcacacctactccctgatccacgacgacctgccctgcatggacgatgacgatctgcggcggggccgccctaccaaccacaaggtgtttggagaagccaacgcggttttggccggcgatggccttctgacggcggcctttgagaccatgctggccccgggacagaagcttccgccggagcgtgtattggcggcggcgggcatcctggcccgggccgccggcggccgcggcatggtgggcggacaggtgctggatatggccggcgagggccgcgcccttggcctgaccgaggtggaggagcttcagcgcctcaagaccggtgcgctgatcagagcggctgtggagatgggctgcgccgtggccggcggagcggaggaacagcgggaggccctgtgccgctatgccgactgcctggggctggccttccagattcaggacgatatcctggacgtagtgggtgatgaggccaccttgggcaagcccatcggttcagacgtcaggagcgacaagaccacctttgtggcgctcaaaggtctggcggactgccgtatcctggtggcggagttgaccgaccgggcggtggaggccctggcgcccttcggttcggaggcggagagcctccgcggtctggcgcagtcgctggccggccgcgagaaatgagaggacttatatgagcaatgtcgtagattttctgaccggaaatctgattttaaacctgtccatcctggcctgggcgatcgcccaggtgctcaagtttgtcatcacgctgatttcccagggaaagctggactggcgccatattctctccagcgggggaatgccaagctcccactctgcctttgtttgcgcctgcgcggcggccatgggctatatgtacggctgggcgtcgcccgtattcaccatttctgccgtggtcgccattgtggtgatgtacgacgcggccaatgtccgcaaggcggcgggggagcaggccaagatcctgaactatatcatggaacactggactgagatgaagcccgccattttcggtaaggagctcaaggagttcctggggcacacgccgttccaggtgctgatgggcggcctattgggtatcagtgtaggattgctgggcgcttggctgtggacgtaattttgaattccgggcctctgtgggccgggaggtggaaccattctgaattttgatttgaatcacgtaccgaatcaactgggagaactgagtgacggtgaggctgtggagctgtgccggctgctgcgggcgcgcctgatcgacacggtttcccgcaccggcggccacctggcctccagcctgggagcggtggagttgattgtcgccatccaccgggtgttcgacaccggacgggaccgtttggtgttcgatgtgggacaccagtgctacgcccacaaaattctcaccggccgcaatcaggcgatggaaacgctgcgtaccttcggcggaattgctggcttccccaaaccggtggagagtgaaagcgacgcctttgtcgcgggacacgcctctaactcagtatcggtggccattggaatggcaagggcaagaacattacaacatgcggactatcatgttctggcgttgatcggcgacggcgccttgtccggcgggctcgcctatgagggcctgtccgatgcgggggacagcggggaaccgctcatcgtcattctcaacgacaacggcatgtcgatcacaaagagcgtgggcggcgtggcggagcatttggcgcgccagcggctgaagccccagtacctgcgctttaagaagggctaccgtaaggtcatgagcgtattgccgctgggcggtcacatctaccatgcaacccacaagatcaagacggccatcaaggacagtctgttgccgtgcagcctgtttgaggatatgggctttacctacctgggaccagtggatgggcatgatgtcaagtatctgacgcagcttttgagctatgcgaaggagctgaacggccctgttttgctccatgtaagaaccgtgaagggaaaaggctatacaccagcggagcgcaatccggatcagtttcacggtgttggccgcttctgtgtagagacaggggagctggtgcatggttcaggggagagcttttccgccgtgtttggagagaccctctgttccttggcagagcaagacggcaagctctgtgccattacggccgccatgcaggggggaaccggcttgaaccgctttgcccgtcagtttccggcgcgcttttttgacgtgggcattgccgagggccatgcggtggccatggcagcgggcatggccaagcaggggatgcgcccggtctttgcagtgtactcctccttcctccagcgcagctacgatatgctgctccacgacgtggcgcttcagcagctccatgtggtgttggcggtggaccgggccgggctggtgggggaggacggcgagacccaccacggcgtctttgatccagcctttctcgataccatccccggcatgacggtgctctgccccagcagttttcaggagctgcgggagatgctgcgctatgccatctatgacgtggagggtccagtggcagtccgttactccaggggaggggagggcgcctaccagggcagcgccccggtggagccagctaccctgctacggacgggagcggacattaccctggcgggctatggtatgatgcttaaccagcttctggactgcgctgaccgtctggcacggaatggcatccaggcagaggttgtgaagttaaataccattacaccgattccactggagcggctgactgcctctgttcaaaagacaggacggcttctggttgcggaggacagcgcggcggcgggcggtgtggggcagcgcatcgccgcaggcctgtttgacgctggcatccaggtgcgagggctggccttggtgaataccggacacacctttgttacccatggaacggtgccccagcttcaaaggctgtgcggtttggacggggcgagcctatatcacagagcattggaggtctgccgtcatggctaatgtaaaaaagcggctggatgtcctgctggtggaacgaggtctggctgaaagccggcagcgggcccaggcggtgatcatgagcggtcaagtctatgtcagggaacaaaaggtggacaaggccgggacgcaggttgaggagaacgccccgattgaggtgcgtggacaggctttggcctatgtgagccggggcgggctgaagctggagaaagccctcaagactttttccggcattcgcttaaagggagtacatgccattgatgccggggcgtccaccggcggctttaccgactgtatgctccaaaatggggcggaaaaggtgtatgcagtggatgtgggctatggacagttggcctggagcctgcgcagtgatcccagagtggtgtgcatggagcggaccaacgtgcgctatttgacggcggagcagattccagagccgctggacttcggtacagtggatgtgtcctttatctccttaaagctgattttacccgccctacggggtatcctaaagccggacggacaggtagtctgtctggtgaagccccagtttgaggcgggccgtgagaaggtgggcaagaagggggttgtgcgggatcccgctgtccatctggaggtgctgcggcagtttttgcagaacgctcatgaggcggacttttctgtaaaggaaatgaccttttcacccgttcggggaccagagggcaacatcgaatatttgggacacctgtgtgtcggggcgggcgagccctggaacggcgacctttcagctctggtcgaggcatcgcacggggcattggagggaaccgggcaatgaaagtggtattgagtccaaacccataccgggaccggggcctgcgggcggcccaggccgcggaaaagattctgcggaacgtgggggtggagaccgccatgtgtctgcccttcctcctggagggcagcaatctggaatttcccaagcatatccagtttaaggacacccaggaggagctgaaaaacgcggacatgctggtttgcttcggaggagacggaaccatcctccacgcggccaaggacgccaacgcccacaaggtgcctatactgggggtcaatctgggcagcgtgggttttatggctgagctggagcagagcgagctgtccatgctgtccaagctggcggccgggaagtacacgatcgaatcccgtatgatgttggatgtagcggtccgccgggatggaaaggtgctgttcaatgacatcgccctgaacgacgcagccctcacgaaaggggctgtggcccgggtcgtggatctggaggtatatggcgacaaggtgatgatcgccaatttttcggctgacggcgtgattgtgagtacgcccaccggctctacagcctattccatgtcggcgggcggccccatcgtggagcctacggcggagaatatgattgtgacgcccatctgtccccatgccctctccgcccggtccatcgtcttgggacgggagcgtacggtgtccattaaaatggggaagcagtcacgcaagactgcctatttgtcggtagatggcggcaaggcgtttcgtctgggcagcggcgatgtggtggagctgaagatgtccagctccaagacccgtctggtacgggtgacggggcggagcttttatgatatactaagtcagaaactgggaggtgccaaggcgtgaagggaaaacgtcagcaggagattttgcgcattattgaggaacaggatattgatacacaggatcagcttctggcggagctgagggcccgcggactccaatctacccaagcgaccatttcccgggacatcaaagagctgcatctgatcaaggagcttaccggctacgggacctaccgctacgcggtgtcagagcgcaaggcgtcgctgaatgtcgccagccggctgcgcacgattttcaaggagggggtcatctcctttgatctggcccagaacatcattgtgctcaagaccatgccgggagtggcatcggcggcctgcgcagccattgacggcatggagatcacaggactggtgggcagtcttgcgggggacgataccgcgatgctggtcatgcgcaccaacgaggacgcgcaggagttctgcaacgagatccacacaatgctgaaataaagcggaaacggcggggtggtcggcatgctctcactgttgcacattgagaatatcgcagttatcgaatcggcggacattcagttcgacaagggattcaacgctctgacgggggaaacgggagccggcaagtccattgtagtggatgccatcggcgccatcatcggagagcggaccagccgggatctgattcggacaggggccagatccgccctcgtcaatgccgtctttaccggcctgcctccgctggcctggttccaggagaacggcggagggccggacgaggatggaaatctgctgatccagcgggagatccagccggacggcaagaatgtgtgccgcctgaacggacggctgattaccgtagctcagctacggcaactgggccggcagctcctcaatatccacgggcagcacgacggccagcaactcctggatgagcggtgccacctggagtatctggatggattcggagaaacgggatcgctgcaggaggaataccgggcggcctttggccgctttgccgtcctgcgccgggagattgcggctctccagatggacgaggcggagaaggcccggcgcatcgacggcctggaattccagatcaccgagctggagcgggccggactgaaggccggggaggaggaggtcctcaccgagcgccgcaatttgctgcgcaatgcgggcaagctgattgaggcggtggagggcgcccatttggccctctcaggcgatgaggagcgtgagggggccgccggcctgatcggcgcggcagagagttcactccacgcggcggcccggctgagcgggcaggtggcggagctggtggacaggctgacggagctgcgctgctcggccgatgatctggccgagcaggtgcgggatttacgggatggtttcgactttgaacccggtgagctggacgagctggagagtcgtctggatgtgatctaccggctgaaaaagaagtacggggactccgtggaggagatgctggactacttggagcggtgcagaaaggagctggacgagattcagttctccagcgataccatcgcccggttggaaagggatctgggcaaagcgatggaggaggtccggcggcggggtgaggcgctgagccgggcgcgccgtgaagcggccaaggcgctggaggagcgtattcaaacggaattggcccaactggacatgccgaaagtgcggttccaggtggagttccggcccaaagcgggggagtacgccatggacgaaaccggactggacgaggtgcagttccttatgtccgccaatgtaggggaggatctgaagcccatccagaagatcgcctccggcggtgagctggcccgcatcatgctggccctcaagaatgtgctggcggagaatgatcaggtgggcgcactggtttttgacgaggtggacaccggtgtgtccggccgggcagcccagaaggtggcggagaagttggcgggcgtggcccgcaccaagcaggtgctctgcgtcactcacttgccccagcttgcggccatggcggacgtccatttctctgtggagaagggggagcgcaaggggagaaccttcacagaagtagagcgcctgagccgggagcggcgcatggaggagctggcccggctgacctctggtgagcgcatcaccggcgcgacactggcggcggcgggggaactgctggacagtgcggaacggttcaagcgggctttaacccaacaaaagtaatcttttgttgggttaaatctttcccttgacaaactggctgccccgtactataatccaactcaatatgagactgcgatgacagggagaagtaccgtcttatgtcccgcccagagagcccccggcttggtgtgagggggaggggacaggccgggaaatacaccctggagcagccgcccgaaccgcgtgaaggcgcgcagtagggctgtgtcgggtgcgcccgttaccgcgccggagtgtgttggcactccatgaggctgtctccgtgaggggatggtgaaccagaggtggtaccacgtttgacaacgccctctgtccgtgaggacagggggcgttttttattttaaaacacaaagtgcagccatactaattagcaattactgtaggggcgtccctatggacgaaagaaaaggagaatgaaactatgacctgttacgaagaactgaaggcccgtggcctcattgcccaggtaaccaatgaggaagagatctccaagatgatcaacgagggtaaggcggtgttctatatcggattcgatcccaccgccgattccctccacgtgggccacttcatggccctttgcctgatgaagcggctccagatggcgggcaaccggcccatcgccctcatcggaggcggtaccggtatggtgggtgacccctccggccgcaccgacatgcgctccatgatgacggtggagaccatacagcacaactgcgcctgcttcaagaagcagatggagcgttttatcgagttcggtgacggcaaggcccagatggtgaacaacgccgactggctgatggatctgaactatgtggagctgctccgcgaggtgggcgcctgcttcagcgtgaacaacatgctgcgggccgagtgttataagcagcgcatggagaaggggctgagctttctggagttcaactacatgatcatgcagtcctacgatttctaccacctgttccagcactacggatgcaacatgcagttcggcggtgacgaccagtggtccaacatgctgggcggcaccgagctcatccgccgcaagctgggcaaggatgcccacgccatgaccatcaccctgctgctcaactccgagggaaagaagatgggcaagaccgccaagggcgcggtgtggctggatcccaacaagaccagtccctatgagttctaccagtactggcgcaacgtgggtgacagcgatgtgctcaagtgcctgcgtatgctcaccttccttcccattgagcagatcgacgagatggacaagtgggagggcgcccagctcaatcaagccaaggagatcctggcctttgagctgaccaagctggttcacggcgaggaggaggcgcagaaggcccaggacgcggccaaggccctgttcgcccagggaggcgacaagtccaacgtgcccaccaccaccctggacaccggcgatctgactgacggggcgatcggggtgctggagctgatgctcaagtgcggcctggtgccctccaagaaggaggctcgccgcctggtggagcagggaggggtggagttggacggtcagaaggtcaccgatgtggccgcagccgtgaccgccgaacagctctccggcgagggtataatgctcaaaaagggaaaaaaggtcttccaccgtgcggtgctcggtgaatgaaaaaaggcgccggaggataattcccctccggcgccctttttcggttgcggaagtgattggatcatgatacaatcttaacaggatagccaatacggaaggggattgcggcatggaggataaggacaagcaagcggaaaagaaatggtatattctggatcggggatcgttatctctcctgatcgtcctgttggccgctatcctgttttatgtgggattgaccaatttcgatgttatcgcggtccgggtgcgcacatttatgggtgtgctgacgccctttattgcaggttttgctatcgcctatctgctcaatacgcccatgtgcttttttgagcgaaagctctaccaaaagcagaagcaccggcgtgggctggcgattctgacggtctatctgatcgccctggcgatcgttgtggtcctgctcaacctgatcataccgcaggtggcgcaaagcgtggtagatctggccaccaacatgcagacctatctgaccagcctgaacagcctggtgcagaccctctccgagcagtttggactggaggcggaggccctgaatgaggctattggctcttatcaggacctgatgaccaatattgccgcctatctctccaaggctctgccggatctgctgaactttggctacgccatcggcagtggggtgatctcgggcattaccgcactgatctcctcggtttacatgctggcagggaaggggcggctggttccgcagatcaagaagatgctctacgccattctgcccaggcggcgggcggactggcttctcggggtatgcggacatgccaaccgggtatttgtaggctttatcaatggcaagctgatcgactcggccatcatcggtgtgctctgctttatcctttgcttgattttccgcatcccatatcccatgctggtcagcgtcgtggtgggcgtcaccaacattatccccttttttggaccgatcatcggcgccatcccctgtctgatgattctggtgatcgtcgacccttgggcggccctgcggttctttgccttggtcatcggccttcagcagtttgacggcaacatcctcggccccaagatcttgggcgacagcacgggcctgtcagccatctgggtgctggtttccattgtggtgtgcggcggcctgtttgggttcccgggtatggtactgggtgtgcccacctttgccgtgctgtatgcactggtgcgggactgggtcaacaaacgcttggcactcaagcgcctggacggaaacgggaggcctctggacggcgctccttaaaaactgaatgagtagagtagtgaagggaggtgcgaagcgaagcttcgcacctcccttttagaggcccaaataggtcaccaagtccgccatggagtatagaccgggggactgcccggcagccagaaaccgggcggcctgaaccgctccggaggcaaacacctcgcggctcagggcggagtgccgcagctcaatgagctcatcccgcccggcaaagagcacctcatggtcgcccacaattccaccgccccgcaccgaggagatgccgatttcacagcgctcccggctccgccggataccctgccggccgcagaccagctccggttggcaagggagggcgtctgccgcggcctctgccagcatgagggccgtcccgctgggggcatccatcttcttgttgtggtgccgctccacgatttcgatgtcacagctcccacccagcaccgctgcggtccggcgtaccaactcgacgaggatgtttacgccaagggacaggttggcggagcgaaagatagggatggaacgggcagcctgctgtatctcctccagttgtccctggtcatagccggtggtggccagcacaaggggcatcctgtgttccaggccgaagctcagcagagcgggaagggccgagggactggagaagtccaccacaacgtcggcctctccctgaaattcggcgggggaggcgtataccgggaaatcgcggatatccgcgcccagcagatcaaagccggcggtcagctccagctccggttcagcggcacagatagcctctaccgcatggcccatccggccgttacagccggagaggagcagttgaaccatagttcacatcctttctctgcgctattggagcagctgagcgctctccatggcgcggcgcagggtctccaggtgcccgtcggacatggcgcaaagggggaggcgcagggaacccacctcatagccggccagattcagggcggtcttgatggggatggggttgacctccagaaagagggcgtcaatgaggtcggtgtactcgatctggagcgcagcggcctcccggaaccggccctccaggcagaggtggctcatctgaaccatcacctcagggacgagattggccgccacggagacgacccccttggcccccagactcatcatgggcaccacctgatcgtcgttgcccgaccagatgtggaagtcatcgccgcagagggcgcgggtgtgggagagcagggagaagttcccgctggcctccttgaccccgttgatgttggggtgctgcgagagaagctggtaggtctcggcggtaaaggatacgccggtgcgggaggggacattgtagagaaggatgggcagctccacccggtcggctatgtaggtgtagtgctgaatgaggccggtctgggacgctttgttgtaatagggggtgacgagcagcagggcgtccgcgccggagtcctgggcgtgctgggagaggtagagggcagcggaggtgtcgttgctccccgcgccggcaatgaccttcacccggtggttaacccgcttgacgcagaaggccacggcggcgatgtgctcccggatagagagggtggcgctctcgccggtggttccgcagacacagatggcatccacgccgtggtcgagctgctggtcgatcaggcggccgaagcagccgtaatcaatggcgccgctctggtcaaagggggtgacaatggcggtacaggctccggtgaaaacaggctctcgcataagatggggtttacctcctttggatatacccctccgcgcagagaagctcagcaaggagaaccgcaccgccggccgcgccgcggagggtgttgtgggacagacagacgaacttgtagtcgtactgggtgtcgggacgcagccggccgatgcacacggccatgccgccctcggtcatccggtccagccgggtctgggggcggtcaggctcctcaaagtagtgcaggaactgcttgggggcagagggcagggccagctcctgggcacggccctggaagcccgcccaggcggctttgatttcgtccagagagggcttgttccggaaccgggcgaaaacggctgccatgtggccgttggaggcgggaacgcggagacactgggcggtgatggacgggcctgcggcattgacgataacgccgtcctccacccggccccacagcttcaggggctcctgctcgctcttttcctcctcaccaccgatgtagggtatcacgttgtccaccatctccggccaggtttcgaaggtcttgcccgcaccggagatggcctgataggtgcagaccagcacctgctccaggccgaaggcgcgcaggggatggagggcggggacatagctttgcagggaacagttggacttgacggcgataaagccgcgctccgttcccagacgcctgcgctgggcttcgatgacccggaggtgctcgggattgatctccggcaccaccatgggcacgtcgggcgtccagcggtgggcggagttattggagaccacggggcacccgcggcgggcataagcctcctccagggcctgaatttcctccttcttcatgtccaccgcggagaatacgaagtccacctgggcggcaatccggtcgatgtctgtttccgcgttgagcaccaccatgtccttggcctccccgggcatggggacatccagggcccagcggccaccaatggcctcctcgtaggtcttgcccgcagagcggctgctggccgcgatggcggtcaactgaaaccaggggtggttctccagaagggtaacgaagcgctgaccgaccatgccggtgccgccgatgacgccaactctgtacttttccataaccaatacctccgtcgttccataatatcctattccagatccagcttgtttgagactgggaaaatgaggactttcatataaaaagaaaatcagcagtttacatgtccgctgattttgtactataatgtcaaagacgatgccgctacggcgcagtccaacttaggtgcagggcgctccctgtcatttttgaaaccgccacggctcctatcctgcatctgatactgattagttttcaaagattgtaccacagatggagcccatgtgtcaatgaaagagagttgaaaagtgattcgatgaagcagagggtaaaaggaaatattttgcggcttgtaactgcctgtcttgcaattttattgataagtgggcttgctccggctggtgcggcctcggcggaggccaacccgatggtccgggtgggcctgttctacggcggaaacgccctgtcgggggccaacctagccaacgacgtgggcagcggctaccgcttcggctactttgatggcgatctgaccttccagctcctgggctacaccagcgagacgacggtctccatggtgaaaacccagaatgtgtactacgggtcgaatgtggactggagtggctccggctattacgacagcaagacctccgacatcgccgtggggtgttaccatctccagctcccccagacctacgccacctttgaggaggcatcggccgccgcagcacagtacagcgatggcttcccggcctggatcgacggcacctactatgtgcgggtgggctccttcctggacagtacctccgcccaggcggcccaggcctccctcggcctgaccggggccacggtggcgggcacctcgggagcggggatctccgtggtaaagacgggcaccaatacggtcctctttcagtttgacagcacctccggcctgtatctggcggttaagcccggccgggacgacacggtgaaggcggaaacctacttccggggctattcctattttggggcgtttgaataccgccggaacggcggggacatcacggtggtcaatgtgctttccatggacgactatctccagggcgtcatcgtccaggagatgagcccctcatggcccctggaggcattgaaagcccagacggtttgcgcccgcagctacgcctatggaaagctccaggcgggcaagcaccagagccagggcttcgacctgtgcaacaccactgactgtcaggcctacgtaggtatcgctaccgccagcgacaacagccgccgggcggtggaggagaccagcggggtgtatctgtggtacaacgggcgggtggcggaccaggcggtttactcctcccacaacggcggagccagcgagagcgccgtcaacgtgtgggggagggattacccctatctcatcgggaagattgacccctatgaggcctccgtcgtggaccgtatctccaactacaactggacggtgacctataccgcccaagagcttaccgagctgctccagagcaaaggctatggaaacagcaccatcgtggatttccgggtgaccaagaccagtcccaccggaaatgccatcgagatcaccttcaccgatgccaacggccggagctggagcaagacgcgggaagcgtgccgcaccttcctggggctgcgttcccagcactacaccatatcgggcggcagcggaggaggctacgcggtcaatggcaccggttccctcagtacactgaacggagcctatgccgtggatgggagtggggcagtgagcacactgactgaggggcaggtctatgccatcggcggggacggcgtcacctctcaggtgaagccctccgcgtcggccggcagctccggcgtctttaccatcactgggtccggctgggggcacggagtgggcatgagccagtggggcgcctatgccatggcccagcagggtgatacttacaaggatattctgaccttttactatactggaatcgaggtgcgcaagccataaaaaccgctgattttgatttttatctgccggaggagctgattgctcagaccccgctggagcggcgggacgcctcccgactgctggtgctggacaaggagaccggagccacccggcacatgcatttttttgatctgcctaccctcctgcgcccgggggactgcctggtgctcaacgactcgcgggtgctgcccgcccggctgttgggccatcgggagcccaccggcggcgcggtggaggtgctgctgctcatcgaccggggggacaaggtgtgggagtgcctggtgcgccccggccgcaagctgaagccggggacgcggctgtccttcggggacggctccctcaaggccgaggtggtggaggtatgcgaggggggcaaccggctggtccgcttcgagtatgaggggatcttcctggagaccctggagcggctgggcaagatgcccctgccgccctacatcaaggcggagctgagcgaccccgagcggtaccagactgtctactcccgcgaggtcggctccgccgcggcacccaccgccggactccactttacccgtgccctgctggagcaggtgcaggaaatgggggtaaaggtctgctatgtgacgctccatgtgggcctgggcaccttccgtccggtgaaggaggaggagatcaccgaccacgagatgcacagcgagtactgcatgatctccgccgagaccgccgagaccatcaaccgcaccaagcgggaaggggggcgggtcatctgtgtgggtaccacctcctgccgcaccatcgagagctgggcggcggaggacggcacgttgaaggagtgcgcggggtggacgaatatcttcatctatcccggctaccgcttcaaggcgctggactgccttatcaccaacttccatctgcccgagtccacccttatcatgctggtatccgccttggcgggccgggagcatgtcctggccgcctataaagaggcggtggaacagcggtatcgcttcttctcctttggagatgcaatgttcatcggctgagtcagaacgaaaaagagaaaccggggttcccacaagttgtgggaaccccggtttttgtatgggtcagataaggccctcttccaccaggaagtcgtgggcgacgtcggcggcgtttctgccctcgaggtctacctcggcgttcatggcggccattgcctcattggagatgcggccgtccagcagggcgagcacctcctccagctcgggatacttgtccagacactcctgacggataaagttgaccgcgtagtagggcgggaagaagctggcatcatcctccagctgaaccaggtcaaacttggagagaagggcgtcggtggcgaaggcgtcgatgacgtccacctggccgctgtcgatggcggtgtagcgcacggccacgtccagggcgttgacctcggcgaactcggtgttgaaggtggactccagacggggaagggcgtcctcccgctgggtgaagtcggcggtacagcccaggcggagttcgggtgctacggccatcagatcggtgagggtttcgagctgatactgctcggcgatctccggccggacgctcatggcgtaagtgttgttgtaacccaggggggcggagacggcgatgttgtagtcgttcttcatcttgtccacaaggatatcatacacctcgtcagggtcggtgttcagcggcaggcccagcacagagagatacacctgaccggaataatcgaccaccatgtcgatgtctccgttctccatagcggtcatctccagggaggtgctggctaggttaaaggtggtgtccacctcgatgtcggtcttagcctcgatgagctccttgtagatgttgcccacgatgtagacctcggtaaagttggcggaacctacggtgatgtgcttttccgacttcttgttagacaggccgcccccgatggcgaccaccaccagggcgacacacacgcccacggcgatcacctgccggcggcggatgaccctcttgggcaggttctgaatctgctcgttgggaagcaggccctcgctggtgaccgcctgctccagcttggcgaagatgaagtcgaagagcagcgccagcagggagaccgggacggcgcccagcaggatcatctccacattcagggagttgaggcccagattgataaaccagcccagacccttggcaccggcaaaagcggcgatggtcatagtgcccacagaggccacggcggcgatgcggataccggccatgatgaagggggcggcgatgggcagctccaccaggaacaggcagcgcgtgcgcgtcaagcccatgccccgggccacctccaggttcttggggtccacgctcatgatgccggtataggtattcttcagaatggggaggaaggcatacacaaagaccatcaggatggcgggcaccgtgccgatgcccagaaagcagacggccagggacagcagggcgatggaggggatggattgcatgacgttggcgatgccaatgacgattttggccgctgtctggttgcgggtgataaggatgcccagcggcacaccgatggccagggagatgagcagggccagtgtggtcatgttgatgtggcggaaaagctcggtgaccagttcgggccagcgggagaccaggagctcccagaaggaggacagagagaatgaaatgcccataattacgcaccctcctgttcgtcgcgctcaaccggctcgtcgatgaaacggcggctcagggtggagaggaggctgctccggttcaggaaaccgcgaatggctccctccgcatccaggacgggcaggatgccgaagtccttctcgccatagtccgctaccttttccagtacagtgctcaggctgtcgtccacccggacggacagataatcgtcagagaggaacgaggagaccggggagctgtattggtcgatgccgatcagatcctggagccacaccataccggcaaacttattgtcgtcgccggtgaccagcagactgtcgatgttatagtgccgcatgagctgtaccgcctgcaccactgtgcggctctgagagatggtgatggggcgggggcgcatgatgtcctcggcccggataaaggaggggttctcccacaggcggttcttgccgatgaaggagttgatgtactcgttggcgggatgcttgaggatgttctccggcttgtcgcactggaccacatggccgttttgcaggatgcagatgcggtcggccagcttgacggcctcatccatgtcgtgagtgacgaaaacaatggtcttgtggaaccggagctggagccggtgcacctcgtcctggagctcggcgcgggtcatggggtccagggcggagaagggctcatccatgaggatgatctccgggtcggcggcaaaggcgcgggctacgccgatgcgctgccgctggcctccggagagctgggaggggtactggctgcggtattggtccggctccaggttgaccagctccagcagctcggtgatccggtcgtagattttttccttggggtacccggccacacgcatggccagagcgatgttgtcctccaccgtcatatgggggaacaggccgccctcctggacgacatagcccatcaggcggggaagctgggtcaccttgatccggttgatgggggtgccattgatgagaatctcgcctttgtcaatggggttgagcttgttgagcgttttcaacagggtcgttttcccgcatccgctggaaccgatcaggacaaaaaactcgttatcctggatggtcagactgatgttcatcagtaccgattttccgcggtatgacttgtagagatttttcaattcaatcacagcaaaggagctcctttctgaatgatccctattgtagtatggagtggattgaaatggagtaaggattgacggatttagataaagaatttgttaaggcagggagaattcgcttgacagatcattctgtatctgctaaagttacagtacaaactgtaactaaaaaaattacaaataagtatgagtggaagccgcaaaggcttggaaccctatctccagtagaaaagaaaagggcaaacagaaaggatgaatgtaatggaagcgatcgtcatcacgaaagaaaattttgaggagcaggtgctgagggcggagaagccggttctggtggacttctgggcgccctggtgcacctattgccggcgtattgcccctgcggtggaccaggtggctggacagtatggggagcagatggtggtcggcaaggtgaatgtggacgagcagccggagctggcagagcggtttggggtggagaccatccccacgctgctggtatttcggaatggacaggcgggagagccgctgatcgcccccggctcaaaggcgcagattgtagagtgggccggactgtaagagaggaggtgcgccggatgggtgtaaagcactatgacgtgattgtgatcggcggcggacccggcggctatacggcggccctgtactgtgcccggagcgggcgctcggtggcggtgctggaaaagctctccgccggaggccagatggcgaccacggaccggattgacaattatcccggctttgaggagggcattgacggcttcgagctgggagagcggatggagcgccaggcctggcggttcggcgtgtccacggtatacggcgaggtgcgctcggtggagctggcgggccggcccaagcggatcgagagtaccgagggcagctttgaggccgaggcggtgatcctggccacgggggcgttcccgcgtgagctgggcctgccggacgagcaggcgctccgcgggcgcggggtggcgtactgcgccgcctgcgacggcatgctctaccgcggcaagacggtagtggtcaacggaggcggaaacaccgctgtgggcgacgcgctctatctggccaagctttgtaaaaaggtctatctggtccaccggagagacgagctgagggcctcggcggtctatcgggacgcgctgagggaaaacggcgttgagatcctttggaacagccgcattaccgctctgcgcaaggagaaacgcctgacaggtgttgaggtggaggatcttcgcaccggcgcacggcgggagctgttctgcgacggcctgtttgtggccatcggccgggtgccggatacggccctgtttgccggccaggtggagctggacccctcgggctatatcgtggcggatgaaaccacccgcaccagcgtgcccggcgtctttgcggtgggcgatgcccgcactaaggcggtgcgccagatcgtcaccgcagtggcagacggggccgtggcggcccactatgcggaggagttcctgttggaggatgctgtaaaggataaaaacctgtcatgaatagtgcgttttgtgtggcggtccacgccctgatctgcctgaaccggcggcaggagcagctctccagtgaggagctggcccgcagtatctgtaccaatccggcccgcgtgcggaagatcatggcggggctgaagcgggccggactggtggaaaccaaggaggggaatgagggtggctaccgctttgtgggcgatcccgccgcccttacattagatcaggtagcccgggcgctagaggtgcggttcgtgtcgaccaactggcgcggcgggggcgtggatcagccctgcctggaggcatcgggtatgtcggaggtcatggacggtctgctggaggagctggaccagggctgccggagcaggctttcggagatcagcctggctgagctggacagcagactttatttgaaacaaaggagatgaatatgggtctttcactggagacgagcgtgccggtacttacggtgtttttacaggggctgctgagctttttctctccctgtgtgctgccccttgtgcccctctacgtcagctatctggcgggaggcgccagggacgtggacagcgacggcaatatccgctatcccaggggaagggtactggtcaacaccctgttctttgtggtgggcatcagctttacctttttcctgctggggttcggctttacagcactgggaagctttttccgcagcaaccagacctggtttgcccgcatcagcggcatcattatgatcctgtttggcctgtaccaattcggcgtgttcgggcgctcgggcgccctggagcgggagcaccggctgcccttccggctggaccggtgggctatgaacccgctggtggccctggtgcttggctttaccttcagctttgcgtggacgccctgcgtgggccccacgctgggcagcgttttgctgatggcctcttcggcgggcagcgccgcccgcggcttcctgctgattgcggtatacaccctcggctttgtgatccccttcctggccgtgggactgtttaccggggcggtgctgggctttttcaagcgccaccagagggtggtacgctacactgtgaaggtgggcgcggtcctgctggtgcttatgggcatcatgacactgactggcttcatgaacggcattaccagttacctgtccagcgcggcgggcagcggagcggccgaaacgccccaggctcagacaagcggaactccggaccccacaccagaggggagcgtgcccgccggaccggaggagagcccggcggccagcgggcggccggtgattcccgcgccggatttcaccctggtggaccagtacggggaggagcataccctctccgactatgagggcaagacggtgtttctcaacttctgggcgacctggtgcggtccctgcaagcgcgagatgccggaggtgcaggcgctctacgagaaatacgggaacaacgagggagatgtgatcgttctgggcgtggccaatccaaagtcggaggagtacccctataatcaggatgttactcagccggaggtggagcagttcctggaggacggcggctacaccttcccggtggtgatggacgttacaggagaggtattctactcctacggcatttccgcctttcccaccaccttcatgatcggcgcggatgggaatgtgttcggctatgtgccgggagctctcaccggcgatatgatggagtccattgtccagcagaccatagacggcgttgaggcgggagcatgagggatactcttgtcaaagctcagtccttctggtattatgaaaggtaagtttttgacaaaggagttttgacgtgtttgaagtcctgaaaacagagggaaaggcccgccggggtgtctttacctgcgcccacggcacggtgcagacgccggtgttcatgaacgtgggcacccagggggccatcaagggtgcggtgtcggcccacgatctgaaggagatcggctgtcaggtagagctgtccaacacctaccaccttcacctgcgccccggcgaccaagtggtgcggcagatgggcggcctgcacaggttcatgcggtgggacggcccgatcctgaccgactcgggcgggttccaggtgttctccctgtcgggcctgcgcaagatcaaggaggaaggggtcaccttcgcctcccacatcgacgggcgccgcatctttatggggccggaggagtccatgcagattcagtccaacctgggctctgatatcgccatggccttcgacgagtgcgtggaaaacccggcgacctatgagtatgccaaagcctcctgcgagcgcaccctgcgctggctggcccggtgcaaggcggagcacgaccggctcaacgccctgcctgatacggtgaatccccgccagatgctcttcggcatcaatcagggcgccactttcccggagctgcgcatctggcacatgaaggaaaccgccaagattgactgcgagggctacgccatcggcggcctggcggtgggggagcccacccaggtgatgtatgacatcatcgacgcggtggagccctatatgccggcggagaagccccgctacctcatgggggtgggtaccccctccaacatcatcgagggtgtggcccggggcgtggacttcttcgactgcgtgatgcctgcccgcaatgcccgccacgccaagctcttcacctggtcgggggcgctgaatatccgcaatgagaagtacaagctggacgagcggcccatcgacccggactgcgactgcccggtgtgccgctccttctcccgggcctatctgcgccacctctttgcagcggaggagatgctggccatgcgtctggcggtgcttcacaacctctatttctacaacaaactggccgaacgtatccgccaggcgctggacgcgggccaattcgcggcattccgggcggagtattccgagaaattggccgggcggctgtgaagtttctgtgaatgaggcgaaaagggcttgtcaaaatctgcttttcgctttataatgtcctattggtgacgttttaacgtcaaagtatgaatcggaggggattattttgctgacacagactgctggcgttctgctgacaaattcagggacgaatggtagtgcaagcttattgagcatgcttctgccgttcgtgatcctgatcgcggtcttctatttcctgctcatccggccggagaacaagaagaaaaaggcggcggccaagatgcgctctgagctggcggtgggcgatgagatcaccaccatcggcggcgtggtaggcaccatctgccaggtgaaggaggataccatcatcatcgagaccagcgccgaccgtgtgcgtatggagttcaccaagtgggccatctccaccaagggcacccagtccacggagaacgctcctgcggacaccaaggattccaaggacaagaagtaatagtgaacgccctccctgcataggtttcagtaggaatccatgccaagggagggtgtttttatgaaaaaaaaggaggaggagcagagcgcaaagctgatccgctgcggaatggggctggtgctggggggcgtggccgcgctggcggtttgctttgtctttctgctggtggcgtcggcggccatttccggcggactggcaggggaggagctgatgtatcagctcaccatcgtgggatgtgtgctgggggcctttgcgggcggcctgctggcagtgcggcgctgtgggagccgggcgctgatcgttggccttaccaccggcggagtgctcttcctgctgctgcttaccatcggggcgctctgcttcgaaacggtctctctggaggcggggggcatcggcctgctgtgcggctccctgtgcggcggagctgccgccggaatcctgggcggcgggggtaagaagaagcctgcccggaaaaaacgcagaaaataattgaaatcgggcggagaatgtgttataatcgctccaaaccatcgttatgggagggaaaccagaatgaagcatgtgaagacgctcaacggcgcgactctgaagaagagcgccgcccacggcggttgcggcgagtgccagacctcctgccagtccgcctgtaagacctcttgcaccgttgccaaccagaagtgcgagaaccagtaaaaacgaacttggctcgaaaagggtggggcatcccaccctttttgtatgccgtaataaagtgaggaacgaacaaatatggtacatacctttcaatgccttggcgtgaatatcgccgtggatgtcaacagcggcgccgtccacgtgctggacgagctcacctaccaccttctggagcaggtgcagccccccatgggagagcactgcccggcggagctttgcgccaggctgccccagtacgacccagccgccctggaggaggcctggcaggagctgcgcggtctggcggccgaggggctgctttttgaggaggacgactacattgaccgggagaaggctgcctccatgcagcagcaggccctggtgaaggccctgtgcctccatgtctcccacgactgcaacctgcggtgtaagtattgctttgcctccaccggcgatttcggcaccggccaccgcatgaccatggacttcgagaccgccaaacgggccatcgacttcgtcatcgccaagtcgggccaccgccgtaacatcgaggtggacttcttcggcggcgagccgctgatggccatggataccgtaaagaagacggtggagtacgcccgttccattgaggaggagcacaacaagtgcttccgctttacaattacaactaatggtgtgctcctcgatgatgagaacatcgagtacatcaaccgtgagatgtccaacgcagttctctccatcgacgggcgaaaggaggtcaacgatgacctccggcccacggtcaacggcaagggcagctatgacgtgattgtgcccaagttccagaagctcattgagggccgtgggacgaaggactactacctccggggcacctttacacgattccatcaggactttgccgaggacgtgaaggcgttggcatccatcggacggaatatctcggtggagccggtggttgggaaggaggaggatccctatgccctccaggaggcagatctgcccgccctgaaggcggagtacgagcgcctggcggagtatctcagggaccacccggaaaccaacttcttccacttcaatgtggatctggcccaaggcccctgcgtgatcaagcgcctgcggggctgcggggcgggctgcgagtatgtggctatcaccccggagggggacatttacccctgccaccagtttgtaggcaacgaggactacaagctgggcagcctttatgatggcaccttcgatcaggagctgtcgggccgctttgccggactgaacatctacacccgcgaggagtgcagggattgctgggcacggttctactgctcgggtgggtgtagcgcgtccaacctgcttgtcaatggcgacataaaaaagccccaccgtgtgggctgtgagttggagcgaaagcggctggagtgtgccatcgctctgcgggcgatcgcggccggaatggcggagtgacatatacagatcgtaattatacaaatcgtaatctccgctacaaacagacaaaaagtgatgaattgagccggatgtcggcaaaaacagtgactataattttagtaaagaggagcgccacaaagtgtggcgctcctctttttgtatacacagtttacataattaagtaaacataacaacttggcataatatacaaaaatgaagttttttcttttccgtccttgcacaagacggcctggtaagctatagttagcatgtaaaccgttggcacgcgtctaatcgaggccctgtccgcatatgctcccatgggaggtgagggcgatgcgcagggcggcggaagcgtggagaatttcaggggatgggcttattccggtgctggcggtaactgcggcctgctttttgttgggcgggctggtaggatgcctgctggcatcccatatcggaggcgggggtcaggagagcctggccgcctacgtggagggatttcttcgcgccgctcaggcgggggagattacagcgcctgcgctggcctcactggtgtgggacaccgtgcgctggccgctgctggcgctgctgctgggcttcaccgcgctgggacttctggggctgcccctgctgtttgcggtgcggggattcctgctggccttttcgattgcctcatttgtgcgcctgttcggcggcgcgggctgtctgctggccctcttggtctttggggtgagcggtgcgctttcggtgccggtgctgtttgtgcttggggtgcagggcctcctggccgcccgggtgctggccggacgggtctggggggatgggaaaacccctccgccctatgggaaactctattttttccgctgcggcgcctgtgccgtcgcgctgtgtgtgagtctgctgctggactgctttgtagtgcccggcctggtatccagcctggcggggacgttcctgagcctatagagatactgcgagaaggtgttggacggatggattatcaatcaggttatgcgcactatttgacagaggaaaagcgggcctccgccaacacgttgagctcctatctgcgggatgtgacccagtatctccactggctggaaggggagggggttccgccggagcaggccgcacagaaggatgtggagtcttatacgagatttttgtcggccaagggtaagtcggcggccacggtaacccggtcgctggcctctctgaagtctttctacagctatctgatcgcggagggcagggtgtccgtcaatccggccagggggctggccccggcgaaggtagagcggaagctgccccacatccttacctccaaggaggtggaactctttctggagcagccggatgcctcggatgccaagggctgccgcgatcgggccatgctggagctgctttatgccacgggtatccgtgtctctgaactgattggtctggatctggaaaatgtcaacctgtccgccggctttatccgctgttccggccggggaaaggagcggatgatccccctctacccggcggctgtccgggcgcttcaggactacatagagcacgtgcggccccagatgctggagcacccgcaggaacgcgccctgttcgtgaatatgagcggggagcgcatgagccgccagggcttttggaagatcatcaagcactatcaggagaaggccggaattcagacagaaatcaccccgcacaccctgcgccactcctttgccgcccatctgctggaaaacggcgcggatctccactccatccaggagatgctgggacacgcggacatttcgtccacccagatctatgcccagctggtcaaccagaagctgaaggatgtctacaacaaagcccacccgagagcctgactgacgggccgcggcgcgctgcgccgcggcccgtttttcggcttgcgccgccgtgcccgccgtggtaaaataaacttcgtatggactcaggaggggaacggataccatgctgattttaggcatagaccccggctttgccatcgtgggcttcgggctggtggaggctgatcgtggccgtcagcgcctagtgcagtgcggcgcaattaccacaccggcaggggagcccctgcccgcacgtctgcggcagatcgccgacgatatggatctgctgctggcccaattccagccccaggccatggcagtggaggagctgtttttcaacaacaatattactacgggcatcggcgtggcccaggccaggggagttctcctgctggcggcggagcgccggggggtgcccatctttgagtatacccccagccaggtcaagcaggcggtggtgggctacggaaaggcggagaagcggcaggtcatggatatgacccgccgtctgctgaatttgagcgccgtgcccaagccggacgacgctgccgacgcggtggccatcgccctgtgccatgcccgttcgtttacctcccgccttcagagccccgacgcggcccgcccgggcagcgggcgctatgaggtgcggaaacaagtgcgttaggagaagcaaaaacgatgttttattatctgaacggcgtggtggcccatgtggccccctttctggcggtcatcgactgcggcggggtgggctatgcctgccgcaccaccaacaacaccctgtcccatctgcaaaaggggaagccggccaagctctatacccacctgaatgtccgtgaggacgccatggagctgttcggcttttccacggagaatgagctcaactgcttccagctgcttacctcggtatccggtgttgggcccaaggctgcgctctccatcctgtctgcggccacacccgagtccctggccatgagcatcatcaccggggacgaaaaggccctgacggtggcccagggcatcgggaaaaaaatcgcccagcgcatcatcctggagctgaaagacaagctggccaagggacagatcgcccctggaggcgagagctatggcggcaccggcgtcacggtaatcccggagaacaagtccagcgaggccgctgccgccctggcagtgctgggctacagccagagcgagattgccgcagctctcaagggcattgacgtggacggccttgccctggaggagatcatcaagcaggcgctgaaaaggatggtcaagaattaacgtcgggctaaaaatgcgcttggggagcggttcatttttattgcacgcatctacgtcagaatgaggaagtgaacatacttgagcattgacttttccgataccgggtttgagacccaggagccgctcgtcaccacatcgctgacgcgggatgacgagaacgagggttccctgcgtcccaagaccctgcgggagtatatcgggcaggagaaggccaagggcaacctggaggtctttatccaggccgccaaaatgcggggcgagcccctggaccacgttctgcttcacggcccgcccggcctgggcaaaaccaccctcagcggcatcattgccaacgagatgggggtcaatatccgcatcacctccggccccgccattgagaagcccggcgatctggccgcgctgctcaccaatctggcggagaacgacatcctctttgtagacgagattcaccggctcaaccgctcggtggaggagattttatacccggccatggaggacttcgccatcgacatcatcatcggcaaggggccctcggccaactccatccggctggatctgccccgcttcaccctgatcggcgctaccacccgggcagggcagctctccgcacccctgcgggaccgcttcggcgtgaccctgcgcctggagctctacacaccggaggagctggcgcagattgtcacccggtcggccggcctgctggacgttcccatagagtcggacggcgcaatggagatcgcccgccgcagccgcggcacgccccgcatcgccaaccgaatgctgcgccgggtgcgggactttgcccaggtgaaggctgggggggtgattacccgtccggtggcagaccaggcgctcacggcactggaggtggaccacctggggctggacgccgtcgaccggcggatgctcgccagcatcattgagcactacggcggcggcccggtgggcctggagacactggcggctaccatcaatgaggaggcaattaccctcgaggacgtctatgaaccctatctgatgcagatgggctttctcacccgcaccccccgcgggcgctgtgtcacccgtcgggcctacgagcacttgggcctgaccgtgcccggcggggcctgcggactggagcagctctcgctgtagggggagagttgggtgaaaaagaaccccctggttcccatcctgggcggcggtgtaatcgcggcgctcgttctgggcgttatggcggtaattgtgctggtggacgccgggctgctgcatctgctgagcgtccgctgcgactccttcggctggctggtgctctacgttctggtggaggcggtgctcggcctgcccctggagctgttcaccgctggcctgaccaaggcgctggtcaagctcggctgggccagtccccgtctggccaatctcctctacatcccactggacgccctgtgcaccgtctttgccttttgggtggccgatatgcttatggagccggtggaggctaacctcctcgccgttttggtggtggggctgttgtccgccctgttctccaggccggtgaaacaggcggtgcggcggaagaaaacgccgctggagggggagcatgaccaagcgaatgacgatcgactgaactgataagaatgaggtggctatcgaatatgggtaaattatttggaaccgacggcatccgcggtgtcgtcaacgacggactggacgccatgctggccttccgggtgggcatggccgccgcgcaggtgatgacccgggagaagggaggcggacagccccgcttcaccatcggcaaggatacccgcatctcctcggatctgctggagggggcgctgattgcggggctgtgctccgcgggggcggatgtgctccacctgggcgtgatccccacgcccgccgtggcgtggatcaccgtggacaccaaggcggatgcgggcatcgtgatttccgcctcccacaacccctttgagcacaacggaatcaaaattttcaacggccagggcttcaagctctccgacgagctggaggggaagattgaggaaattttgctgaacgatatcgccgtgtccctcaagaccggcggggagatcggccgggtgatttacgccgatgagaaggagtcccaggactatatcgaccacctggtttccaccatcggctccgagctggcggggctgcatattctggtggactgtgccaacggcgcggcctctgccactgcggcccggctgtttgaccggttccccgacctgcacaccgacgtgattcacgccgatcccgacggcgtcaacatcaataacggctgcggctccacccacctggatcagttgaaagccatggtgaaggcgggcgggtatgatctgggcatcgcctttgacggcgacgcggaccgctgcctgatggtggacgaggcaggagaggagatcgacggcgaccaggtgatcgcagcctgtgggctggcgctgaaagaggcgggggaactggccggcggagctattgtgggcaccgttatgagcaatctgggcttgcaccgtttctgcaaggagcacggcattgggctgttctgcaccagcgtgggcgaccgcaacgtgctggagaagatggaggagtgcggctatgtcattgggggcgagcagtcggggcacacgattttccggcgctacgccaccaccggagacggccagctcaccgcgctgcaattcctggatctgctctgccgctccggcaagaaagcctccgagctggtaggggagtgcaaacgctatccccaggtgctcatcaatgtgccggtggccgataaggcaaagaaggaggccgtcctgtcggcccctgcgcttcaaagcgccgtggcggagcaggaggaaaagctggccggaaatggtcgtgttctggtgcgcccctccgggaccgaggctctcattcgcgtgatggtggaggctcagaccgagcctgtagcgcgggagacggcggagcttttggcaaatgtaataaaaaatcatggatcttaacgggaaatttttgcgcaaaagcttgacaaatccagaattatccgcgtataatgtataaggagaaccggtatgaaaccagatcatattccttcccaggaactcacggacgaaacgctgtgccgtttggccgcctccggcgaccgtgtggcggaagagcgtctggtcatgcgctataaccgcttggtgcggatgtgcgcacgcccctattttctggcgggcggcgacagtgaggatctgattcaggaggggatggtcggcctgttagccgcgatccgagagtatgactcctccaaagcggctgtatttcgcacttatgcggaggtctgtatcaagaaccgcctgttctctgtgataaaagcagcagcgagagataagcacacaccgctgaacaactcagtctcgttcgaaacccctctttttagcgggaacggagatcggtttgcctaccatgcgccaggccggcaggtggaagacccggaggagatatttctcagccgggagtccttccgggagcggatggaaacactgatgggccaattgtccggtttcgaagcaagcgtacttcggttgtatctgaacggtctgtcctattctgaaatcgcagccgaggtaaacaagtccccgaaatcggtggacaacgctgtccagcgcattcggcgcaagttggcacagcaatcttcatctggcgatgtcagcgtaagctgaacgcaatattactgacccagcacaatcggatcatccggacctgggcaacaaagcaaagagagggtaaaatcatgtacgaagacaagactctggtatgtaaggaatgtggccaggagttcgtgttcaccgccggtgagcaggagttctacgccgagcgcggcttccagaacgagccccagcgctgcaaggcctgccgtgatgcccgcaaggccgcttcccgtggcccccgcgagtatttcaccgctacctgcgctgcctgcggcggcgaggccaaggtgcccttcgagcccaagtccgaccgtcccgtgtactgcagcgactgcttcgcccgtatgcgcgagcagggctaacagccaacttgaaaaggacgcccacaggggcgtcctttttttgtccgctgatgttacggaaaagcgcaaaagtcaagattaaattgtaaaaaacctgaaaaaacttttcaggccagggaagcgacccagggaaggaagatgtcgtccgccgtaaagaatcccaggattccgcgcggataggtgttgatccagtcttcgacggccttgatcgccttcgccgtcactttcccgaagtcggtccctttcgggaaccagcggcggatcattccgtttatattttcgttcgttccccgctcataggaagaataggggtgacagtagtagaccttcgtccggctctggcccttgtgaaggcaggaccgttccaggcccttcacgtcggaaaactctgtcccgttgtcgacggtgatcgtcttaaaaaccttgttgaacgtagccccatagcggcgttcaaggcgatccagggcgcggacgacgctgtcagcggtcttgtctttcattttgatgattatttccttccggcttttccgctctgacaggaccagaaggacttccttcgtccgcttcttcccgacgacacagtccatttcccagtcgcccagttcagcgcggtcgtcgatctctgggggccgcttttcgatactggtccccgccgacgccctggccgccttcttctgaacgcgggtataggaccgcttcttcttccccttgcggggaaggtgacactgttccaggttcaggaagacgcctttcttgatgtaggaatacaatgtcgcttcacagatcgtcgtgtcgaactcgatcccctgggccttgatttcgcccaggacagccgccggggaatagccgtcgtttacaatgcggctttcgatgtgttccgccaggcgccggtcggacccgattttcaggtccggcccctttgccgccaggttcgccctgtacgcggcttcggctatctctggactgtaccgggtttcggtggtcaagtcggaattaaggtgttcgtactggccgcgcttgatctcgttatagatcgtgttccggtggacgccgatgtcgtccgcgatcttctggacgggatcgccgtgtttcaggccggattcgattttcagacggtcgtcccaggataaatgtttgaatctgcgtcgtttcattgtaattcctcccatagaacagaaaaaggcccccgcctttgccttttggcaagggacgggggcttcgttgcgttgtcagatcagttcgcgcgggtgaacgcccaggaagtcagctatccgaagggccacggacagggacgcggtttcgatcccgcgttcgccgttctcgaacttctggatcgtccggatattgacgccggttcctttcgcaagggcggcttgcgtcagccccctttcgcaacgcaaacgcgcgactttggtcgtgttcttcgtgcttcctgatttcatgttgatcgccgccttcctgttttctgctcttatattacgccttttggggcgtaatgtcaagggggagaatgaaaaaaatcccacgaactttcctgtccgtgggattatgtgtcttccggttccaaaagactttcaatcgggacttcaaaaagcgccgcgaaggcgcgaagttcgtagtccgtgaccagccgatcgccagattcaattcggctgattgcgtcctgttctatctcgacgccgcgcatttgcattttagcggccaggcgttcctgtgatatgcgccgggtgacacgttccttcctgacgcgctccccacagatattccgccggcccaggtattccagcttcttcacttttccgccttctttcatgggtttattcagtagtttacttgacattaccatgaaaggcgaattataatcatggatatgaaccatagattcaaaataattcagacgggaggttaatacatggggtggaaaataggcggggtcctttctgcgatcctggccggcctggccgcgctgatcacgttgaccacggcggccgaatataagacggggatcgaatgggtgatcaccctgattttcgtccttctggcggttttgtgcttctggcgcggtgcgaaggccggcgccaggaagaaggcgaaacgcgccgccgcgcaacaggcatttatgacagatcaggaacttgaacagattcaggccggcgttcttccggttctgcctggcgtcccggtggtcctgggtgaaggcgaagtcgcccatttcttcggaccggcgcggcgctatatcacaaagacgaaggcggtcggccggaccggatcgggcggcggcgtcagcgtccgcgtggcgaagggcgtgtcgcttcggaccggcggcggggccagtcagacggtttacaatgacgtcacggattctttcgtcggccaggtgatcctgacaaacaggcggatcgttttcctgtcgaaacagaacggcttcgactgtaaactggacgccatttcggcgatcacgccggaaggcgatcggcttatgatccaggccggggcgaagacttatcgcctgaccgtggaacgccagggacacttcgcgaaggcccttgacatggtcgtcagaaaataaaaaaaggcggacgggttttcccgtccgccttcttcatttcatgcggttgtttatggccctgtcgatcttccgggtcactctggcctgttgggtgttcagggtccgcttgacggcccttttcatggtgaaatgaccgcgcacatagccgcccttcgggccgacgaacattccgccttccgggtcgtcccggttatatacgaaggtgaatccttcccagtgaccggggacgaagtgacttcggaatccgtgttccaggtgtccggcgtagtccagcggattataaaaccggacgatgtacttcttcccgctccggcgcgcccgcctgtcgcttttccagttccgccgatagtcgccagtattgacgatgtcgggggaatcgtttttgcagatcagccgggcctgttttacggcgtagacgccttcgccgacggcgatcgtgtccatgatctccggaatatcatctttcagggcttgaagttgggccgtgaacagggccaggtcctttttgtgaaccgccatagttcgtcacccctttccggtaggactgggggcgggttgccccgccccctttgcgctgtttctggggtttattcctggccggtgtcttcctggtcgtcgcgaccgtcgctggacagcttgtcgcccgtggcgtcggtgacgtccttgaagactttgatcatctgtttcaggaacttcgggacaggggcgcccagggcgccggcgttctccgtaatgcttcccagttccgtcagaatgtaccacacgaccacgatcgggcaaattaagaccgtatagtcgaagggaagggtgatcgccgggatattgttgaccaccaggccgacgacgatgtcggccagcccggacacaatgaccgcgatcagcgatccgcatttgtgccacaggccggctctggcgaccgccgaagaccattcgcctttctgcatagcggccgccgacccggtcaggtagtcgatcaccatgcacaggaagaacatgatcaccagccagccgaaccagccgaaggccgccgtcagcgcgccgaagaacgccacgacggacgccttcaaagtgttgatatgatccattttgcacctgctttccttccggatcagtccggaatctttaatttttgccccgcgtagatagtcgtggacgtcaggccgttcagcttttggatttccggccagcgcgaaccgtttccaagttgcgaagccgcgatcgcccacaggctgtccccctttttcacagtgtagattttcggcgccttctgggcgctggcgttgccggccggaatcttgattttctggccgacgaagatcaggttcgggttcttgatcccgttataggcggcgatcgcctggtaggtggtcccgtacttcgccgcgatcccggacagggtgtcgccggcctttacggtgtaggtcttttcgccggacgcctggccggttccctggggcttcccgccggcgccgtcccaggttgtcaggtcataggtttcgatcaggctgaccagcttcgccgtatagttcgggtccgtggcgtagccgtcttcgcggacatactgacaggccagtttatagtcggtcaggccgcgaaggtttttgtaacggtccaggcggttgaacagggcggaatgatccgccagggattccgcccaggacgggtattttcggaacgtggcgtccacggtcacatatttcttcccgtcccattcctgggtcttgcaagtgtagccctggccgttataggtccccttgatcccgaacaggttgttcgcggccgtggtcaggccggactttccccagccggattcaaggatcgcctgggcgatcgtcagggacgccagaatcccgttcttcttcatgtcggcggccgccagggggccgatcttgttgatgaaggacttctggtcggcggttcccttcgtggccgtcacgacggccttgtccgcctttgcggcgtagtcagggacgccgaagccgcgaatatagcggccgttcacgtccagggtccggaagccgacggcgttgttcttgttgccctcgacgacggtgatcttcccgccgctgacctcgcacacgatcccgacgtggtccggggcggcggtgttgtcggtgttctggtagttggccccgtcgtcccagtcgtagaagatgtagtcgccaggctccgggacgtaggcgtcattctcgacccagcgcccgatcttctggaatagggcgatatgctttccacacccgacttctgtcggaatgatgtccgtcaggccggcctggatcgccacagcggacgcaaagccggaacaccaggcgtcggtgtatttcaggggatagccacgcgccaggggcttgtgactgttgtataggtcgacgatcttccggtgggcggcggttccttctttgacgccgacataacccttcgcgatctcgacgaccttctggcgaagctgttgttcattcatggtcttttctccttcctgggtatgaagaagggcggggaccttcccccgcccttcgtgatttagttctgttcggtccagccgtagacgccgggttcccagacgttcccgtcggtgtcagacgtccagtgtttcccgttatgggacactttgtcgccgatgttgtaggcgtcgtgtacgccgatcggctgtgaccaggcaggccattcctcgccggggtccccgatcttcgtccacagggacgcggccgccggcggcgtccagtccgcttgtgacgtgtgttcctggacacagcggaacagttcgccgccgaacttccggatatttccggctttgtaggcgacagggtaggcccacgggctgaactgactgacgttttcggcggccgtgacgtcgtcgatctggccggcttcggccagggacacgaaggcgatcgacgcggccctggcggcctgggccgccgggttctgtcgttcctgttcctgggcgtccttcatgctgacgtggtcacaggtttcagggttgaacatggtgaatccctcctttacgcgaaccggaccgtcgcctggacgacctcgaccgtctggccgcccttcgtgatcgtgaagcggtaggccaggccgtagcccttcgcggcggtggtgttctggaaaatgtgaacgaagcggccgactttggaagaaatgtcttcccagacgggggtcgtgtcgaacgggttgttcgtgacctcacagtgaaggaccgcgtcggccggaatgtccgccgggtacagggacaggaagaccttcgtcaccatagcgtcggtactgatcgcgcgggacgcggcgatcctggtcacggttcggctgaatgtgatctgtcgcgtggccgtcccgccggcgccgtcgctggcggtgattttcaggacgtgggtcccggccagaaggcgaagccacacagacgtcaggtccgccgtgttctgggcgccgcttgtggccctgtactggcgaagggtgatcgtttcggacccgttagtcagggtttccgtgacggtcaaggtctgggacgacgcttcggcgtcggtgacggtgtatttgtaggccaggggggcggtcttcgcgccgacgttctgattgcttccgctgatcacgggggcggtgttgtaggaaatggccgtggccgtcccggttttatacgccgattccgcgccgttcgcgtcaacggccttcacccggacctggtagttcgtcccggacgtcgggacggtgtcggtgatcgacttcgccgtggtgatcccgatctggacatagttcccggaatcgacccggcgttcccacacatatttgatcgcgttcccctccgggtcggtggacccgccggtcgtgatcgtcagggactttccagactggggggtcgcgtgggaaatgctcgaaggggtggtcggcggttgattccactgaataatataggctccgtctgtgtccgttgtatcagataccagagtatcaggagccaaaaacaaagccggccggacgccgtagttgccataccaggcgtggccgttgcccagactgccgccggtgttgacaccccgcgcgccgtacgcgtagccggcgtacggggtcagaagccaccaccaccagggggacgaagcgttcaggctcgaattggtatattcggacttgctgacagcttcggccgtcgggtatgccttccggctgttcgcgtcggtgaataggggccactgggtcccttctgtgattccgttttcggtgtccccgaagacttcggttcgggtcagaaggcggaccttccgcgtgatctgttcggacccgccgccgtcggtgacggtgttcttcgcgacggtgatcgtgtcgtccagaagggcgttccggaagtccgcttcaaagaaggacaggaagccggcttcctggtcgtattcgttatagccggaccagacgttcgcggccgaaggcggggcgtcggcgctgtgctgtgccttataccagccgccggcggccgccgcgctgttcagccacagaagaaggttcgacacgctggcgcggttgttgccgtaactggcgcggctactgttggagttggaaggctccttcgcgtcgaaacacttcaaggtgatgatcttttccgtcaacaggccgacgcggtcggaagcctggcggccaatgacgaagcggatcacagcgccgttatacttcgtattgaccgacttcacgatcgcgccaacgggtaacgtcgacattcgttttgacatggtattcctccaattcttttttgaacaggtcgaagaacagttcgtccgtctgcctgatcaaatggtgactgttgccgtggccggcgtgaccggtccatgacgaataagactggaccactgtgtcgaaggtgatccggccttcgtccagaaggtgacggaacttcttcaatttccgcctgatccggttcttgctgtcgcggcgtattttgcggacgaccttcccactgtccgtcatgtacgtcctgaatcccaggaagtcgatcccctgggacagcgggaagatcgccgtcttgtgatttagttccaggcccagggggaccagatacttcttgatttcttccaggcaatagatcaaatagtccttgtcctggtggatcaaatagaagtcgtccatgtagcggccgtagaacttgattcccaggcgttctttgatcatgtggtccattccggacaggtacaggaccgcgaaccactgtgaagtgtgattcccgatcgggattcccggcccttcggtggaatctatgatcaaatcaagaagccacaggacgtcgggatcgtggatcagccgacgaagctgtgacttcaaaacgtcgtgattgatacggtagaaatacttcgttatatcgcatttcaatacccagccggccggcccgttctgcctgtaatacctctgcatgaagtatttcaggcggtccaggccgaagtgtgttcccttgccttcctgactggcgtagttgtcatatatgaacgacttcgacagcgcgggtcccaggacatagtcgcacaggctatgctggacgatcttgtccttaaatccgttatacatgatcaccctttccttcggctcatggatcaggaacgtgttgtatggagaagggcggtatttcttcgacgtcagcatatagtgaaggaacatggtgttttccagcgcgttcacttcatagcggacgaccgccattttccagcgtttccccttccgggcgtccagataggactgatacaggttgttgaagtcggacatgacggcgaagtcggaaggcgggatctgtgtgacttcgcttttcataataaaaaacctccccgccgcttgtagtccgggcgtcgtagccgaagccctcgcgtcgacggtcatgtgtttaccctggcctttccggcgtcgggaaggatacggcctcctttgttggggtcctctgctttcgggttcgtcgccctactcggtcgcgttttccaccaaatccggccggacgccgttgttgccattccaggcgttgttgttgttcagactgccgtcggtgttgacattccgcgcgttgttcgcgttgccggcgttcgggggtcaggccgtaccctaatattcaattaaccttccgccggcgcggccggctccggggcttcggcgtcggccttttcggtcggctccttcggctctgtttcggccttataccaggcggcggtcataaacttgacgtccagggtcagcttcgtccaatagtcgaaggtccccgtgtcgatgtagccgcgcttcttcgacagttcgatcagatacagaagtttcttgcaccctgtcagcgcgcggcgttgaagtttcagtcggtcgatcttgtcctgttcgtccaggatcggaaagatttcattcgcgtccaccaggtcgtcgcggatcgccagaacacgatcctgaatccggttcacaatggagaagcggaccttcttcgggaagtgcttcgtgttgtcggtcagttccagggtgtagtcgatcagcttcgacgccacaggaaggacgtgaagcgggctttcagtcccgttcgttttgcgctggaaattgcgccttgttcccatagatacaccttcgctttctgatcaggtcaacggtttcgcgccggccggaatagtcgaagccgtagtcccgaaggacgacggtctgttcctccccctcataggtcaggccgcaaataacgacgctgtcgccctcacagcggccgcacacgggccgaagttcggtgaataggttagataacagacacgacgtttccgacggcgtacaggcgaacggggtcataaataaagccgattcgcggcggtgtccaggattccttcgggaagcccggtcccgtcgtagcctttccactgggccagttgtgccggcgcgaaggtgtgggtcacggtggtccccgtgaagccggtgtccagttgttccttgatcgcggaaatatcgaagtcctggcggcgctgaaccgtttcgacgctgtcgccgttgctctcgttcacgtccgaagcggcgtggacgtggagaagcggcgccgcgtaggcggtcatttgcgcgcgggtcacataggacccggctgtcacctggaccgtgaccgcgctgttttcctgattcgtcaccaccacggcgacgtcgtggacgtggacggtgtcgccttcgtctgccattgacggggtgtccaggaaggaacaggccggaagaatgttgtcgctgtccgggccgtcgatccaggaataggtgaacatgaaggccgcgccgttttcgtccagggcatacgtcgcgacctcgcggacgtactgggccgcttccaggccggcgttcgtcacctggacagggattttcatataggacacgtcgccttcgatgaaggtcttttcgccgatctgggcgtccagcgggacggggttcaccaggtcggacagggtgttcgggctgacttccgccacgccgtcgcccacggcggcgcggatcagggcgacctggcggccttgcgccaggaagcgggtcagcacttcggcccccttgtcggtgatcgttgacttaaatcgtgccattcgggtttcctccttcgggttggtgttcatgcctgaccaggctgaccgttgccgcgcccgcgacgcaagccggccgggcgacgtcctgggggattgcggtctgggtcagaaggaccaggttcgccggaatcatctgtttcaggacggcgatcagcgcgtcgcgctgtgtgtagccgctcaaggtgattcggacaaaaagttcataggcgtcgttatccaggcggaccgtgaagtctttgctgacggtcgacagataggacagaagcgccctgtatgtgtagggaagccggtcaaggtatctgatccggattctttcgcggcgttggtccagggtgtcaccaggggccacagaaaggcccagaatggcttcccaacgggaacacccatattcggacaggctcaccaggaaaaagtcgtcagcggcgtttctgacgtcctggacggccttctggaactccggctgttcggcgccggcgatctggtcgaactcgaccacgtcttgaaggaaaagcggccagtatgctttaagttccatttgtgaccacccccaggaccgggatcgcgtcagcgtccagggaaatattcgcggtctgcccgttgatcttcgttccggtgatgtcaatgacgccgggcacgttcaagaccttcgtttcgatctggctgacgcggacgatcaggccgtccgtgtcggcccaggtgtgggtcagttcgtcgaagtaggactggatcgccgctttcacggcggtctgaacgctggcccaggacgcgccggcgtcaaaggtcaggctgaaagacacgttgatcgtcgtcccacggacgccggtgacagtgacgacgtggccgatcggggccaggccgacgccggtcccctgggtcccgacagggtcgaccgcttcctggacgctctggaccaggtcggccgaagggacggtccattcgctgtccacgaccacgaccttcacggtcccgccgccattccagacaggaaacaccttcacggcgcccacgccttgaagctgttcaaccttgcccttatagtcggcgatattcccgccgaacgcctgggacacaagggacgcaaaatagcgcgtccgaaggctgtcgtcgctttcttcgtcttcgcctgggatcaagatgtcggccaggcgcgccgccgccaggtccgggacgtagtcgatcgggaaaaggcccccgacatattcattcccgacggcgccggcggtttcggacgtcagtctgtactggccggcggccacccgctcggtgacaacgaagttaatgtcgccgccagaaaagcgggttccgatctccacttcacaggcggaaccgtcccccttctcgaagtagcccttccggatcgcgaacttcgcgtcgttccggaagacgcttcgttcctgacacttcttcgtcaggtcgtcgccggtttcggtgtcagggaaggcccggtccataagataggcaagttcgatgtaaaggatcgccagttcggccgccgccggggcgatcgcgtcatagacgatcgacccttcgcgcttgtccacggaagaagacacacgggccagacagcggtccatgatgttttcaaaggtcatattctcaaacaccagttgtcaccctcctttcaacagggatttcgccgaagatcgtttcggcggtgaagctgacgtgaacggtccttttgtcgatctgctccacgatgaagtcggtgacgtccgtgatccgactgtccgccagaagggcttcgcggatcacgcgcttgatttcacttgatagcacttgaaaacttttcccgacgatgtcgttcagttcgattccatagttccaggaatagatcaggtagtcgaaccgttccgtcagaaggattttcaggattgcctgtttcatggcttccgtttcgtcaacaaagccggccacgcggccggcttcaatgtccagtttataggttctggtggtctggtcggccggctggacgatctcgacgtcctggccgatcgtgaccgtgtcctgtgtcggtatcaaggccataagatcacacccttcccagcacaaggaacgactgtccgccctgattccgaagaaggaccacccggtcgccctcggccaaaccgaagtaaacttccgggttcgtcgtcaggccggtcgtctgcgtgtggaacgcgctgacgccgtgggtgtgcggcccttcgccggcggcctgggtcgaatgggaagggacgacgtggtcatgggggtcgatcgtgtgggtgtgggtcggataggcgccggccttgaactctttcatcaggacgatcgcgtccccggaaatgtcgaaccggttgtcgacgcggatcgtcagcggcgacttcttcgtcactgtgccaaacagaaaggccgccgggacgttcgcgttctgcgtctgtccggcgacctgtttcatagtgtctaataggctcatatcacaccacctttaacttcaaagtcatagtttccttcaacagatcgacgcttgtttcctcgactatgaagaaggcgctgacgccgattttcttgatcccgatatacagggcgcggccggcgcggaccgacaggtccatgatcgccttcacttcaaacgacttcttcggccggttgtaaagggccagcatttgaccgccgcgttccttgatctgggcttcgttcatgctttcatcgacgacttcatagttttgaaggacgccccacagtttcatgttctttgaatcctggaagatgtagacgtcccgtttcccggtggtcttgttgtccttcaccagcttgatcttgttgtaggcttcggcgtcgatgtccgattcgtaggtgtagcccgtcgccagactggaatcgccgacgaacaggtccagcttcgacttcgcgacgtcggtgatccgaagggacccgaagtcgtcccacaggacgaacattttccctgtgttgatcagggtgtggtccagggccttcaagacgatgtcgaaaagggtctggccgtcctcgatcatggacgggattgcgtagccggtattttccagggcgccgcatttcagaccgaagtcggcggcgatctgggttaaaatctggtcggcgcgtttgccgttgaaaacataggtttccttgttcttcttcaaatgccaggtctggtcgtaggctgtgaccttgacctgttccttttcgtcatagctgatcttcacgacatagccatagaaaaggccggtggacccgtttttcaggacgacgatcccgccgtgggtccataccacggaatcgtcggcgacgacggtcagttccagggaagcgggggaaccggaccgtttcgtcgaccacttcgcggcggacgtcaacgtggtcacgtcgaaggcgtcgccgctttcgttgttctggtacaaaatagaaatgctcatgggatcgtcaaaacctgtcccgcgtagatcagattcgggttcgacccgatcgtccccttgttcgcgttatagattttggtgtagtcgcttcccttgccgtagaacttcttcgcgatattccacagacagtccccaggcttcacggtgtaggtcttcttcgcggcggccttcggcttgccggtccgttcaggctccttcgccttcgccggcttcttcggctctgccggaaggacgatcttccggggggaatagtccttccattccgacagcttgatcgaatagtaaaggtcgcccagttcgccggatcgttcttcatagtcgaaggtttcgatccccattcggacgttaatgtccaggtccgttcctgtgatcagaagacggatcggcgtcagggtgtcccgcgcggcctgaatggcctggacgatctcgaccgggtccctgatctgccccgtcacatagggggcgtcatggaccgggaagaaacagtcccaggccacagtccgaaggcccttcttccgaaggcgaaggatttcgcccagttcaagaacggtcgttgtttcgttcttgccgggcgacgttaccttcaatttagcgggaaggacgggaagactgacttcccgtccctctatgatcagggccattccatagttcgtcatgcgtacaccccctcggcggccgcggcaaattcatcttccagtttcgcttcgatccggccgactacttcgtcgacgtccaccttttcactgatcttcgcgtccacggccacggtcggggtcagggtcacgaagttctggacatagcgcatttcggcgacgtcccgaaggaacttcaagtcttcttcggctatgttgacgtcttcgtccacggaaccgacggaaccgacatggtccacgtttccaatgtcgccggggccggctccggtagcgtaggccgcccagtccggttcggtgcttttgcttccggcggcggccgattcggcctttgcggcggcgatctccgcttcccgctgtgccgtttccgcgcgcgcctgggccttcatggaatccagggccgcgtcccggtctgcgatctgctgattgatctgatcctgataggccgcaaggtcggcggctctggcctgtttcgcggcttcattttcaagctgtgccgtggtcccgaaagtgacctggtcgatcagaccgatgttcacgccggggattttgttcagggtgttgataaagccgtttataatgtcgattgccccgttgaccatgttttgaaggatcatcaggacgccggccttcatgtcgccacagaagttctgaatattcatgctgaccgtggcgaaggtcagttgtaaccggttgaacaggttcatcacccagtaaacgccggtcataaagccgattttcacccaggaccaggccgtcaggatcgcgttacaggcaatcagccaggcgactttaatcccgccgacggactggacccacttatagattgcggccacgacgacgccgatcgccagggcgatccagaacagggggttcgtcagaagcgtcgtgaagaacgcctgggcggcgccggtcgcgatccatgtcgcggccgtctggattcccagggccagggcatagcccaggacggcggccgccaagccccagaagattggggcgatcgtggaccagttgtcgtaaatccactgtgcgccctggccgatcatggtcaggacaggggtgaaggcttccaggatcgtattcttcgcgatcgtccagacctgggaaaaggtcataggcatttgttcaaacttcgcgttgatttcgtccgccgacgccaacatggcatttttcacgatcgtcgacgtgatctggccttcggcggccatttcccggattttcccgatagggacccccagatagtcggcgatcgtttggataatggtcggcgcctgttcaaagacgctgttcaattcctcgccgcgaaggacgccggacgacatggcctgtgtaagttgcaacatggccgcgtcgattccggcggccgacgtgccggcgatcgtgaactgtttgttgatcagttcggaaaaggcgatcagttcttcgttgctgttgaaggcgtccttcgccataattcccattttggaaacggcgtcggtcgtggcctggtaggaagcgcgcgaccggttcgcggacgccatgatcatatcttgaagttctgccgtcgtttgaaggccgtcgttcatcaggtcaagacgggcgcgggtggtggtcatgctgtccgccagttccacgatcttcttcgcgctgaacgccgccatagcggatcggatcaggccgcccattttggaccagacacttttcacccggttcgcgccctgttcggcgcgttcctggcgttcgttgaagttgtcgacctggcgaccggccgccgcgatcggggccgcgcttctctcgaagggcgcccccggatcgacggtttcggtcagggcgtccgtggcgtccagggaccggttcagacgttccgaagcgttgatcatggtgttcaggcgggacgtcatgcggtcctggatcgtgaattgtgtgtttactccggccacgttatcacctgcctttcttgcccttccgtttcgccttcgccgcttcctttttctccttctctatttgaaggtcaatggaagcataaatgaaggcccgttcccgtctgggaagggccagaagttgtcccggaaggattttcagccggtggagggcgtaatgggcgtagaccgattcgccgtcggcgtccgcgtcatttccgccccccgtgattagttttttgcttcgtccctcaaatcgttcacgtcgtcagcgaagccgttgatctcctggaccgcgatcagaaggtcggtgtactggccgggcttcaaaaggcggtcgatcaggtcttcggctccacggacgctgtatttctcttgaagggcggcgtccttgaagttgggttcgacgcaacaggccgccacaaggcggctgttgtaaaggtcggtgtcggtttcgatctgcttctggcgggtcttcttgtcgaagctgatcttctgacaggtcttccggattgccttattctccgcttcggtgatagacttcaccacgaaggggaagggaaagggcgcgatcgtgacttcgacctgggcctgggccgcgacgtcctgttccataagaaaatcttgcagttttcccattttcgtttcctcgctttctgtttagaactgggtgaagggggtcaagatgtcgaagtcctcaaaggtgaagtcgacgtcttcgtccagggggtcgtcgctgtcgccgtccagcttcgccaggaccgtggaatccaggttacacccgatcagaaggaccgactgtttcccggcggaagattcggggtcgtcgttctcgacgaccatgtcgaagtagacgtcgacgccggtttccttccactgtttgatcatgtcgcggaacaggggcgtcaggtagtaaagggtcatggacccggttccgttgccgccggtggtcttgtggccggtcatgcgcttcccgatcgccttgacttcggacttcgccttctcaacggtggattcgatgttcttcgccatgaaaaggtcttcgttgttgccgttgatcttcgcataggcgcggccttccttgccggaaatggtgtccggcgcgttcagggttctcattctggttcactccttccgttagttgacgacagtagtcatatacagtttttccatactgtcgttcggtttcagggcggaatcgacggcgacgtcgcgtttcccgttgccctgctgaatggtgatgtcttcggacttgaagtcgctgatcgcgtcgatcccctgatactgtaaggccagggacacaaggtcggccttgaaaagctggcggccggtgtcgctgttggtcacgcggccgatgtaggaatcgccgaagatacgggcgacgtcgttcgcccagccgtccaggacgcggatcacgcggttcgacgtccagtcttccgtcacgccgcccccgaaggtggtcaggctgttgatgtcggtcaggacacgggccgcgccgttgtccgcatagaaaacgaactcgccggcctgaatcgccgcttcaaactgggacttcgtatatttgatgtccacgtccacggcgtcgtcataggtgtcgttcgtcaggctttcgttgatttccgccccagcggaagcgccagccacccaggcgaccgccttgtcgccggtcacggtggtcccgtcggacaggacgacgccgtttttgacgttgatcaggccgatgttgtccccggcgtactggtacaggacgccgacgatcttcttcccttcatcgtcgcgaaggcgcttcacgaaggccgcatacagggccttgattgtggcgtcggttccgggatagccgatcacgctgaaggtttcgacctcgaagccgttcagggcggccgtgtgggcgccgccgttgacggtcccgttcgtgccgccggtcagcttcgtcgcgacggccacttccagggcggaagcggacccgaaggtcacgaagtcattcgctttcaggccggccgatccttcggtcttgacgacggtctgggtgtccacgaccattccgtcaaggtaggtcacgacgtcgaccttcgtcgcgtcgtcagcgttcgccaggacagcgacggcgacgtcgtttccgcgcgttccgccccaggcggccgtgacggtcattccgccgatcgtggccgtggccttgtcgccgccggaattgacacgatagatcagaacggccctggcgcgtttcatggcttcacggaccagaaggacggcggggtccgtcgggtcgtagccgaacacgttcagggcggttttgttgaagtcttccgcatacatggaaaagaccttgttttcaggcccccagttcagttccaggggaagggccgcgatcccgcgcgtccccattttcacgacgcttcccaggctcacaaagttgatgtatgcgccgggaagaatcttgttttgaacggtaaaagttccgccaccaataggcataactcacaccttcctttccagaaaatcgttgaccaggccgacggcctgatccttcgtgtaggtcttcccgtcttccagaacggccatgacggcgtccacgggaaggcccagggttttacttttgaccagttgatcctttgtgaaggccggggccggcgcctggtctgtgccggcggcctttttggtcgttttcgccattacttcgtaacctccgtatgttccaggtcttccatgaacgggatttccggcggcgtcaggacgaagaagaagtccgcgtcgaaaaggaactggaagacgcggctgttcccgtccggcctggccttctgcccggtcagacggatcgtccttgtcttgccgggggcttcctggaccgtcagttcttcaaaattgtcgtacatttcttcggcccatgcgttgaagtccattgtgtccttcgaccgaaggaagtacaggacttcaaactggatcgaccgtttccggcgccggtccaggtgcttttcctggttcgattcgatgatcccgacgaagaactggccgtcggaatccttcgggatttcgtcgacatggaccttccggtccggccagattccggtcagcttcgcggcgaccgcttccagaaacagattcaacgtcacgccagatcaccttccttcaccttgatttcctggtgtgtcgcatacagggaagggcggccgacgacctggaaggacagaagaatctgactggaagggttgtcgcgtccgaaccgtttcaggctcacactgtcgccaggaaggaccagaaggtcaggcgcggcgaagatcacggcgtcatagtcgacttcgttctgtgccttcgtctgttcgcttttgtcacttcctgaatacgacagcgcgcaaatgatttcactgtaaatcacgccagggacggacttcgtgatcttgttcgcccccgtctgttgggtcgttctggtgatcgtggcggtgtcttcgtaggtcagttcgatcgcggcgcgctctgcgccagggtttccgaacatatagatcaccaccttaattttcggtattcgttcaggacggtccgccagccgaagaagtcgcttccgtccgcgcccaggttaaaggtcgacgccgatccggaagcgccggaagcgttcgcgaaggacgtctgaacgtccccgcgcttcacagacgcgaccggaccggcggccgcctgggtggtccccaggccggcggccttgtagtagctgacacacatgacgatcaggggcttttccagcggggccggaagcgtgtcctggttgatgtaggacaggaccagggcttcgaccgtttcgatcacgaaggcgatcaggtcgtcctggtctgtcccagtgatccccagaagggccttgaccttcgccagacggtcgtccttcgacataaggacacgaaggacttccgcgcgttcaaggtcagtcaggccgtccagggaagaaagaatctgatcaagcacgtttccaccacctttccggcggccccggtttactggttgccgctgttcgcctggatcagttcgatgatgtcgtccttcgtggcgccgtcagggacgtcgattccggccgcctgggcggccgccagaagttcgcccttattcatcttcgacaggggcttcgggccgtcctgggcggcgtcctggccgtcgtagggggtgtagtcctcactcttgcgaagctgattcaggaccatttcgttcttcggttccaggatcgcgccggtctgcttattcttgaacttcatgtcggttcctcctttactcggtgacggaataggtgaagaccaggtcaggggtcaggaccttcgttccgaagtcgtagaacatggacacgccgtagtcgttggacagggggatcttctccgggtccttgtaggggtaaatgaccgccggctgtgcgatcgcgccttcgatcataatgaccgccttcgcgttcgcgggaaggaagacgctggaatagacgcggacgccgtggaaggtggtgaagtcttcggcggcggtgtccacgttcgcattgtggacggtcttgtccaggtagtcgcgcatatcgccatagaaggcgggggacaggaccaggcgcatgatgttgcggggaacgcccctgacgaagtcgttcttgacggtttcaagggtctggatcaacgcttcgacgatcttccccggatcggttgcgttggcgggggcggtgaaggcggtcccttcgtcgaaggccgcctggaagaaggccgtgtcgaactctgccgccacggtgtcgacgtggttgtcagcgcgccgggccatgatgtttccgacgccgaaggtgtccaggtcgaacttcgcggcttcctccacgatctccttgtgggtgttcaggttcacggtggtcgggggaacggtcagcgcggttcccttgccggcggctctggcggtcccgtagtcctgggacacgctgttcttgaagcggcgatactcgacggacccgctggcggggttgccggtgtaggactgggatttcaggccggacgccagggtgtccttctgaatgttctggatcaccagaccggacagttcggccagttcgaccttcgtcgccccgttctggatcaggctgatcgctttggttcttgccataataaaatcattcctttcgtgtgttggtgggttggtgggttagatcacgacaggaccgtcgacctttgaggccggctcctgacgtgcgccagggtcagcgggcttcgcgcccttgatgttggggtccttcgacggctcctgggtcttgaacagatacggcttcgattccttcaaaggtttcagaagaccttccaagtctgttttcaggccgccggcgtcgtcgacgtcgatcttgtccaggtccagaagggaaatgatgtcggccggatcgtgggccttgtcggacagggccagacgaagggccgtgttcttctggattctggcgatttccttctggtggtcggtccgaagggtgtcaatcgtggcctgggcggccttgacgtcgtccgcgatcttcgcgggatcgccggaccctccgatcgccttcaaggcttcggcggcggctttcagggcgttttccgcgctgttcttgccgctgttcgcgccgttgaacttttcggccgggacgaaggaaccgtcgtttccgacgaccaggtccacgtcctttccgtccttgcctttgcctttcagggccgcttcgacctggttcgccaggtctgcccccagaatggttctgacgctctctgtgatcatggtggattctcctttctgttcccgctgtttatatcgcgacttccacgcgctttgcggtcccgcctgttcgccgggcgggggcggctgaatgggtatgaaaaaagcgccccccaggacggggaacgccattttcaacgaaaaagggtgtaataaaacgccgcccagacgggcgacgtcttattccgggtggtatttacacttcaaacaggtgttttcatttgctttcacctgttcgggcttgatgtcgttcggaaggaaccggtctggcgtggtcccttcggcgaccattgatatatcgaaacattcgtccccggtgacttcccggccacacaggggacagaagacggtcttctggttcattttgatccctccatagcgtccacggcctttctgaccttgtcgtcgaactctgattccttgaaggcggtccggatcacgccgtcgccgacgcggacataggccgcgccttcggcggaatagtagttgacgaagacgtcgccggtccaatgcttccgccttatggagaagccggccttctgaatgaacgccttcgcttcgtccagggtgacgccgtggcccctggcggctatgtgtgccgcgtccagggtcagcgtgtccagatcgaccggcgccggcgggaccctgacggtcccgtggattcctgtcgccctgatccgcttgtaggcgtcgaagtgtcccctggtggattccgggacgcgccccttgtaggaatagaaggatttcaggtcggaccaggcgtccgggtctgtgtacttcatttcctggaaggcgtcaaggctgacaggggcgtccgatcccaggcgttcggcgtactgggtgaactgggcggcgtcggtcttcatattatacgcctttttccgctctgtttcaacgtagccggcgccattctgggcgacctgttgatcataccattcttcataggtcatattctccggcatgggtttcccggaattgtaccagtccagggcgtcgtccgggtcatattcgaccgtagtacaacggtcattcgggtgcatgggcggatagttgacgccggactgggcgtccttgaccttgaagtgtttcccgtccagggccgcgcacgtttcacaggtccgactgtccagcgtggcgacgtattcatattcgtcgacgccggcggccttataggcggccttgtccgcttccccgtggaaatggttcgtttcggtccggatcaggcgttcggcggccttgtaggactggcccattctggcggacagggccttcgacatttcggcgacgcttttcccttgcatgacgccttgtgtgatcgtttccctgacgtggaacagaagggcctgtttgttctgccatagcctgtcggaaaacatagccccggaccagggataggacaggacgtcttcgaccacggcttcgtccagcttcgcaaactccgccatgaagccggcgcgggactgaatgtcatagacctttttgtagtagccttcctggaaggtgtcgccgaactccgccttcatctgggccacgccctgatcgaacagatcgttcagtttcaggtcaatctggcccagaagggcttcaaggcgggaaatgcggctgttcgtggacagggcgtccagttgggccgtcagaagggccttgacatggtggtccggctcactggcgatcctggcgacgtattcggccagggttgccttccattcctggaactccttccgggtcagaaggtggacggcctggtcataggtcaggccatacttcccggcatacttcccgtagaagtcgccgatctccttccggatcgccttcgcggccgtgtcgtattcctggaacattttcgccgtcaggtcgacgccgcgaagatgggcttcattttcgcgctgaatggccctggcgatccagtattctttattccgcatttacgccaccaccttttccggcggctccttcctggccttcctggcctcctggggcctattcccggcgcccagggaatcgtcgaacaggccggcgccgaagtcttccatagcggccttcttttcggcgtcaagctgatccagttcttcgtcgacgtccttcacccaggggtgattttgaaggatcgtccgcttgctgatcaggccgtcactggtccgggcgttgttgatcacgtccgtttcattgaccggaaggtccatgttgaacagaatgtcgaaggtgtcgccggtgaagtcgcccttcccggtgatctggaagtagacgtcaatgaacagtttcagccggtggaaggtgtcttgaagttcggttcccagggaatcacagtcggcgtccaggtccatatatcggaagttgatcgccgttccgctggcgttccccaggtccgggtccttcgtgtccacggcggccgcgaagtcgtaaatgtcccggcgctcattgtccaggaaggccatgacggcgtcgatgttcagatcggcctgtaatttgtcgaccccgccgtcggacgtcaccttgatcgccatgtgttccttcaaatccttcaagaactccgccagatcggttccgccgtagttccgaaggatatagatgaacttcgccacgtcccgaaggacgtcggccgtgacactgttctgccagttgatgtcgtcgatcaggtccttgatgaaatagcaaaggggaagttcttcttcgttgtatttcagccacgcaatcggaacttcttcccagttgtagggcttttcgttgacgacgaagtgtggttcggtccagtcgttttcctctgtcccgtggtccttgtccacggaaaagtccccggcgccggtcccggcgaaggcgtcggtcttgaaatacttgacgccgccggtccaccaaaactcggcgtgtgtgatcgtgtgcttcctggtcccgatgtaaatgacctgatcatagaagcgaatgaaggcgtccagcttcgttcgctctgaatcccgccacagggggacgacctctgtcgaagggacgcgcatgaaggccaggcggccgtcgtcgtcaaaatagggttgaatccaggcaatcccggacttcacagcgccttttcccagggacttgatcttccggcggaaggtctggtcgaagacttcgttcagggccgcgccgtatttttcgctttcggtgtccacggtccagggcttcgccagaaggtagttcgccttctggtccaccagttttttcaggatcggccgttcgatcttggcgttcgacctgttggcgacgtccacggtcttcttctggacggccgaccggtttctgtaatactgttcggcttccagaatgatcttgtactgttcggacgccttgaactccctgatttcctcactgacgatctgggccagggtcataggcgccttttcggggtccgacaggatcatattgatccggtccatgacggacagttccattcataccacctcatttcaaaacttcgatagacgatccacggcgcggacgctccacgccatagcgaagggccgccatagcgtcgtccatgaactccactggttcgtcgatgtaaaggcccgtggtcgggtcttttttccatttccactgttggacttccttcaaggtgttcacacatgaagggtgaatgtggaccttccggcctttcaggaagtcgatctgggccttcacgcttccaggctctttcttcacgggataggcccggaagccggccttctgccatgtcctgatccggtccggctctgctgaatcacagaacatttcgacgcgggggtcgacgtgggcctgacgggcaaggctgattatttcttcggtgtccttctcgaagacgtatatttcagacgtgacatagatttcgccgtccttccagccgatccccaggatcgcgtcggcgtggttgaagccgaagtcctggccgtaatagaagccgtcaaagtagtcgcgcccggtcgggaagtcgtggacctcgaagttcgtcaggatcaggccgcccagttcgccccattcccccaggccatagacacgatacccttccgggtcttccttcttccggcgctccatgcggcgggaataggcggggtctatgaaccggtttgtcttataggtcgaatggtgggtcaggacgtccggatcggccttgtcaaaataccgggccttgatccagtgtgtcgcgctgaccgggttgaaggtcattgtgatctggtagaacagattcgggttgacgtcgtccaggttgccgcgaagacggtcgtccagaatgtcgacgtcttcggaaagaagttccgtcgcttcctcacaccatatccagaccagttttccgttcttgaaggtgatcgacttcaccttctcacgctggcgctgatccttcacgccccggaaaatgatccggtttcccgtgatccgacattccagggacagggggttcagattgaccttccagaagcggtcggcgtatggcccgaacattcggtatattgccgcctgtaactctgcgaaggtgctgtcgcggttcgtttcctcaatcttccggacgactaacaggttcgccccccggaaggccgggtcagacagcttcgcgacgtagtcctgggcgatattgaccgacttcccggaaccggcggaccctttcagaatcctatatcggccgcgccactcattgacagggcggaagactgggttaaactgggccgtcgctctgaactcaattcccgccttgctgaccgtagtcataattgatcaccaccgtcacgggcgccgcgctgtccgggtcgtccttgaacattcccaggtgtcgaccgcacatttccaacgctttcagcttgtcgcacagtttgacttcgcgttcaatggcctgttcgatgatcggttcgccgtcttcgtcgaagtccttgtgtgggacatatttgaccttcattccggcgatcgcggccaggtcgtccttgctggcgtcgggcttcacttccgccgtgttcaggtcgatcacgtcagaagggtcaacgaaggcgatccggcccagttcccgaaggacgcggtcggcgttgatccccgtccgcttcgaccgttcggccatagcggtttctatgcgcgcgcggatttcaggttttttcagtaattcacttccgatactcccggcggattccacagaatagccggcgcggatcgcggcctgggtcgcgttcaggtcgatcagatattcttcacagaagacttcattcttcttcgtcagtcgtgccacgattcttcaccttcctttctgtgtcgtggttgtatcagggcgacaaaaaaggaacgccggtgaagacgttccttctttgtgcccctatgaaaaaggagggggaaccgggacaaggttcccatgtaccacaataccatataagggcattgtgtaaaagtgcaagtatatgcagacatttgcaaagatgtgcaatcatgtgcaaaaagatttccgccagggggtcttcatttgatttccccatacaggcggatcagcttccgggtcagccggtcgacggcggtcttcctctgacggctgacggtcgacacgtcgacgcccagggcttcggcggcctgttcgtaggtccggcgcgggtagtatagcgtcagaaggacgatcttcgacttcgcgtccatgtccaggacggcgtcgtgtacgcgctcgatctggcgctgtcgttcttccagggcggcgacggctcttttcgtccggtctgtccggcgctcaatcgcggcggcgaccttcacaagaatcccgtcagggtcaggggacgactggacgcgcggcgtgtcatagcggaccccacgcgggtatgctctggaccggatttcggccaggtcttcttccagggcggcgcgctctgcgtcgatctgggcttcgatcgtccgggtttcctggtcgtggttcttcaagatgtcgtaaacgcggccggtggtcttctccacgctgtcccgtttggtctgtttggcgtccatgtcgtttcaccccctttcctggtgtcagaagggaagatcgccggggtcttcctctcccagttcttcaaattgtccgttggtcatgtattcggcggccacgcttccggcttcctggtcttccggggcgcgcctggattctccgaactctacttcgtcggccacgacctcgaagcgggtccgtttgttcccgtcgcggtccgtgtagggcgtcaccctgatccggccttcggatatgatcacgcgctggcccttgtggaaatacttcgccacgaactccgccgtcttccgccaggcggtgatcggaatgaagtcagcttcgtcccggttgaacttccggtccacggccagggcgaaggacgccacggggacgccggccggcgtctgtttcagttccggatcgcgcgtcaggcgcccggacagcttcacactgttcaaattgaatcaccttccttccatttctgggcgaacttcgtgatctggtacagttcgccccaggggtcccgcttctgggccagcttccagaagaacagggccaccccgattttcagggattgccatgtcgtgatccttccggacccggtcgccagtttgcggacaaatgatttcccatgatagcgaaggcaagcaaacgccaccacacacgggatcgcctggtcttcgggcaagtccaggacttcggcccatttcttcacggcgctttcgccgccggcggggaccttgccggtctttgtttccttcaatgtgtcacccctttcgcggttcctactttcatactccggacaggggaacggctctgactggtagcacttcgcgcaacagtccggacaggtttccaggccgtttcgctgatatggacaggcgaccgtcaccttcacctggcggccgcacacggaacaggtcttcaccacggggcgcctttccgcgcctgtgcgaagatgtatgtcccgatttcctgggggtgtcgtgtcacggctctcgcgatccggcggcggaagtccttgtcccgctccatgacgcggatcgtcgcgaagggaagggtgaaggtcttcctggtccttcgtttcaggccgtagatcgcccccaggcggtccagggcggttccccttgccggtccgggaatgtgtcgcgcctgtttggcccacaggaaggcccccacggcgcccaggacggccgccagggccaggacgggccagttcaccagtccggcgattccgtggcccccaggggccgccaggaaggccacagcggccacggcgccggcggctcccaggaagaacgccgaaaaggcgtccttgatgtcgttcttcatgtcggcgccccctttcagaacttcttcccgtgtttgaacggccgggtttcgttatactccattttcagggcgatcgcggcttccaggtcgattcccaggtgtccgcacaggtccgcgatcctgatcacggcgtcggccagttccacggccacgccttcgggcttttcgcccttatgctctccgaccgaccaggcgggcctgatttcaggaacgacatttccgtccgcctgtttcgttggaataacaaaatacaggtcaggccgaccggcgcgggcttcttccagggcctcggatagttcggaatgaatcagggcgatcgccgttccgaactccggggccgggtcccagaatccatgttttaccgcgttgtcgtgggcgcgggttacgatttcagaaatattcatggtgaatcctccttcttcatgctttccagtccggacacgtcatgtttccgtcatacgggggatagtccggaaggatcagtttgtcacaggcgtcacagccgatcagggtcccgcccaggcggaccaggtgtccacaggtcgcgcagattttcggccggtctgtcattttccgtcggatcgtatcaaggaacttttcttccttcatggacgatacccccggcggccgttccttatgattcgggcgaccacggcgtcgaagggcttcctgggcgggtgttccaccttcggcgtgaagtccgggcaggtcgcggcggtcgtgtccgggtgtcgttcgtgctgatccacgtccagggacccgtgaatctcacagttgcttgattcatagccacagaacagacaggcccggaagtgatcacagtcctgacaggtgacgcctttattcatagtcgtcgcccccttcggaatacttgaagtcgatgaaggtgtcgtcttctatggaaaaattgtcgctttcccaccttgcttcacagtccggatttttgcaagccgcgattgccacttccagcggcccacagtcgaccgttctatatcgcgtggacacttttcctctttttgtcgtttcgtagtcgcgggaatattgatacaacgccgacacgacgattttctggccgcacaacggacagcactttcgcgggattccctgtttcatgtctgttcctccagcttcgcctgtgcgtcctcggccgtcaggaagaccgtctgaccgatgtcgttttccgtgaactgcatggaagaccaggccgtcgtccccaggcgtccgcgaagaacgctgaacgaagtcaggccgtccgcgccggccccgacgaacatgaccgtcgccgacatgacgcgccggcggtggatcacatagaccgtcccgttcggcttcacggggagaaggacgccgccggcggcccggaaatcggccagaaggtcccgcgccaggtagtccatgacgcccttcccgacttcgtaggtctgccggtgttcgttggcgtggaaggcgatcctggccttgatctgatcgatcagggcggtttctgctttcacgcggttgttttcaatatcgttcattcgatttcaccttccttccagtattgctttacctttccgccgacgatgatcggtcggcaccattcacgttgaaagtcgcgccacgccttgtctgtttggccgtccttgtcacggtataacatagcgtatgggacgaagccggcctggatcgtctggatcagacgtttttccgccttctcgaaggtgtcgccatgatagccgatcaggacgtaacaacacagggtatgactggcgactgtgaatccggcgttccggaaggtttttcccgcttcgatcagcgggtcaaggtcgtccggcgtatcataagcgcaataaagacgttttgtcttgacttccttcaaaagttcagcttgccagggtttcagaatcttcgcttcaattccgccggtgaagattggccgttccggttgccgtttcagcatatcgcaaacggcgcggaaatgggcttcggacgtggcaagaatattgtcgtcgcagacgttccagccgtctttgatctccaattctcgaaggccgtcacaggctttccacacagaacagaaccaacatttgttaggacagccgcgactggtgaaggtatatccaggcttcatgtaaaggccaggtgtaaagtccccgtttcgatctccgaaggcggggccgcctattttgaccgggacgcccagccgttcccatgacctgaccagtgattcagctttcggtatatcataggtaaatgttacgctaacatggacttcgtcgatcccgccgccggtttgcctgatccgattcggaagggggccggtgaaggccaggtcgtcgtccggtgttgcttttgtcttcctgggaaacaccctggcgatctctttcccgtttacgatcacaggaccaccacctttccggcggcccttgcggccatgttttccgcgctcttgatctcacaccaggctgaaaaggccatttcccggaccgcttcgaccgccaggatcaccaggtattcgtcgccgtagccgtcttcgccgtaggcccggccggcgcgtccgttgatccagcccagcttccgccgcgctctctgttcgaccaggtcgaagaagacgggacacaggtcagtcccgacttcttcttcgaccctggcctttaaggcgtcggacgtgatcattcgtcttcgtccgggtccttctcgccggcggcgatccggcgaaggacttccgtgaccagttcctttgaagtgaactcacccagaagggcctgattcggcagatcgacttcgtcctgttccagcgacaggcagatttcagaatccacgaataaagccggccggacgccgtagtagccatcacaggcgtagcggtagctcagactgccgtcggtgtagacattccgcgcgtagtacgcgctgccggcgtacggggtgatcgtccattcccagtcgtcgatctctaacaggccggcgtcgtagtatttccggaccagggcttcgggaagcatagcgactttacaggtcacataaccgtaacggttcacgccgtcgctggcggtcaggtcccaggccgcgtccagaatccggtcgaccgggatcacgccgccggcggccacggccgccaggaagtcggtgttcaaatcgtccttcaaggtgctgaaccggaagtcgttctggttcggttccgggtcctggcgcttgtaggtgaacggccggacggtgaagggccggtttccgatcggttccgtggccgccagaagggttttcccgtccgcgaagtgttccatgaccttgaccttcacggggccgatgtcgaagaaggcgccgggcgccaggtccttaatttttacttttaccattgtgttttcctccttcatattcttcgatcgtgacttcgacacgggggttcttcgggtccacggcgaagtcgtctgtgaaatgctcgatttcagcccaaccgtcattccgaaggacgccggcttccaccagggcgtcctgaatgaacttcttcgcaaacgcgacgttgtccttgtcgcgccggcggctcggctcgatccacaggtaatggatcaccacggggcgggtgaagcggaccccccgaagttgggtctttaccatgtagccgatcacgttctgggcttgctttttcatggacgcggccttgtacttgcccttataggaccgttccgcgtcgatgtattcgttcagccctgggagaatcccagggatcgtcagtttgtacttcctcatagtcacgccccttccaggcccagaaggcgccgcgccttttccttccggtcgtttgcgttgcttactctccgggattctccggtcagtttcagtcggatcggacacatttccaggacgcggtcatagattcgcttgtgggccagggtcggcgggttttgaaggtccttcatggacagattcgtcgtgacgatcaggggcttccctgacctggccctggtgtcgatcacgttgtagacctgttcgacggaaaacgccgtgtcccgctcgacccccaggtcgtcgatcaccagaagggaatactgttgaaggcggtcaatccgcttctggcgttcgtcgtcgaaggtcccttgaagcgtgttcaggattcgcgggaagttggtgacgctgacgctgaccaggcggcccagaagggcgttcgcgatacaacaggccaggaaggacttcccggtcccgacgtcgccatagaacaggattccgatgttttccgccttcatgtcgtcccagttctggacgtatttcagacagacgtcgctgacttccgggttccggcggtcgtcctggccgaaggtgtatttcaaataggccgggtccgtgatcccgtcgcggcgaaggcgttccatgcgggtttgaaaatcctgttcccgttgggctttttcctgggcttcaagccgttcctgttcacagcggcaattccgccggacccgcatgacgccggaagggcgaagatcggtcgggacgttgacgtccatttcctttcgctccccacaggccccacagcacaggaagccttcggcgtctgtgtagtcgccctgattctggaccggaatcgccattttctgtaaaacttcgctgatagggttcacgggatcacccccttcccaagaagtcttcgtcgccggcgtagttcttcggtccagaaggtcttccgggggacgggggaacgtccggacggtcgtcttcctcccagcggcggccacgaaggaacgtcgccgggtagcagatgaactttccgtcgtcctttgtccactgttcacaggtcttccagcgttcaacgccggcgacgatctggtccaccagggcgtcgtccgggttaagctggccccaggctttcagggcgtcctgtttcccgacgcggcggggataggcggcccagaaacggtcaaatcctgacggctcacccttcgccccggttgggcgcgttcccgtttctcgtttctcgcttccgttttcgctttcgtttccgtttacggggacttttgctttcatttgatttccattcgcctgtttgcaaatgctatcaaacgatttcggaagcgggtatttgcttttcttcgcgcgggtctgctggtgtttgtcccaggacagaagtttcaggtattgcttcccgtcttcctccgacgtgtaggtcccgaccatgccctgaccgaccagttcggccagccaggactgaatcttcttttccgtcggggggttcagcgggaagcacatagacgacagaatcttcgggttcccgtaatacaggccgtagtcgtcggacttgaccaccaggcgccagaaaaggcgttcggcgtccgcgctgacgccgcccagcgattcgctggtggtgatagattccttaataattcggcttggcacatttgccacccccttttacaatgccttttgacaggtccgacaggcttcgcgtccgtacttgcgaagggaatagtcctgttcggccttcgtaatcggtccgccacagatcggacacttcgcgtcgccgccggcggctccctgtccagggggcggcgtctgtgcgctctgctggcccctggcggcggtctgggttcttccctgggtcctgggccttccggccgttccctggccttcctggcccgtcttgggcggtccctggaccctgttcttcatgtcgaaccggacggcgccggtccggtcggtgatcaccagttcacagatttcccgccggtcattgtaggcgacgtgtgcaacggtgaaccgggtgtttgaatagcatttcaggacttccttccggccgttctgctgtccctcggaataaaactcgttgtcggccagttcgacgtaaatgaaggggccggtgtaaagttcgcggccgatcccgacgttaaagccggcgcgtttgaaggcgtcggacgcctggcccttttccttttcggtgttgctctcgacgccgacgtcctgtttccggacccagacgcccttctgggcgtcccagatgtcgatattacagaacagattcccgttgatcacttcatgggtccgcgcccagttgccggggccgaagacctgatccagaatccgcatatcgacccgcgcgtccttgtaaagcaacaggacggcgccgacctgaccggaccgcgcccggctgacgctctggacccgacattcgatgtcggcggcggtcagaaggggaatgttgtcccagcccaggggggcggccggcgccgcgccctgatcattttgtttctgtgccgtcattctgggccaccttcctttcctgataatacgaacagaactcacaggcggaacagtagtccgcgcatttcttgtcttcgcccaggcgggtttcgatgaagtcgccgccgttgtccgccttccactgttcggcggcttccttgctgtccaggacgcgaagggcggtcttccggcccttcttcataacggcgaacttgtcgccgctgttgaagcgttcgtccggggtacaaaccggaaggtcggcgtcgtccagcttctcggcggccgcgatctcggcgaagcgtttgtgaagccattcttcacattcggcgaagtcggcgtcggtgaaggtgaacttcacggtgtggaccgggaacttcgggtagtcgggtttgattttcgcgtcgcgcttgctgtgatctttcaggaaggccacgatctcgccgccctgggcgtcgaagccaatctggcgtaacatatagcaatagatcaaggtctggcggcgccagtcggcgaagtcgccgaagatgatcttccagacggaagcggtcttgtagtcggtgacgatcttcgtcgcgtcgtcatacaggtcgaacttgccggacaggacatagccgtcgaaggggaccttgatccgttcttccttgatctgggtccccgtttcctggtggtgttccaggattccgtgaacggcggtcccgaacagtaaccagaccatgtcggacacgtcgcgcgtgatctccgtcccgtggcggcgttccagaatcgtttcgcgggtccctttcagaagggacgtgacgcggtattcgttgggggcgatcgggtattcgtcactttcggccaggctgacaaaaggggccggaaggttcagggtgttcgtgatctgcattattcggcgccccctttctgggccagggccgcgtcacgttctgcggccaggctgtcggccagcttttccagttcggcggcctttgcttcggcggcgtctgcgcgcgccttttgggtcttgtagtcctcccaggtggacgcggactggcgctgatagaagtccaggtcccggcgaagttcttcattctcgaccagaatgttcaggacaaacgccttcacggcgtcggtatcataaaagttcagtttcggcattgaaaaacgctcctttctgtgttacaatgcgtttaggcttttttggaaggggccgtttcggttgttgtggtgacgacgaaacggtccttttcgacttcttcaacggtgactttctgcgcgcccataaggatcagcgccttgacgacttgtccaacctggacaggcgtcagcgtcttcgccttgtacttcatgcggcttcctcctttcctgggtaggtatggggtcgaaggccccggccagcttgcagaagacagcccacagggcttcaaacacgaaggcgcggatcgttccggttcccagggcgacctggtcctgttctatggccccgacggtccccagcataaggaagaagaagacgaaggcgatcacgccgcacacggtcttgattttaggcatttaagccacccccccccgcgaactgacacccgtcttcgatcagggcgtccattgaaacgaccaggttccgcgctccatacggggcgcccttgatcccgtacaccctcgcggcgtccttgcagttcaggacttcatattgaagctgtgcgaagatgtgctgttccaggtcttttcccttgtcggggtcgaagttctcgatcgcgcggatcatgcggatcgctaactgttggaaaacgtcgtcgtcttccaggccggcggcggtgatcaggcggcggtttttgttgatcgtccaccagatacagcccagatgtgcttcaaccagggcgtttctttcctgggcggtgatcttccatttcacggtgatcaccttccttccgcgggcgggtcggccgtggtggtgacacggtccggcgccggtcccttcggtttgcgcttccggggaatcgcaatccccagcttcgcggcgcacgttcggccgtagccgatttctatgtaggccggatttttcagacgacggccacagcgtccacaggtatcagacattttcggtttcctccttttccatgtcttcggcctttcgtccccggcggcgaagtccttcctggacccgcttctgggccagggccggatcgtaggccggccggaagttcttgtccagggtgacgccgtcctggccgcgcttcaattcggcatagattgacgttcgcgacacgccgaccttttcggcgatttcgacggcgaccgctccggcgccatacatggacgcgatcgtcttccggtcgtcaaaagtgatcgctttgtaccgctttcccacggattcaccttctttctgcgtcagtttagataaaaaaattagactgtgcgtcggtctgtgacctttgcacaatctaataataaatctcgcggatgttacggaaaagaaaactgtgtcttgaaaaaatcagaaaaataggatatactactaatatcctagaattttggaggtattacacctatggctcagattacaaaagatacgattatcggcgacatcctggatattgcgcctgagaccgcgcccatcttcctgtccatcggcatgcactgcctgggctgcccctcctcccgcggtgagactgtggagcaggcctgcatggtgcacggcgtcgaggtggaggagctgctggccaagatcaatgccagtgtggccgccgcgcagtaaaagactccggaaccaaaaaggggcggccctccggccgctccttttttatcatgaggtgataccgatgagaaccgttgaacttaccccccgcctgcggtcggtggccgagctggtgccccggggggcgcggtttgccgatgtaggaaccgaccacgcgtatctgccggtctggctgctgcagcaggggaggattaccggggcagtggcctcggatctgcggccggggccgctggagcgggcccggggcacggcggagaaatacggcctgaccggccggatggacttccgcttgtgcgacgggctgtccgggatacagccggatgaggttaataccattgccatcgcggggatgggcggcgagaccatcgcggccattctggccgcggccccgtggacctgggagcgggaatgcctgcttctgctccagcccatgagcgcccagcccttcctgcgccgctggcttcaggcccacggctataccatccgacgggagctgctgagccgggagggggacaccctttacacaacctttgaggtgtacgctggccccatggcggagctgaccccggcggagctgtgggcggggcgacagaccaggggagagggttcccccctgcggttggcttacctagaccggctgttgcggcaaacggagcgcgcgatagcagggctgaagcggtccaaacgtccggaggatgcctcccgcctggcagagctggaacaggtacatcagggactattggacacgaaggaggagtggctgtcatggcaacggtgagagagatttatcaatatctggacggactggccccgttttctctgcaaatggagtttgacaacgccggttttctggtaggccggggagaacgggccgtgtcaaagattctggtctccctggatatcacggaggaggtggcggaggaagccgccgagctgggggcggagctgatcgtatcccaccatccggtgatcttccgcccggccaaatccgtgacggacggcgatccggacggacgggtcctgctggcgctggcggagcacaggatcgccgccatctgcgcccataccaacctggacgcagtggcggggggcgtcaatgacgccctggcccaaaagctgggactggtgcagattgagcagctccatcaggacggggtggatggctccgggcgtccctacggcatcggccgggtgggcagtaccaccggcgcccccatgtatgcccccgcctttgctgcctttgtcaaggaggcgctgggggccaacggcgtgcgctacgtggacgcccgccgcccggtgcgccgggtggccgtggggggcggcgcttgcgccgacctgctgcgggatgccctggccctggggtgcgacacctttgtcaccgccgacgtgaagtataatggcttcctggacgccaaagcccttggggtcaatctgattgacgcggggcactatccgaccgagcaggtggtgtgccccgttttggccaaatggctggccgccggcttcccacaggtggagattctttccacgagccgccagaaggaggcctttttatacctgtaagggcttgcaaagacgcgcaaatagtgataaactagttccgctgattttcgattgcaggaagggaacgaatcaatatgtcaggacattccaagtggcacaatattcaaaagaccaagggcgcggcggacgccaagcgttctcagatatttaccaagatcgcccgtgagatgatcgtggcggtcaagaccggcggcagcggcgaccccaacaacaactcccgcctggccaccgtcattgccaaggccaaggccgccaacatgcccaacgacaatatcaagcgtaccattgacaaggcgcttggctccggcaatgccgacagctacgagaacgtggtgtacgagggctatggaccctccggcgtggccgtaatcgtggacgcgctgaccgacaaccgcaaccgcaccgctcccgaggtgcgccacctgctggacaagtacggcaagggcctgggggctacgggctgcgtgtcctggtcctttgaccgcaagggcgtcatcatcatcgagaaagaggatctggacgaggacaccgtgatgatggacgcgctggatgcgggcgcggacgatatgcaggtggaggaggagacctttgaggtctacaccgaccccgatgctttcggctccgtgctggccgccctggaggagaagggctataccttcgtccaggccgccgtggagatggtgcctcagaactatgtcaagctggaaaatgaggacgacatcaagaacatggagaagctcattgatctgctggaggacaacgacgacgtacagaacgtctggcacaattgggatcaggagtaacttcagacattcaaaacggaggtctggctttgtccagacctcctgtttattcataactttaccaaggaaaatccgacctgccatctgacgcaatgcaacttcaagaggttccagaagcgtttcaggtgttgcctgtccgaaaaaaacggccgcccggagcgctgtgctccgggcggccgtatctgcaagtaagcctgtaagccgggttctgtcctttaagacagccatctatctcgacgcaccgttgccagtacgctccagccgcctccccgggacggtcgggccgaccatatgtccctccacggcgttgctccggatagagtttacagcgacggacgcttggcacgccgtcgggtgagctcttacctcacctttccaccttgaccggccagaggccggcagactatttctgttgcacttttcctagggtcgcccccggcgggtgttacccgttatccttgccctgcggagcccggactttcctcacagacaggcctttcgccccgtccgcgcggctgtccagcttgcttgcgaaggacattgtaccgtattgtgggccgcttgtcaaatgggaatcgcactcctccagcgaaaacagggccttttcatagtcctggacataataccgcaggtgcttccgccctctggagagcacggtatgtccctcagcttccagaagcgccttctgagcctccacgccccccggatacttttcattcagctctccgccggttttcagcgtccgccagtaagggatcttgtcttcggcgcgctgatggctggcccaggcggcgatggacacaaaaagcccggccgtcaggggttcggtaaagtcggcgccgctccgccgggcgagatagctccggatgtcgccaacagtcaggagcttcccgaagggcactctccgcatcgcgcggtcgtaatcgatgggcgggacaaagtacatgcggtcgcctccataggctgcaatcgcctttggatcggtaattatctgtatcttcggcatgtccctgcgggcgttcagcatggcgttgaagtcttttcgtgcctcatttgacaagaaaatccctccagtccgacttttttcccacattttatcaaaatggccggggcaagtcaatctcgcccgaggaaacgccctcctttcgattgaaattttctcctcaatgggatataatattttagttatagacgaaacaaaaagggaggaacgagccatgggttccaccatacaggagtatttggcgtccctgcggggcaagcgggtggcggtgctgggcatcggcgtgtccaacacaccgctcatcaaaatgctgctgcgggcggatgttgaggtgaccgcctgcgacaagaggcagagggaggacttcggcggccaggcggaggagttggagagcctgggggccgagctgcgcctgggcccggactatctggacgggctggaccacgatgtgatcttccgtacccccggcctgcgtccggacgtgccccaactgctggcggcccgggaacgggggagtaccatcacctcggagatggaggtttttttccaggtctgcccctgcaaaaccatcgcggtgactggcagcgacggaaagaccaccaccactacgatcattgccgagctgctgaaagcggcggggcagagcgtctatgtgggaggcaacatcggcaaaccgctgctgcccgacgtggacgggatggtgccagaggacgtggccgtgctggaactgtcttcgtttcagttgatgaccatggagcagagcccggatatcgcggtggtcaccaatctggcccctaaccacctggacgtacacaaatctatggaggagtacatcgccgccaaggagaacatcttcacccaccagggagcggacggcctgctggtgctgaaccaggataacgagattacccgcggctttgcggtcagtgcccgcggccgcgtgacccggttcagccgccgggaggagctggagcagggcgtcttcgtcagagacggggccatctgggtgcgcaacgccatgcacgagcgcccggtgctctacctggaaaacatcctcctgcccggcgagcacaacatcgagaattacatggcggccatcggcgctctggacgggctggtgcccgaccaggtggtgcgggacttcgccgccaaatttgcgggggtagagcaccgcattgagctggtgcggacgaggaacggggtgcgctactacaacgactccatcgcctccagcccctcccgcaccatcgccggtctgcgctccttccatcaaaaggtggttctgattgccggcggttacgacaagcacattccctttgatgtgctcggccccgaagtggtggagcacgtcaaggcattggtgctcaccggcgataccgcgcccaagctgcgccaggcggtggagcgggcacccggttacgatccggcggccttgcccattgtggaatacaaggattttgaggcggcggtgctggccgcctgcgggctggcccagccgggggacgtggtgctcctgtcgcccgcttgcgcctccttcgaccgcttcaagaattttatggagcggggcgcagcttttaagaggattatctacggcctggagtaaggctgcggacgccggaggacacggcctccggcgccctgcttcggtatccgtggaaaggagtgaacccaatttggatatgagacaagccctggagcggctgtgcgcctgcaccgcgccctccggctttgaagcccctgcggcagcggtagcggcggagctgctccggccgctggtggacgaggtgtccgtggaccgcatgggcaatgtgctgggggtgcgccgctgcgggaaggagggagcgccccggctcctgctggacgcccatctggatgagatcggcctgctggtcactggcgtggaggacggcttcctgcgcttccgcagcatcggcggcgtggatccccggatgctgcccggccgggagctggtggtgctgaccgacccgcctcggcggggcatcgtgacctgtccggctgggggggaagcggacaagagcatacccctgtccgagctgttcgtggacgtgggcctgtcccagacggaggcggagcgggccgtaccggtggggacgcccatggtctatcggggtggctgctttgccttgggagaggaccagatgtgcggcaagtccatggacgaccgctcctgcttcgtcaccctgctgcgggcggcggagctgctgcgggacagggagctggacgtagacctctatctcctgggctccacacgggaggaggtctccggggcgggcgccacggtaggcacctgggcggttcagcccgacttctgcgtggcggtggacgtgacccacggcaaaacccccgacggcccggcggacaaggccttcgccattggcggaggtcccgccatcggcgtgggccccaacatgacccgctggatgaccgaccggatgctcgccaaggcgaaggagaggcagattccctaccaactggaggtcatgtccggccacaccggcaccaacggctgggagatgcagatcagccgggagggggtagccacctcggtgctgtcactgccgctgaagtatatgcattcccccattgaggtgctctccctggcggacatggaacaggtggcggccctgctggccgccttcacggagggactgggaaaggaggcggcacggcgatgagagaactgctggagcgcctgtgtgcgcttaacgccgtgtccagctgggaggacgaggtgcgcgccttcctcctggcggaggtggagccccacgcagacaggctgcgggtggacgctctgggcaacctgattgcctggaaaaagggccggaaaaataccggtagcaagctcctcctcaccgcccacatggacgaggtggggctcatgatccgccaggtcaccgacgacggctatctgaaattcgacactgtgggcgccatcgaccgccgggtgctcctgggcaagccggtgctggtagggcccaagcgggtgccgggggtggtgggactcaaggcctaccatctggtcagccgggaggaggagaagtccgtccccaagctggacgagttctatatcgacatcggagccaaggaccgggccggggcggaggcgcaggtcgcactgggtgatacggcggcctttgacagtgacgccggagacttcggggcgggcctgttccatggaaaggccctggggagccggttgggctgcgccgtgctgctcaccctcctgcgggatgaactgcccatggactgtacctttgtctttaccgcccagaaggaggtgggggcccgcggggccttcggcgcggccttctccgtcaccccggaggtggcgctggtggtggacggcgcggatgctgcggatctggccggagtgcccgcccacaagcagggatgcagcttgggcggcggtgtggtgctgccctatatggatcagggcgccattgcagaccgggggctctttgaggcgttgcgctccctggcggaggccggcggcatcccctggcagaccatgcgctcggtggccgggcgcaccgatacggtcgccatccagcggaccaaagagggggtacggacggcggcggtgtccatccccgtgcgctacccccgcaccccgtccggcgtgacctgcctgcgggacgcggaggcggccctggccctgatccgggcctttgttggacatttggcagaaaaggagtgaaccgacatggaactgattgagattttgcaggccctgaacgcctgtcacggcccctccgggagcgagggggccgtcgccggggtgctccgcaccctggccgctccctacgtggattcctgtaccacagacgccctgggcaacctgatctgccataaaaaggggagtgggcccaaggtcctgtttgccgcccatatggactccatcggcctgatggtcacccatatcgacgagaagggcttcctccgcttcggtccggtgggcggtctctccgcccacgaggtgctgggcacccccgtccgcttcgccaacggtacccgcggcgtggtggccctggagggcaaggtggagcccaaggacatgaagctggagcacctgtacctggacattggggcccgaaacgaggcggaggcaaaggccatggtacaggtgggggacattgcggtctatgacacccacgccttctgctccggagggcgcatcttctctccctatctggacgaccggatcgcctgcgcggtgctgctgatggcgatggagcgcctgaagaacacggaaaatgacctgtacttcgtctttacggtacaggaggaggtgggactccgcggagcccgcaccgccgcttacggggtggcgccggactacggcattgccgtggacgtgacggactcagacgacatcccttcggccccccatgcgtgcagcagtgtggccggaaagggggccgccatcaaggtgatggacagttcggtgatctgccacccttctgtggtggccaagctggagaaacttgcactgacaggtaacatcccttgtcagaaggatatcctgcgctttggaggcaccgacgccggggccatccaccagagccgggccggggtgtataccggcggcatctccattcccacccgctatgtccacacgccgctggaggtggcggatctgggagacgtggaggcctgcgcagccctggtggcagcctttgcccaggcgaagctgacctgctgagtcctcaaatacagaaagaacggaatgtgtaaaaagaaatgcctttacagattagtgaaaaagtaatggccctggcggcccaggcgcaggccgggctgcgggaccaattcgaccgcattgattccatcgcggaggagaacacccgcaaggtcctggccgcttttcagaagcaccgggtggcggaggcctattttgccgggaccaccggctacggctatgacgatctcggccgggacaagctggatgagatcttcgcggagctgttcggcaccgaggatgccctagtacgggtgcagtttgtcaatggcacccatgccatctcctgcgccctctttggcgcgttgaagcccggcgacattctggtgtccgccgtgggtgccccctacgacaccatgctgggggtgatcggcgtggtggacaagggccccggttccctgaaaagttacggaatcgaatatcggcaagtagatttgcttgacgatgcgccggacccggaggggctggcccgggcggtgcgggacccccgcgtcaaggcggtgctgatccaacgctccaagggctactccacccgttcgtccctctccgtggcggagatcggggcgctgtgccaggtggtgcgggccaacaacccggaggccgccattctggtggacaactgctacggcgaatttgtggagacattggagcccacccaggccggggccgacctggtggtgggttccctgatcaaaaaccccggcggcggactggctcccaccggcggctatattgccggacggcgggatttggtggagggggccgccatgcggctgaccacccccggtatcggaaaggagtgcggctccacctttggggccaaccgcagcctctatcaagggcttttccttgccccccataccacagcccaggcagtcaagacggcggcgtttgccgcccggatgatggagctgctgggctaccggacggagcccacctccgatacggtacgccacgacatcattcagatgattcattttggcgcgccggagcccctcaaaaaattctgcaaaggcatccagttcggcgctccggtggactccttcgtgacaccggaaccctgggacatgccgggttatgactgcccggtgatcatggccgccggggcctttattcagggggcgtccatcgagctgtcctgcgacgcccccatgcgtgagccctatacggcctatctccagggcggcctgacctatgagagcggcaaggccggtgtcctgctggcagtggaagagttgctgcggggcgaatagggcaagccggtccgcgcataggctgatccgggaggtgaggcccgtgcgcagaccgatacgcccctggctgagggtgcctcgccggcggcggcccgccgctgcgcggccaaaaggtgggattctgctccccgtgctgatcgggatcggtctggcggtggcggtcattgttttgatcgacgccgcactccggcccacagttacagagctggcaaaggccaaggtaaaaaatgccgtaaccagcatcataaacgacgcagtcaatgagactctgtccagcgaagccatatcctacggcgatctggtgacgttggagaaggacaccgccggacaggtgacagtgctggccgccaatacagcccagttgaacgcacttcgcacggagatcttgggccggatattggagcaggtggaacagcttgacagtcaggagctggggatccctctgggaaacctgaccggctttgccaccgcgtcggacttgggtccggtactgccggtacgggtgttgactgcggccacaccgaccgctgcatttgaacatgtatttacctcatccgggatcaaccagacccttcatcaggtcatgctgaatgttcaggtagagtgtaccctgctgatccccggcggcacggtggacacggtcgtggaggcacaagtgtgtgcggctgagacgctgctggtggggcaggtgccagatacctatctggagctgcccggaggtttgtaagaaatccgtaaggaatttgtaacgacgctggcattccctctgtggtagaattgggacgataccagtaggagggagccaaaatggatacactgctgtggtactgggcggtctcctgggactatgtggcccagatgctgctctgcatgctgctggccgcccttgtattttttcttctgcggccctggcggaaaaaacgcttagcccggcagggcatggccagtgggaaactccgcgagactgcactgctgttctttgtgatgttctgtgccggattggctgcgctgaccgtctttcccgcttatttctggacggcgtaccactggcaggaagcgctggccgggcatgaggtattttttccgctgactccgctctctgagtcgatacaggagattcagtggacccccacggtccttcaaaatctgcgggaaggcggctgggcgggatacatggccatcgccaatctgcttatcttttgtccggtgggcttttttccagcgctactgtggcggggaaatcgctgtatgctgggacttctgactggcttttgtacttccttctgcgtggagttcctacagctgtttgtggggcgggccactgacatcgatgatttgattcttaataccttgggaggatgtttgggcgggcttttgtgcctgattttcgcccatttagcccccaaatttacccgacgattccaagtggaggtccgatatggacgagaaacaggagatacagagcctgcgccgggagctggagcaggcgaattatgaatactatgtgctggacaaccccagtatgtccgactacgattttgaccacaagctccgccgcctggaggagctggaggcggcccacccggagctggttacccccgattctcccactcagcgggtggggggcaaggtggccgacggcttccaggaggtgcgccaccggataccgctggagagccttcaggacgtgttctccgtggaggagctggaggagttcgatcagcggatgcaggaggctctgccggagggcgttgaatacgacgtggagcccaaggtggacggcctatctgtggcgctggagtatgaaaacggcctctttgtgcgcggcgccacccgcggcgatggccaggtgggagaggatgtgacagagaatctgaggaccatcccttccatccctctgcgcctgccggaggccctgcccgccctgattgtgcggggcgaggtgtttatgcccaaaaagagctttgaacggctcaacgaggagcgggaactgagaggggagagcctgttcgccaatcctaggaatgccgcggccggctccctgcggcagctagaccctaaaatcgcggcctcccgagggctggatatccgggtttttaacatccagtgggcagagggaaagacctttcagacccattcagaaaccctggaatacctgcggggacagcactttaaagtaattccacatgacacctgcaagacgatcgccgaggcggcggagcgtatccaggccatgggggagggcagagaggcttacccctttgacattgacggagcggttgtaaaggtgaatagccttgcagaacgtgaaaccctgggcagtacggcgaaatttccccgctgggcggcggcctacaaatatccgccggagcagaagccgtcccgggtggtggacattgtggttcaggtggggcgtaccggcgtgctgacgccgaaggccgtagtggagccggtgcgtctggccggcaccaccgtcacaagcgccacccttcacaatcaggatttcatcgcggaaaaggacatccgcatcggagatactgtgctggtacagaaggcgggagagatcattccggagattgtggaggtgctgaaggagaaacgcccggaggggacgcagccctaccacctgccggagcagtgcccggtgtgcggtgcgccggtggcccgcgacgaggatggggcccacatccgctgtaccggcgcagagtgccctgcccagcgcctgcgccatttggtccacttcgccagtcgggacgccatggacatcgagggcttgggccccgcggtggtggagaatctggtgggcgccggtctggtcaaggggccgggcgatctgtaccacctcaatgcggaggaggtggcccagttagagcgcatgggcaaaaagagcgcggaaaacctcgttgcagccattgaacggtccaagggcaatgacctgtcccggctgctgtttgccttcggcatccgccaggtggggcagaaggcggggaaggtgctggccgcccgctttggcacactggatgcgctgatggcggcctcggaagaggagctgaccgcggtacccgacatcggcggaatcacggcccggagcctgctccagtggttccagagcccccagagcattcacctcattgacacgctgcgggaggcgggggtgaatctggagagccatgaggagccggtgggcgaccaactggcggggaagatctttgtgctgacaggtacgctgaagcgatttacccgggacgaggccggagcgatgatcgaggctcagggcggcaaagtgtccggatctgtttccaagaagacctcctatgtggtggccggagaggcggcgggctccaagctgcgcaaggcccaggagctgggcatcccggtgcttaccgaggaggaatttcttaccatgctcggcagcaggcccgatacggatcaattataaaaaggggcaccggttctcaaggagagccggtgccctttttgtgctctgcggcataggatgtgtggaaaggggagagcgctatgctggaacggataccctatgaccgccgtgccgctgtggcctatgcccatcagtgggcctacggacgaaatccggatttctatgactacgaggagatcggcggcgactgtaccaattttgcctcccagtgcctgtacgccggaacgggcgtgatgaacttcaacccagtctacggctggttttaccgggatcccaacgacaaggccccggcctggaccggtgtggagtatttttttgactttatcacccgtcagacgccgagcccgggaccctttgggatttctaccacgctgagtgagctggagccgggtgactttgtccagttccgcttcaataaggatgtatttggacatactccggtggtggtggagatcgggcgtccagccactttgcaaaacaccctgattgccgcccactcctatgatgccgactggcggccgctgagcacttattattttcaggagatccgcttcctgcacatacagggggcctaccgggagattcgcggagaagaggttcttccaagcatgtaaaagccgctcccctgtccaattgtggacaggggagtttttcgggcttgtttgaaaaagtacaggtttttgaacaaccggaatccggggaatttcatcctctattctatcatatcccctggaaaacgcaataaaaaaggctatttaaaaacctgtactatttcaaagtgctatgaaaaatcgtaagcaggcagaaaggaccgtgattggaatgggacaaaacctgcgcttgaactgtaccgcacacctcatgcagaggctgttgctgacggccttttttatactggcagtctcggcgctggcagttggcatatctcagggggaacggtatctccaggcatttgccctggcgctgctgggactttttctgtatactgccctgtgtgtacctgccgcgaaacgattggaacatttggggccgttgcggctttggctgcttctcaccatactttgcgtcgcaatcaaagtattttggatctggagggtacgggttcccctggcgggggattactcggtcttttggggatatgccaatgcgctttcggagcgcacaacggtatacggcgggcggtatatggccctgtttccccatattttcggatatgccgattttctgagctggtttattcgcctgtcggggccacagcccatgcttgctccggtgcttaatgtactgctgacggtctgctccggcagttttttgtatcatctgtgcctgcgctggttccacttgccggccgctacgctggtttatctgccctggactctatgtccatctcagaccatctataacagccttgtgctatcggagcctctctatactgcccttattctcggtgtgctgtcccttttgacggagacggagcggtttgccgccctaaaggggtatccgctttggatgggggttctctccggcacggcgggcggcgttcttctgcgatgggtcaacggggtgcgtcccattgcggccatactgctgatcgcgctccttctgtggctctctctgttgaacctgaaccggctggctgcccggaactggagaagatggtgggggctctgcatggccggtgtgctgggggcatatgtccttctggggccggtctggaatgcccggctctcggtacggataggggaggagccatcccatacgccggggtacagcctattggttggcttcaatcccaactccggaggacgctggaatcaggaggacagcgaccgcctgtatggatacagcgaccagcctggggcaacggctcaatggacacaggaacagcttctgaccgatgcagaggcccgaattttatctggagaaattgacttttcaaagctcctaaagcaaaaactgcgcacgtttctgggatcagacgatgcctgcgtgggatattcggcctcggttctgcggcatacggagtttttctccctgctctgtaatggcttctattatgcggcatttctcctggcaaccgggggtgctgtccaggtgtggcggagtagagagagaggattgctattgctggcaccactctatatcttagggctgaccctggcacagatgctggtcgaggtggcggggcgctaccactactcgatgatacccatgcttttactgcttggacaggggacatggaagaggacaggtgaggaatagaaataggaggccgctctcaaagagagcggcctcctatttctattttccagggggaatggggatggatttctttttcattcgtcccagcgggtttgccttcgccgccgagcgcagattttcgttgtccacatgagtatagatctgggttgtgttcaggttttcgtgtcccaacacctcctgaagcgtgcgcacatccaccccgttctgcagcataagagtggccgcggtgtgccgcagcttatggctggaatagagagaggcatccaacccggcttttttgaggcgctgtttgaccatatagtgcaccgcatccttggtcatacgggtatgggtgcgggtcaggaacagggcgttcgggtcggccgcagcctgacggctgcgctcctccagccagtcatccagcgccgcgcggcaggcctcgttgaggaagatcatgcgctccttgttgcccttgcccagaacacggagctgttcctctcgaacatctgtcgtgttaagggagactaactctgaaattcgcaacccgcagttgagaaacagcgtcaaaatgcagtagtcccgcgcctgattgggctcgtccacggcctccagaagctggatgctctcatccaggctgaggtagcggggcagcgattttttcagccggggggaatccaggtcctgcatgggattttcgctgattaattttgccttgctggtgagatacttatagaacgagcggatggcggcgatttttcgggcccgggcggtggcctccaaaccatagccggtggaggggctgttggcgtgcttggcccggtcacggctcaggtaattcatgtaggagtagacatcgctcagcgtgacagacctggccaggtccagatccacgtcgtcaatcggaatttcatccagctcggcggtacgtggtgctttgcctttttcgattttcacatagcggaagaagttgcgcagatccaggtagtattcatccaccgtttttctggagtgaccctgaatggtctcatgatacaccagaaagtcccgcagaaccggcggagcagtcagacggtagtcatttgtattcaaatcctccctccaactcaacaaaatttttattttgttgagttggagatataccccctctcgattggagtgataccggtgagcctgatagcctgcaccagtgcgtgtgtctatcaacaggacggatactgcagattggagcgcgcatcctcctgcggcgtgccctgtgcggaatctccttgcgtcaattttgtgccacggcggaactgcggtacaaccgcgccgcctacaaaagcgcggccagcgcctcgcggatgttgcgaaccggaatgagctgcaggccatccggggtgtccagctttccgccggtacgggctgggatcaggcactttgtgaaccccagacggcgcacctcgctcagccgctggcccaacgcattgactgagcgcagctctccggtcaggccaacctcgccgatggcggccagatctccagacacgggcttgtctcggaagctggaagccagtgcgacgatcatggctaggtcggcggcgggctcgtccaaaaacaagccgccgatgacgttaatataggcgtcacaggaactgaccatcagtccaccccgcttttccagaacagccagcaacagattcgcccggttgaagtcgaagccgttggcggtcctgcgcggtacattgaagctggtgggcgccagcagggcctgtacctcggccaaaacaggccgcactccctccatgacgcaggtgacgcaggtgccaggggtgtcctgaggccgtcccgagagcagcatctctgatggattgggcacttcgctcaggccggagtcctccatctcaaagacgccgatctcattggtggcgccgaaacggttctttgccgcgcgcagaatgcggtaggagttctgctgctcaccttcgaaatagagcacgcagtccaccatgtgctccagcaccttggggcctgcgatagacccctccttattgacgtgtccgatgacaaagacggtgatcccctgccccttcgccaactgcatcagcgccatagtacagtcctttacctgtcccacgctgccgggagcggtggtcagatccccgttgtagagggtctggatggagtccacaattagcacgtctggcttcagctcgttgaccgactccagcacatcctccaggttggtctcagccagaaggtacattccctctccacggacatggagccgctccgcccgcagcttgatctgccgctccgactcctccccggagacatagagcacagaggcaaaacggcacaggttgtcgcagatctggagcatcagggtggacttgccgatgccgggggcaccccccaccagcaccagagagcccttcaccgctcccccgcccagcacccggtccagctcattcatcccggtttcaaagcggagctcgtgggtggtttccacctcgcgcatgggcctgggccggttgccggttccccgcaggccgcccccagcgacagaggcggcggccgcactcctttttttcggctctgccggccgctccacaagggtattccatgcccggcaggcgggacattggccggaccactttggggtttcatttccgcactcggtacaataaaacagtgtttttgctttcattctgaggcgacgcctcccttttgtagtgaaaagccttcccctctcccctcctcgtccagccattgcagccaggaggcggccaaggcggaggccagcttggtctgataggcgccggattgcagcagcagatcttcctctgcattggacaggaagccgcattccaccaggatcgccggacaggtgatgtggttcatcagatagacgctgtccgggatgggctttgcctcacgggtgttgcccgggtccagtgcggcccgcagtgtctcctgtgtgagttgtgccagaggttgactgagctctccgttggaatagaacacctgagcgccgtggtacttcccgtccggaaaggtattctggtgtacgctgagcaggacagcatgctccgtctcctcgatccgggccacacggttgtggaggtcggagacttttttctcccggagggtttgcgcgctgtcatcatggagggagatatcctcactgcgcagcagaagcggcgcctcgccgtacaatcccagaagctgatccagcttctgcacaatggccagattgattccgctctccggcacaccggagagcgagaccgcgcctccatcctccccgccgtgacctgcatccagaaccagggtctgcccgccgctgcggacgggagaaaaggccgccaaagcagcccggcccggccagaaccagaaaaaatagaccgtaccgacggccaacgcggccagcaggacccagcttccgattttctgcatatcaaacgccccctctcacacacggtatgagagggtattttttattataacacacctcataaatttttgttgccttttgcgtgcagacgcgataggataaaggcaggaaacaatggaggtgctttctatggtcgttgacaaaatcgagcatgcgtccctctactatggtctgggggaacggttccggacggcattggagtggctggcgtcggcggacgctggcgcattgacgcccggccagcgggtggacatcgacggggacaatgtgtttgcaacgctctttgaggtggacacgctgccgcctgaggcgtgcaagctggagtgccaccagaactatgcggacattcaatacctgctctccggcatggagggggcgggctacgccctgcccgacgcagagctccacgcactgagcgagtacgatccgaagggcgacatccagttttatacggccgagtgggacacgctcaccatccggccgggtaccttctacatcgtctggccccaggatctccacgccccccgtgtggcgctgggacagcctgggccggtgcggcgtctggtggcaaaggtaaaattaaaataagatacagcgcaaggcggaaaaaccggctgtcggccgccgcctgatttcaaaacccgctccatcgcccgcgttcgggccgatgtgggcgggttccctttttctctccctgcatagaatgtgacgaagggggctggtgggagccgcctccccccttccctcttcaatctatataaggaggaactgcgtttgtatcccgacaacaatatgccgaatacctgcggagacgcctgcggtaccatgcctgagtgcgccccgctggcggtcccgtatgtccccttccagcagaccaatcccaagcgctactcccagcaggatgcgctgaataacggtacgcttttccccggcctgaacctccccttccgcgtcaagccggacgcggcaaaggtgatgggcggcgcgctggcggagctccaggccctggagtttgttctggtggagctgggtctctacctggacacccaccagggcgacgcggaggcctttgagctctataagcagtatgccgcaatggaaaaagaggcccgggagaaatacgaggccatgaacgggccggtcactcaaatggccactgccaacgcgaagacatgggccgcctggctgagtgagccctggccctggaactatcaggaaggaggcatgaagtaaatgtttatttacgagaagaagctgcagtatccggtcaagatcgccaactgcaaccccaagctggcctccttcatcatcagtcagtacggcgggccggacggcgagttgggcgcctccctgcgttatttgagccagcgctattccatgccctaccccgagctcaagggcctgctgaccgatatcggcaccgaggagctggggcatctggagatgatcggcgccatcgtccatcaactgacccgcaatctgaacgatgagcaggtgcgggagggcggctttgcgccctatttcgtcgaccacaccaccggcgtctaccccaccgccgcctccggcttcccctggaacgccgcttccatggcggtcaagggcgatgtgatctgcgacctgtccgaggacatggccgccgagcagaaggcccgggttacctacgacaacatcctgcgcatgtccgacgatccggatgtcaacaacgtcatccgcttcctgcgtgagcgggagatcgttcacttccagcgcttcggcgaggcggtgcgtctggccaaggagaagatggaccagaaaaacatctactttaccaacccggcgtttgacaaataaacccatcagagcccccgcacagctttcgtgcgggggcttttcctgtcgccactgggcttgcgttttttgccgcttggcgctatgatctaatatagaagaaaaaaataaagagaagcggaagaatttcgtcaaattcactatagcgataatggagtgggcgcgtatggcaggggtccaattggaacatgtggtgcgggagtacaccatgggaaggacaaccattcgggcggtagacgacatcagctttaccataccggaggggaaatacaccatcattttgggggccagcggcgcgggcaaatctacggtactcaacatcttgggcggcatggactcccccacctccggccgggtgacggtcaacggcagggagatctccggcttcaacaagcgtcagcttacggagtaccgccgggagagcatcggctttgtctttcagttctacaacctgatgcccaatctgacggtgctggagaacgtggagctggccagccagatctgtaagaatcctctggactcccggcaggtgctggccatggtagggctgggagaccggctgaacaacttcccagcccagtgctccggcggagagcagcagcgcggcgccatcgcccgtgcgctggccaagaatcccgatgtcctgctctgcgacgaacccactggggcgctggactaccaaaccggaaaggctattctggccctgctgtacgatctgtgcaaaaagagccggaagaccgtggtggtggtcacccacaacggggcgctggcgccgacggcggacgtgctcattcggatgaaaagcggaaaaatcgaatcttttgaggagaatccgagtccggtgcctgtgcaggagctggagtggtaggatgatctggaaaaactttgtgcgggatctgcgccgcacggcctcccgcctgatctcggtcagcatcatcaccatgatcgcggtgatggtctataccgccctgagcggcatcctcaccaatatagagcgcatctccgcctcctatctggaggggcagaatgtggcggactactggctcacgggcgtcaatctggaccagggggactgccggacgctggagggcatcgcaggggtgactggggtgcagccccgggtagttctggacgcggaggagcgccacgacagcagtgtgaccctccagctctatgccgtccccggggactacgccatcaacacgccctatgtggtggagggccgcctgccggagagcagccgggagatcgtgctcagcgatacgctggcaagggcccgggggctccatcccggggactggtacgagctgacactgacgggaaccggccggtacctgcgggtacggatcagcggactggtcaaagacccggagtgcctctactatgtgaataccacaacgccggccccggatttgacccactatgcctttgcctatggaaatgagacgcttttgcaggagctgatgggggcaaaccgctacaatcagatctgcatcaccaccgacgggagcctctctgcggcgcggctccggctggcggtggacgcggccctgggggaccgggtcgtgaacatcctgtcactggaggacaatacccaggcctactatctgctggagatgcgggacaacctggcgcccatactcaacattttcccggtgctctttttcctgtgcgcggtgctgatgatggtgagcaccatgaaccggctgatcgagaacgcccgctcggatatcggaaccttcaaggcgctgggatactctgatgtcaaaatcatgtgctattatctgctccatgccctcctggtggtcgtggtagggttcccggtgggcgcatggctaggacggtatgtgtccgccctgatcgtttccaccatcgccatcgggtgtgatctgccgccctatacggtggtacacgactttgccgcctgggggcgggctctggggctgaccgccctgtgctgcatcgggagcgcctggctggtggcccgctcgctgctgaaggagaccccggcccagtgtatgcggcccaagccgcccaggagcacgaagcccgtggctctggagcggctcggcccggtctggcatcggctgggctttaatcagaagtacatcatccgcaataccctccgcaacaaagtgcgtatggccacctgtatcttcggtatcgccttctgtatggcgctggtctttctggcctttgctctgcgggactccattcaggcctactcggacgcgctggccgagcggcagaaccgctacgacctcatggtggatctgagcacgtcggtgactgaggggcagtaccggcggctcgccaatgacgtgggtgtaacggaggcggagctggagatgagcaccgcctgctggctctacacggactcgcagcgggccacggcggcgctcacagtgacggaggatcaggtctcgctgaagcggtatgacccctatgccgagggcgcgctcacccttccggggaacgggctggtgctggaggagtccctggcgaatgagctgggactgcgggccggcgaccgggtgacgctccggtttgccggggacagccggtattactccgtgtccgtggcggaggtcaaccgctgtgtcagcggggcctgcctgagccgcagcctgtggcggagcctgggcctggcttacacgcccacggccgcctacctcaccagcgatgggccggaggcgctggccgcgcggttgggagactatgacttcgtggacgcatggcagacccgtcaggccgccacagccgccgcggtggagcggctgagcagcatgtccatggtagtctatatcctgatcctgttcggcggcgggctggcctgcatcgtcatttacaatctcggtatcatgagcttctttgagcagctccgcagtctggcgactttgatggtgctgggcttttatgagaaggagatcaagacccttcagttaagcgaaaacatcatcttcgccgtgtgtgggattctcctgggcatcccgttgggggtttccctgaaccgcatgatcctggcctccatcaccaccatgcctctgatggaggctaccaggccggcctctctggccctgtcctgtgcggtgacgctcctgttcgcattggcagtcaacgtggtgatcgggcgtaaaatgcgggagatcgacatgctgggcgcgctcaagagcgtggaataacaaagaggtggatggaatgaaacgattgaaacagggtgcggttgcgctgaccggtgtgctgcttctgctgagcggctgctccggcggcgtggatgaataccaatgtgtgcatccggagaccgggactctggtgcagcagcttgtggagggcacagggacggtgagctatcgggaggagtattccgtcatccctaccgtcagcgccaagatcctctcctgttccatcgaggagggggacacggttacggccggacaggtgctctatgtgctggactccggcgctctggaggatcagatcacccaggcccgcctgtccctgaacagcgcgcaggcatcctatgaccaggcggtggacgcctgtacggatctgaccgttcccgcccatgcctcggggacggtgacggaggtctatgtccacgtgggagactatgtgaatacgggaaccgccatcgcatcactggtggacagcgccaacctcaccctgacggtgccctttgcggcggaggacgcggcggctatggccccgggcaataccgcggcgatcacctttccgggacaggcaggtaccgtcactgggacggtagaacgggtgtacgacacgtccacggcactctccggcggccgggagggcgtctatgtggagctcaccttccgcaatccgggcgcggtgctgagcgggacggcggctctggcctcggtgggcggtgccgcctgtatggaggccggaacagtggccaacgccacggagcagtccatctacgccacccagtccggccaggtggcctccctgcccatccaggcgggaaccgccgtcactgccggtcagacggtgatgaccttggagaacgccagcctgaccaacgccgtaaccaacgcctctctctcggtagaatcggcgcaggtcaacctggcccaactggaggccaagcgggcggactacaccgtgacggcgcccgtggacggcacggtgctggagcgcccgttcaagaccggcgactacgcggcggcggccacctccctggccaccctagcccagccggattccctgtgtgtctctgtggagattgatgagctgtatatcaatcaggtgggggttggccaactggcgcggatcacctttgcggacggccagacccatgaggcgcgggattacgacggggttgtaagccgtatggatgacaccggcgtgtcctccggcggggtgacggactacagcgtagagatcagcctgacccgtaccgaagagctgaaggccgggatgaacgtcacggtggagatcctggtggcccagagcgaggactgcatgagcgttccctctgaggcggtgacaggcggtgtggtccgcgtgctgcgggacggcgagcgggagccggtggaggtgccggtggagaccggactgtccggggacggcgtgaccgagatccgctccggcctgtcgccggaggattgggtcgtcgtggatgcttattaagatggggtgtcgataggatgggaaacgaaatcaagacggtattgctgaaatcagtacaactgtacgatccagatcccaaagggatctgcgacctctttctgtgcggcgggcgggtcgctgccgtcggccgggggctagcccccaacctgcccggcgtggccgtgctggacggaagcggcctgacggcctttccgggcctggtggatcagcacgtccactttaccggcggcggcggagagtgcggcttccgcagccgtgtgccagagctgtccctcacggattttaccactgcgggcgtcaccacggcggtgggactgctgggtaccgacagcgccacccgcagccccaaggccctgctggccaagaccaaggcgctgaatgaggaggggctcacggcctattgcctgacaggggcgtatgacatcccctcccctaccgtcaccggctccctgaaggatgatgtgacctacctctcagaggttctgggcgtcaaggtggcgctgtcggaccaccggggcggccaccccacgcttgagcagttcatccatatggcctgtcaggtgcggctaggggccctgaccgccggaaagcccggcgtggtacacatccatatgggcagcggaaaacggggactcggcctggtctatgacttgctggaggccacggatctgcccatctggcacttccgtcccacccacatgagccgttggcagaacgaggctgcggcgtttgccaggaagggcgggatggtggactttactgccaatgccgacccggaaaagtgcgccctgcctgtgctgcgcaccatggaggaggcgccgctggaacgcatcaccatcagctccgacgccggagggagcatgccgcgatggtcggaggatcactgtaccatgctaggcatgggggtgggcaagatggacaacctcctccccaccatccgctgtctggtgcgggagcaccgagtcccgcccgagcgggccatccgtcttttgacgcagaatgtggccgatgggctctgcctctcacgcaagggccgcctgacagtgggagcggatgcggatgtgctgctggtggaccgggactggaacatccacacggtactggccggcggagagatcatggtgtcggacgggcaggtggttaaacaaccctatatttcttaagaaagcaagtggacggcatttgtggcggactacccctttaaggcggactccatggagcgtgagtggcgctttaccctgaccgatccgattctggagtgtaaccagggcgcgtttcggctgtgcatctcccaaaacggccaggggcgggcggagcggattgcggaaccgtgcgccgaccagatcagtattcagacgatgaccaccatgctgatgggatataagcgcccggactacctggccaggatagggcgcctgaacgctgacgaagccaccatcgatatgctggaggatgccattgagcagcaagcaccctatatctccgactacttttaagaggacgtgtcgcttggcgccctctgccttaaaaaagcatttgcgtgcgcaattgactgcgcacgcaaatgcttttttagcctttcctacggcggaaccgggcgattaaaccagaagaaaagagcggggagagaatttctcctctccccgcttccgggcagatgttacgccttgccgtcgcagcccagcacatggatgagcttgtgcttgaccatctccttgatgttggcccgggcgggcttcagatactcgcgagggtcgaacttgtcggggtgctcggcaaagaactggcggatggtgccggtcatggccaggcgcagatcagagtcgatattgatcttgcacacggccagacgggcagcctggcggagctgctcctcaggaatacccacggcatcgggcatcttgccgccgttttcattgatcatctttacgtactcctgggggacagaggaggagccatggagcacgatggggaatccaggcaggcgcttggagacctcgtccagaatgtcgaagcgcagaggcgggggtaccaattcgcccttctcgttgcgggtgcactggtcggcggtgaacttgtaggcgccatggctggtgccgatagcaatggccagggagtcgcagccggtcttggagacgaactcctccacctcttcgggatgggtgtagtgggactcctcggcggagacctgcacgtcgtcctcaatgccggccagcgcgcccagctcggcctccaccaccacgccgtggtcgtgggcgtactcgaccaccttgcgggtgatctcgatgttctcggcaaaaggcttggaggaggcgtcgatcatcacggaggtgaagccgccgtcaatgcaggacttgcaggtttcaaaatccgggccgtgatccaggtgcagggcaatggggatctcggggcactcaatgaccgccgcctccaccagcttgactaaataggtgtggttggcataggcgcgggcgcccttcgacacctggagaatcatgggggcgcgaacctctctggccgcctccgtgatgccctgaacaatctccatattgtttacattgaacgcaccgatggcgtaaccgccgtcataggcctttcggaacatttccttcgtggtaaccagtggcatagagggctcatctccttcgtttatttgccacatgattctatcagttttcattgccaattgcaagaggacgtgctatgatatttacgcaaaaaccgctaggttcaccaaactaaactacggtcagggaggtacgattcatgagtgaattgagaggagcctgcatcatcgggcagtcgggaggccccactgcggtcatcaatgccagcgcgctcggggtgatccgcacggccctggacacggactgcatcacccgggtgctgggggcggccaacggaatccagggcgtcctggaggaccggctgtacgatatggggcaggaggatgccggggagctggagctgctgcggtacaccccgtcctccgcgctgggctcctgccgctacaagctggctgagcccagccaggatgacaccgactaccgccgtattctcgagattttccgcaagtatgatgtgcgctatttcttttacaacggcggcaacgactccatggacacatgcaacaaaatctccaagtacatgcagtccgtgggctatgcgtgccgcgtcatcggcgtgcccaagaccattgacaatgacctcaacggcaccgaccactgcccgggcttcggctccgcagcccggtacatcgctaccacctgcatggaggtccaacgggatacccatgtgtacgacaacggaaccattaccgttctggagatcatgggacgccacgccggctggctggccggctcggctgctctggctgcctgggtgggctacggcccggatctcatctaccttcccgaggtggattttgacatggaacgctttctggcggatgtccaccaggtctatcaggcgaagaacaagtgcctgatcgcggtctctgagggaatccaccgggcggacggcgccttcatcgccgaaggagtttccgccgccgccaacgacggcttcggccacacccagcttggggggctggcggcgctgctggccgaccttctccggcagcgggagccctccgccaaggtgcggggcatcgagttgtccctcccccagcgctgcggcgcccacagcgcgtcccagaccgacatcgacgaggcgtttctggcgggcaaggcggccgtggaggctgcggtcgccgggtattccgacaagatggtggccttccggtgtacccgggagggaggctaccgctgcgagactgtgctggaacccctggatattgtggccaacgcggaaaagacggttccccgcgcctggatcaacgccgatgggaacggcctggagcagcccttcatcgactacgtgctccccctgattcagggcgtccctcgggccccgcaggaacactccctcccccgctatgcacggctgaaaaaggtgctggtctctcaggaggcgtaaaacttgctgaaaaagcggccctgtgcatttgcacagggccgctttttatctggctcagtccaggaaatctcctttgaaaaagttctcgtttgccagtttttttgccgtcaggcgaaagagaacgcagccgtcggggcacacaatatccttgcaataggggccgcttccgcctacgttttccagatcgccgccgcttcggacggcctccatgagggggaaaagcagtagcatggccttggagcagatcccctgcccgtcctgattgaccgggcagccataggtacaggtataccggtctccgacctcctctccgttgcggcaataccgctcagtatggtcgccccggaggaagccggttacctcgacctgaaactcgtactcctcatcgtaccactttttcatgcccgctctccgctcaatgcacgccggtgagggcgcgcatgacctcataggtgtgctgatccagactcttggtcatctggagggcctcggtgatgtcatagtccacatagttctccccctgaagggccaccacccggcaggtcttgccctcggccagcaggcgcaccgcctcataacccatgtaggtagcggtgatccggtcgcgggaggagggggagccgccccgctggatgtgtcccagcacagtgacccgggtatccagggcggtagcctcctcgatgaccttgccgatggagtaggcgccgccctctacgccctcggccacgatgatcatgaagtgggtacggccggccagacgggcccggcggatgggctccagcaggtcggcttcatagtccacagggtgctccgggacgatcacggcagtagcgccgcaggccacgcccacggtaagggccagatggcccgcccggtggcccatgacctccaccacggaacagcgctcgtgagactgcatggtgtcccgcagcttgtcgatggactccagcgcggtgttgcaggcggtgtcatagccgatggtatagctggaacaggcaatgtcgttgtcaatggtgccgggaatgcccacaacggaaagtcctctcttggccaggcagagcaagccgctgaaggtaccatcgccgccgatgcccactagggcgtccagccccagcatcttgcaggtagccaccgccctctcctggccagcgggggttttgaactcctcactgcgggcggagtagagcatggtgccgccccgacgggacaagtcgcttacgctctcaaaggtcagcttggtgaaatcgccgttgatcagaccgtggtagccccggcggatgcccacacattcaatccccatgtgcagagaggtacgcaccactgcccggatggcggcattcataccaggggcatcgcccccgctggtaaacacgccgatgcggcgtactgctttttccatattcaatatcctcctcttaaaccttcagttccgtctctttgccctgtagggcggcagcatagcgctccaacacgggctggacatcgtgagcaaggaaatcctccacctgctgcgggcagcgcccaatatagcgggccggctccaaatgggcggtcagctcctcccggctcagcatggagaaggccgggtcggcggcgatgagctcgatcaggttgttgctaaggccacagtcctttacgttggctcctgcctcctgggagagcacgcggatacgctcgtggagctcttgccggttgccgccccgcttcacagcgtccatcaggatgttctcactggccatgaagggcaactcctcccgcacgtggcgctcgatcactttctcatggaccaccagtcctccggccacgttggcatagatgctcagaatggcatccaccgccaggaaagcctcgggcacggacagacgcttgttggccgagtcgtccagagtacgctcgaaccactgggcggaggcggtgaccgcagggttgaccgcgtcggccatcacatagcgggccagggcgcagatgcgctcgcagcgcatgggattgcgcttgtagggcatggcggaggaaccgatctggtttttctcaaagggctcctccacctccttcaggtggcagagcaggcgcagatcggtggcgaacttgctggcagactgggcaatgccggagagggtggacaacaccgcatagtccatcttgcgggaataggtctgacccgaaacgggcaccacggcgtcgaagcccatctcggcggcgatcttccgctccagcgcccggcatttctcatggtctccctcgaacagctccaggaaggatgcctgagtgccggtggtgcccttgctgcccagcagcttcagagaggcgatgcggtgctccacctcctccagatccatcagcagctcgttcatccagagggtggcccgcttccccaccgtcaccagttgagcgggctggaagtgggtgaagcccagggtaggcagggccttgtactgctccgcgaactccgccaggcgggccagcacctgtaccagcttgtcgcgcaccagcagaagggcctcccgcatgaggatcacgtcggtgttgtcccccacatagcagctcgtggctcccaggtggatgatgggcatagctttggggcacgcctcgccataggtgtggacgtgtgccatcacgtcgtggcggagcttcttttcatacgccgcggctttgtcgtagtcaatgtcggtgaggtgggcctccagctcgtccacctgctcctgggtcaccggcagtcccagctccatctcggcccgggccagggcgacccacaggcggcgccaggtggaaaatttcttgtcgggcgaaaagatatactgcatctcgtcgctggcgtagcgggaggacagcgggctctcataacggtcgtgcatgcaaagacctctttctcctcagatttcactggctagaatatcataaaacgggggcggacacaagttccgccccctgtttttgccgttgtcattccgccaaaaatttttccagacggtccaggccctctttgatattttccatagaagtggcgtaggaccagcggacgaagttgggcgctccgaagccggagccaggtaccaccgccaccaggccgtacttcaggaaggcgtcggcgaacacgtcgtcattggtgatctccaccccgtgaatggtcttgccgagaagctgctccaggttcatcatcacatagaacgccccctccggctggatgcagctcacgccggggatggcgttcatccgctccacaatgtagttgcggcgctgctcaaaggcctggcgcatggtctcaatctccgcctgggaaccggagagggccacggcggcggccctctgggagatggccaccggagaaccggtggagtggctgacgtaattggccatcaccttggcgatgacgtcgttggcgcaggcgtaaccgatgcgccagccggtcatggcgtatgccttggatacgccgttgaccaggatggtgcgctccttggcgtcggcgctgagggaggcgaagctggtgaaggtgcggccgtcgtaggccaggcaggcgtagatctcgtcggaaatcacataaatatccgcctgggtacacacagcggcgatggcctccagctcctcccggtcgtacatcatgccggttgggttggagggattgttgagcagaatggccttggtcctgggggtgatggcggcagagagcttttccgctgtcagcttgaagtgttctgcctcggtggcggtcacaaccaccggcacgccgcccaccatcttgatgagctcaatgtagctcacccagtagggcgccggcagaatgacctcgtcaccggggttgaccactgcccgcaaagccaggtagaccaagtgcttggcgccgctgctcaccaccacttggctgggcttgtactccagtccgtagtcggccttcatgcggccgcacaccgcctgacgcagctccaccgtgccggctgcgggggtatagcgggtgacgttctgctcaatggccgcaatgccggctgccttgatgttgtcaggggtgttgaagtcgggctcccccgctccgaagccgatcacatccacaccgtcggccttcatctgcttgaacatggcgtcgatagccatggtggtggaggcctgtacggccgatgcaatcctggacagctctttcactgaaatcgctcccttgtactttaaaatcgtattttattatatgcggctttgcgacgttttgcaagtccttaatcctaaaaatgcaaaatcggcgcctgccgactggcagacgccgataaactcaggagtggctccgggcgctgaccacgcggacaatcaccgtgctgagcaccaggttaatcaacagttccagaacaaaattgatgctgaccatagtaaagatcatataagtaatgaccgtctgcccagcaccggtggcccatgcctccaaataggtcgggaacaggaaaaacagacccagcaggaacaggccggtattgaccaccgggctgacgatgccagcggcaatggagccgcccagcatacgaccgctgctgtgggatttgccgccccaggcgatggcccgatagaccaggccggcagccagaccggccaggatgcccttgcccaagcagaccaaggcggtcaggaagggattggcattccacaggatcgctccaccggggtcccagcccaaaatgcaggccaacaatacgacggcaccgaataccccgcccaggcacgcgcctgccttcgggccgtacagggccgcgccgatcaggatcggcgccagggccagcgtgatggtgaaggggccgaacttgacaaaactggcgactacctgcaggacaacaataatggccgtcatcagggccagtccggtcaggcgtctggtcttttcgcttgctctcatatgaaattacctcctgctgccgctccttacctggaaggatgcagcgcaatttatttacccacggcagacagccgttgagtacaaaaaatggcgtggccggtcacgctttccggtacttttttgcgtttttctggtagagcaaataaagtccggtcatgatcagatcggcgtcatattgaatgggacgcttgcagtagcgcagaatccgaggggcatttccgccggtggccacggtggtgacgctttggcctatgctctcctcaatgcgctccagcatcccgtccaccatgctggcgtgtccgtagagcacgccggagcgcatggcctcctctgtggtgtggcccatgaggcccaccggggaggcggtttcaatggagataggcggcagagcggccgcccgctccgacagagcgtccagcgccagggccagccccggcataatgatgcagccctcgtatacgctacctacaatgagggacaaagaggtggccgtacccatgtccaccatgacaatggggcttggatatttggcgatcgccgccaccgaagaggccacgatgtcactgcccaactggttgtggatctcggccttgatgttcaaaccggtcctgatgccagggcccaccaccatggggggggtaccggtcaggcgggcgatggcatcgatgaagatggtagtcagcggcggaacgacgctggagaggatggccccgtctaccgtgcacgcatccgccccatagagctgaaagacgcccaggagctcgatggcgcactgatcccgggtcttgctgcgggaggtctccagcagggcgcggaacaataactcccctgtaccgttgaacaggccgactgtcgtattggaattgcccacgtctaccgccagaatcataacatatccccctccccacaaatatttttattattatagcaataaatacagcgaaagatcaagctggtatctgctgttcctaccccttttcggagcttggaactgtgttcaggagtttggtcaagtctcctatggaggcacccattttgaccgaaacctcctccatagtcatgccggaagccagaaaacggcggattaccatccccatgtcctcccccacttcaatgaggtgcccatctggatcgtaaaagcgtgccacccgctggccccagtcgtgttcgatgatgccgccaagccgttctatacccggataggcatccagcttttcaataaatccatcaaaatccgtctcttcaaagaccaattccatattgttgggctttttccgcacgtgcatactcggcactccaattagccagtcaaaatcctgttgcagcgccagcccacaggtaaaggcaatatttctcccgtaatcctgggccacctccagaccaaacaattcctgataaaacgcttttgcagcgtgaatgtccctgacagacagaagtgcgcagatatatttcattggtttgttcccctctccgttacaagatagagccagtataccatatgaagtgggcaaacacaagaaacagggcagccttttggctgccctgttttcatccaatatgacggcagatgagttcgcccatcttttgggtgccgatgggggtgacgcccggcccggcgatgtcgggggtgcgccagccttcggccagtaccgcgtccactgccgcctccaccgcgtcggcctcggcggccaggtggaaggagtagcggaacatcatggccaccgacaggatggtggcgatggggttggccttgtcctggcctgcaatgtcgggggcggagccgtggatcggctcgtagaggccgggggcggtatcgccgatggaggcggatggcagcaggccgatggagccggtgaccatgctcgcctcatcggagagaatgtcgccgaacatgttctcagtaaccaccacgtcgaactggccggggtctttcacgagctgcatggcgcagttgtccaccagcacatcctcgtactgcacgtcgggatactcctccgccagccggtgcatgacggagcgccacaggcgggaggtttccagcacattggccttgtccacactggacaccttcttgcggcggaggctggccagctcaaaggcccggcggccgatgcgctcaatctcctgctcggaataggccatccggtcggcgcactccacgccccggtcaggggtgtcgtaccgctcccgctggccgaagtagatgccgccggtcagctcccgcaccatcatcaggtcaatgcccttctccgcggtctcccttttcagaggacaggcgtccgccatagcggggcgcagggcggcggggcgcagattggcatacaggcccagatcctttcggatggccagcagggcggtctcgggccgctgctcggcgggcttgtcggagccccacttggggccgcccacagcgcccagcagcaccgcgtcgcaggcccgacacttctcggcggtgccgtcgggatagctcttccccaccgcgtcggtggcgcagccgcccagcagcacctcctcataggtgaagctgtggccgaacttctggccgacggcctccagcaccttgacggcctcccccaccacttcggggccaatgccgtcgccgcggatgagcgcaattttataattcatttcgccgcacctctcgccttcagggatttgagcaggccgccgttgtccacgatgccctggacgaaggcgggcaggggcgcggcctgataggtcttgccggtggtctcgtcggtgatcacgccggtgctgaagtccacgctcaccgtgtcgccggcctggatgccctccgccgcctcggcgcactccagaatggggaaaccgatgttgatggcgttgcggtagaagatgcgggcgaaggaaggcgcgatgacgcacttgacgccgcaggccttgatggccaggggggcgtgctcccgggaggagccgcagccgaagttggccccggccacgatgatgtcgcccggctccaccgtggaggcgaagctggtgtcgatgtcctccatacagtgggaggccagggacttttcatcgggggcgttgagataccgggcgggaatgattacgtcggtatccacgttgtcgccgtatttgtaaaccttcattgccttacacctccatcagagcttgcggggatccgccacacagcccgccacggcggacgcggcggccaccgcggggttggccaggatgatctcggagctgacagggcccatgcggcccacgaagttgcggttggtggtggagatggcccgctccccgtcggagagcacgcccatgtggccgcccaggcaggggccgcaggtgggggtggacacggcgcagccggcctcgataaaggtctggatcagcccctctgccatggcgtccagggtgatctgctgggtggcggggatgacgatgcagcgcactccggcggccactttgcggcccttaagcactgccgcggcctggcggagatcctccagacggccgttggtgcaggagccgatcaccacctggtcgatgtgcgtgccctccacctgatccacggtgcgggtgttggagggcaggtgcggcagggcaaccgtgggctggagggtatccagatcgatgaccacctcccgctcgtactcggcgtcggcatcgggctccacggcctcccaggggcgggtgacccggccgtccagataggcccgggtcttgtcgtccacgggaaagatgccgttcttggccccggcttcaatggccatgttggcgatggtgaagcggtcgtccatggacagggaggctaccccttccccgccgaactccagggacttgtaaagggcgccgtccacgccgatggtgccgatcaggtggaggatcacgtccttgccggatacacagggctggagtttgcccttgagggtgaccttgatggcggaggggatgcggaaccaagccagccccgtggccatgcccgcggccatatcggtggagcccacgccggtggagaacatgttcaccgcgccgtaggtgcaggtgtgggagtcggcgccgatcatggcctcgccgggggcggtcaggccctgctcgggcaggagggcgtgctctacacccatgcagccgacatcgtagaaatgggtgatgtcaaagcgcttggcgaactcccgtacctgggcgcagagctgggcggccttgatatccttgcagggggtgtagtgatccagaaccagcgcgatcttttcccggtcgaacacctgggtcagccccgccttgttgaactcggcgatggccaccggggtggtgatatcgttgcccagcaccagatccagcttgccctccaccagctggccggggacaacatgctccaggccggcgtgcctggccaggatcttttgggtcatggtcattcccatggttgggtgcctcctttttatttcagtggcaccagaatagcatggccccttgtcaaaagaatgtaaagcgtgttacaattgaccaaacaggaggtgaacgcaatggcgcaggaccacatctgggcgccgctggcggaggggcagcccacccaccatcgggagccggggcagatgatctatttacaggacacggaggccgcgcagttttactatatcctcaccgggacagtgaagtgctttatcagctcccccgacggggacgagcgcaccctggccctccaccacggcggggagctcatcggcgaggcgtccttctttgaccggcagccacgggtctcctccgccgtggcggtcaccccgtgcgagctgatctcggtgaaccggcagcatctggaggcggtgtttgcccgccggccggatttggccatctccatgctggagtatctggcccgcacggtgcgcctgctctccggccatgtggacagcgcctttttgcaggcggacaagcgcatcgcccgccatctgctggccctcgagccggacgccaggggtctgctccactgtacccatgaggagatcggctcctctgtgggggtgagccgggtaacggtgagccgggtgctgggggacttcgaccggcggggctgggtggagaccggctataagagcctgaagctccgcaaccggcaggccattgcggattttctgaccgagggggtggggtgagcgtgggctggtatttcctgctggcggcggccgggctggatctgctcctccccttcctgctggccccattttaccccggctactcccaccggcggcaggtcatgagcgtgctgggcagcccggaaagtccggtgcggtgggtgtaccgggtgtggctggtggtactggggctgctcctgtgcgccgctacaccagacctttgggctgcctttggaaaccgctcccctgtcctgaccgggctgctgatcgcggtgctctgcgtgttcgccctgggggcgggggtactggccgggctgttcagcgtcaatgccgacaaagcggtggagacggcggcctcccgcatccacggcgtcggctcggttctgggcttcctggccctggtctttgctccccttctggtggcgctgctggcttttcgggagggtgccggcggggccggggtattctccctggtctgctttgccctcgatgtgtgctgtttcaccctctttgttatggcggacaaggaggcgtggcgtggcacccggctggcccaggagggcacatggcagcggcttacgttgctcttcatgtatctgccgctggccgttctggcggccgcacagctcattcaggaatagacagatatcataaggggggcgtcccatccgggacgccccccttaacaaatgcttacagaatgatgcagatcagtccgccggagccctcgttgatgatgcgctggagtgtctcctggagcttggcgcgggcgtcatcgggcatgcgcttgagtttgccgttcagatcctcgctgaccagctcatggaaggacttgccgaagatgttggactgccagatggccttggtgtctccctcgaactcctgaagcaggaaattgaccatctcctcgctctgcttttcgttgcccacgatgggcgagacctcggtttcgatgtccgcacggatcatgtggatggagggggcggaggccttcaggcgcacgccatagcgtcccccctgcttgacgatctccggctcctccagcaccagctcgtcggtgctgggcaccacgatgccgtaaccggtggacttaacctcttccagcgccccggctaccttgtcatactccgttttgacgtgggcaaggctggagagcagctccatgagatcaccatcgtcgtggatggtgaagccggactgctcggagagcgtatcgtagaacagcccccggggcagctccagctgggcggcggccagaccggtgcccaggctgatggaggtgatacgggcgctgctgacagtgtcgcactccccaatggcggtgaccgtacgctccacatcccggatgcggtgcatcccggccgccccctcccggatggccgtatacaggccgctcttgatggggtggtcgtaaggcagggcgtccacccaggggggcaggaacagatccagctccttcaccgggaactcgtagagcacccccttgatgatggcggttaccgccgcctcgtccagctccaggcagtcggcgcacacacacgtcacgtcatagcgggaggcgatgtccgcccggatggcctgtgcccggtcggaattggggtaggacgagttgagcaccaccaggaagggctttcccaactccttgagctcggtgatcacccgctcctccgcctccagatagtcctcccgggggatgtcggtaatggaaccgtctgtggtgaccacgataccgatggtggaatgctccgcaatgaccttgcgtgtgccgatctccgcggcctcggtcatggggatctcatagtcaaaccagggggtggttaccatgcgggggctgtcgtcctccagggagcccaccgcgccgggaaccatatagcctacgcagtcgatgaggcggacggagaaggccgccccgttgtccatggtgacctgaacggcctcctccgggacgaatttgggctcggcggtcatgatggtgcgcccggagccgctctggggcagctcatcccgggcccgctcccggcggtacacgttgtcgatgttggggatgaccatggtctccatgaagcgtttgataaaggtcgattttcccgtccgcaccggccccacgacgccgatatagatatccccctcggtacgcagggcaatatcttcatagatcttgcgttgttccacttgcgattcctccttcggccgcatgagccggtcgttttctctacatacctatggggataagccgtaaattatgcctcgtccccggacagaaccaaaaagcccgcccggcatttgccgggcgggctggttttaccgcttgcgtgggatgagcaggagctgcccctccggggccacgtcctcctccagcgcgttggcgcacatgatgtcctgtgcggtggtaccgtaagacttggcaatgtcccagagccgttccccgtttcctaccatacgcagaacaatggagggctggccggagtgatcccggggggtaccctcatccatatggaccgcagacacggcggctgtggtgcggctggtcatggtcgtgtaccggaaacccaccgggaagcgcacctcaatgccacccgtcgtcggggtggcaaagacaggggcggtacagccgcagtggcaggagcaggacgcctcctcaggcagctccagggggcaggcggcctggagctgccgggtgatggaggtgcgggcgccgtcctccgtgaggtagagcaccgtcacgttggcctcggcggtcagcgtcacccgtctcccgtcccggctctgggtgatggcgccgatggtcacataggcgtccgacacctcctgggccagcatcccggtttccaggatctcccgcactgtcagctccttctccccgtgctccaccagacggcccagcgtataggtccggctctccgccgtaagctggaaggcggtagagtacacatccgtcagcatctggagcgtgcgctcctcccgcaccaccgcttgggccagcagccccatggagacgctgatggtgcggccgtcgccgctgtccagggcgcagtccaggccggtcaaaaccacgtacacatcacaggtggactcctcccccgccccggtaatctccatgatctgggagaagggcagctcatattccgctgtgcacagtccgccggcggaggagcggtagagcatctgaagctggctctcccccttgaaaataagcttgtttccgatgaccttggactcactgcaccgcagggcagcgcggcacttcagcagctcttccgcctccggcttgctgccggacaggctgatttcatcagaaaatgtaaagggcttctcctgcacgcagactgtggtacaggcatcacactgctcagacatctgctgcacaccagcttcctccggagccagcactccgctgcagatgtcatcctccaccggggcatagacctgcacacagaaagccagatccacccggaccagcaccttgcgggggttgatcagccgggcgtctgccccctgtacccgcggcagggctaccacgcggcacagaggcgtcagcgccgggtgctccagagtacaggaaaagggcagttccacctccatccggcgtatcccctcttcaccgtccgggaggtagagcagcgccgcccgtaccgagccggagagctccacccgaccatcctggagcaccttgtcccgcaggcataccacgccctcggtatcgcagatgcgaaggatatccggacaggcatccggtacaatgctctccagtgtctcctcgcggcagacggttgtatccagtacggcctcatagccgctccgttgagtccgatccagttccagctccatagcgttccactccttgtacgggccgcagccctttttcatgcattctgctacagaactatatgtacaaggtgggaagactatgcccgtggctcatgcgccccggatgccgaaaatggtcttgagtattccgcgcagcgctttgggtgatttaaccacgacgatcttcatagcacagcctccctgtcgtcccaaattcgtttgagccagtctctgccccggctgcccgcccaagcacccgcaccgaaggcgatcagacaggccggatggagcagcagggctgccccccccacgcacagcgctgccgttcccaggcgctttctggtttgtagcgtcaaaatggccgcctcctttcgcaactggttctgtaccagtatacgcaggaggcggccaagggttcccagttcatcagacgcgctggctccggatcagcagggcgcggccggcggaaaggcagatctccacctcgtcgcccagcggctcattactcactgagagggtgtcgccgcgagtgagtaccgcgtcggtcagcggatatttgagtccccgcagggtgacgccggtcacgcggcgatccagaggaaccagagagaggtagtgatagcagggacggttggttagccgcagcactccactgtccagcaggcgcacctcattatcggcatccaccaacagcgcccggccgccgtggtcggcgatccactccagaagcaccaagttggaggcggtatggtccagccgtcccccagtacagccgcacagcaggagctcccggtaatccagctccagtgcctgatccaccgctgcctggaggtctgtcatatccttttccaccggaagcgtgatgcaggggacatcgccctccggcgcaccgccggagtcccagtcgccgatcagatagtccggccgcagtccggccgcacgggcgttgcgtaccccgccgtcggcacagaagaccgtccatccgccaccgtccagataagggcggagaaaggccccgtctccgcaggggactgagccgaaaagcagcgcgcgcttcatttccgttcccattcgggcacttcctttgcctgctgatacagccgtacatagctggcgtgacggctgggggcgatctctccagcctttaccgcagcaagaactgcacagcccttttcctttacatgagaacagccggtgaatcggcattgctccagataaggggcgaactcccgaaaggtatattgcagttcctcagggcgacggagctctatctcctccgtgtcgaaggaggagaagccgggggtatctgccacaatggcgccggagcggagccgaaacagctccacatggcgggtagtatggcggccacggcccagcttgtcggagacctcccccacctggaggcggaagctgggctccagggcgttgagtatgctggatttgcccacaccggaatttcctgtaaaggcagaaacctttccagcaattgccccagagagctcctccagtccctcccctgtctcggcgctcacccggagggtggggaacccggcagcgcggtaggtctggtagagctcctccgccgcatccaggtcgcacttgttgatgcagatgaccggctggcagttccgcccctccgcaatggaaaccacgcggtcaatcaggaatgggtcggtaactggaatggcgccggaggcaatgactacgagctgatcaatgttggccaccgccggtcgctgaaattcgttcctgcggggcaggatttcatcgagaatccccgccccgttatccagaggggtgaagatgaccttgtcccccaccaggggggtgatcctctgatggcggaactttccccttccgcggcaggcgaccagaaccccatctccgccgtccacgtaatagaagccgctgatggcctttaaaataatcccttccatcagccgaagttcatcatgcgggtctcggagagctgcccgtcaagatagacatccacttgctggaagccggttccataaagtgttaccacccggacgcctagtacggtctgtacgtcctcattgaactgatcctgcccgttgactgtgacccggacacggacagtctccttgtcggagctggccagatttaccgtatagctgatgggcttcagcgcacctccgctgcctggtgtgggggaaacctccgggtcggtagaggcccccggcgtgggagtcggggtgatctccggggcgggagaggtggagggatctgcccctttgctcaggcgcagatggatggtggaacccttatcgacctcagtacccgtctggatggactgccagcagaccagaccctcggcgtagtcattgctatactgaggctcgtcaaatacgaccaccagtcccagcgttccctcggccttagcgcgggcctcctgctctgtcatgccgaggaacgggataataacagaggtttccgtcttgacaccgctgctgactacaagagtgaccttctccacatcggccagatcggtctccgccaccgggtcggtggaaatcacatagtccttggttacatcctccgaggtctcctcccggataaccagattaccggcctcctcggtgaagccgagttcccgcagggtattgatggccagacgcttatcctgattcaccaggttgggcatccggttctcctccacgtcggtgctgccgctgccgttgctgatatcgacagtgatggtggttcccgccgcagcgttgcgtcccgattgcggatcctggttcacaatctgtcctttgggtaaagtgctgtccacttcctgcccctctacgacctgaaattgagccacggttacgccgctgtccgcccgcgcttcctcgatggtcttacccaccagattagggacattgtagacagtctgccccgggctgctgaagaaggagacccagagaaatacgccgatgccgactacaaacacggccactgctgcaatagccagaataatgggcagacggctgccgcccccatcccgccggtccggataatcgtcgtagtccacctcgtcctcaaggggaaccgcacggcttttgcggggcttcggtgtgggacgggcatagggctcctccgacgcggcccggctggcatgggccggctgggaacgcacggtatggggtgtgttggcgcccagaatctgagtaggctcgtcgccgtcggcgatgagcagatcggcgggcgtatagtcgaaattgatgctgggattcttgcggaactcctccagatccatcagcatggcgtctgccgatacatagcgctggttgacatccgaggccatagctttcatggtgatggcctccagagcctctgggatctctgggtcgatctcccgtggggagagcggaatggagttgatgtgctggatcgccaccgccaccggggactccccctcatagggcaggcggccagtgatcatctcatagagtaccacaccggcggagtagatatcgctgcgggcgtcgatatggctgccgcgggcctgctccggcgagatatagtgtactgagcccagggcctcctgggtcagggtggcctgggcggcggaggtgagccgggcgatgccgaaatcggccaccttcaggctgccgtcccgcagcaccatcatgttgtggggcttgatatcccggtggataatcccccggctgtgggcgtgggagagggccttcatgatctgagtgatgaagtgcagtgcctcccgccaggccagcttgcctcccttcttctgcatatactgcttgagggtgatgccgtcgatgagctccataacgatgtaatccagctccgtggagtgggacacatcgtagaccgccatgatgttgggatgggagagcatggcgacggcctgggactcatcgtggaaccggcggcggaactcagcgtcctgagccagctcctccttgagaatcttcaccgccaccagccggttgaggcggtgatcccgccccttgtagaccacggccataccgcccgtcccgatgcgctcaataatctcatatcggttgtcgagtaatttccctatgtactgatccatagttcattacccccttttaaacgatctgaaagaggaccgccgtaacgttgtccggcgcgcctctggacagagtgatgtggagcaggcgctggcagcagtccgacggctccccgccgtggatggcctcgtagagcagctcctggtccgtgacgatgttgctcagcccgtcggagcagagcagcaggaagtcccccggctggagctccttctcgtacagatctgcccggatgcgctcctcagagcccagtgcccgggtgatcaggttcttccggggatgagtacgggcctcctcgggggtgatgtccccccgcgccaccatgtcctccaccaccgagtggtcccgggtcaggcgggtgatcccgtcttcattgatgtgataggcccggctgtctccgatgttgagcagataagcggtctgctccaccaccaaggccgccaccatagtggtgcccatgccgcggcagtccgggtcagtgacggcccggtgatagactgccgtattggcggtctccgcggcccgcgaaagaacggcggctggccccgcctcgccatcgccatccggctgcatgccctgcagggcgtccacgaaggtttccacggcgatgagactggcgatattgcccgccttggccccgcccatcccgtcgcacacgacgccgaccgccaggtgctctgaaggaacgtctaagtagaaaccgtcctgattttgtgttcttaccgcgcctttgtcggtaataccccatgcgtgtatcatactgaacttgcctctttcccgcgccagtctgcctctgttcacgccctgcgcggccaggcgtgagccgacttatgttaagtgtgttcctgctgcattgtcttgcggcggagctgaccgcaggaggcgtcaatatcgccccccagcttgcggcgtaccgtggcggtgatgccgtggctctccagccgcttctggaaggccgccacccgcctgctgggcttgagggggctctcctccacattgttgaggggaatcaggttcacatgccccggcgtccccttcaggtgccgagccagcagatctgcctgccagtcggcgtcgttaactccgtcaatcatggcgtattcataggagatccgtcggccggtcttttcaaaataccggcggcaggcggcgaacagcttctccacccctacgctccggttgaccggcatgatgcggctccgggtttcgtcgtcgggggcgtgcagggacacagacaacgttaattgtaactgatagtcggccaatttgtcaattttttcagtcaggccgcaggtggacagcgagatgtgccgcataccgatgttcaggccgtcggggctgttgaccagctccagaaagcggagcaccgtgtcgaagttgtccagcggctccccaatgcccatgagcacgatgttgctgaccggggctccggagtccatctgggtgaaaagcacctgatccagcatctcagcgggtgttaagtcccgcaccttgccccctagtgtggaggcgcagaaagcacagcccatgcggcatcccacctgagaggagatgcacacagtattcccatgatgatagcgcatcaaaaccgtttcaatacagtttccgtctcccagccgccacaggtacttgatggtgccgtccagggaggagacctgcctgcgctccacctggggcgcgtagaggatacaggaggcggccagcttctcccgcagaggcttggagaggttggtcatctcgtcaaaagagaatacgccccggtgaagccactggaacacctgcttggctcggaacgccggctcccccagctccttgaaataggcggccatctcggtcagattcatggatttgatgtcggtcatgcgttctctcccccgccgggcctccccggcggctccagtccgtatttttttgccaccgctgccagacgctccggtgggatgggcgctggctcctcctgccgcaaaaaccaggaatcgtaatccggggcagggcactccctcagagggaaatcagcccggaactgatccgactgcacccaaacctgaaggaaataccaaccgcgctgataatctgtaaagggatcccgggtaatcatacgctgaaagccgggttctttcagcagtttagggtgataaggttcctcccgccacagctccagtcccagcaccggaaagttgtaagtatccgccaggtcatgatccacacagtcgcacacaaagccggactcctttgacaggacggcaatcacatcctccacatgggtgtggatcagatcctgaccacggtacaaaatccggatattctccgacgtattcagtccgatccgggacaagcagccttcttcatactccaggtaaaaggagtcagggggcttaggcaggcccagccggttccggagtttctccgcctcctcctgtgtcatgcccaagcggaaaggccccagcccaacacggggatacacctcataatccatcttaaatcctcctgagcttggcaaagaaaaagccgtcggtgccgtggcggtggggccagcaggtgagcatgccggtgtctgtatccaagaaggggccagaaacttggaatccctctagtgtaaagtctctctgcttgtccaaaaacgctctcacgaccccctcattctcccgctccagcagggtgcaggtggcgtagagaagcacgccgcccgggcgcacataatccgccacattgtccagaatggcggcctgcacacggggcaggttctccagaggctcaggatccttgtagcgaatgtccggcttcttgcggatgatacccaagccggagcagggtacatcggcgattatcagatcaaagctgttaagtaattcggcttttcgctccttgccgtccaacaggtttgcatggatgatatccaggcccagccgctgatagcccgcctcgatcaggcgcagcttgtgggggtgaatatcacaggaggtgacgctcccccggttctccatggcgatagcggcggcgaaggatttgcctccaggggctgcacaggcgtccagcaccctccaccccggctgcggcgcggcggccagcaccgccagatgggcggcggcatcctggatgtaaaagtaccccttctggaacgcctccaggtgttccagacttccggtgccgttcaggaacaggcagtccggcagccagggatggggttccactgccaccccctcggccgtcagcatggcagccagctcctctgcggagattttgagggtgtttacctgggcacaggtggggggctcgccgttgtcggcggccagcagggcctccgcctcctctctgcccagccgggcaacgaaggaatccaccagccactgaggatggctgtaccgggtggagaggtcggcgggcggctccagcgcctcccgctggcggatcaggctgcggagcaccccgttgaccagccctgcggccctgggatttttggccttctttcgggccaaggacaccgcctcgctgacggcggcgtgatccggcacccggttcagatacaaaagctgataggctcccaggcgcagcaggttgcggatagacgcctccagcttgtgcagcggggtggcacacagctttgaaaggtaaaaatccagcagcatccggttttggagtacaccgaagcacagccgggtcgccagagcggcatcccggccgtccagcttcgctccgccgatggcctttttcagatatccgtctgaccacgcgccctgcctctcgcaggcagtaagggcgtccagtgccacttctcgggcctgcttcatctaatccctccgtcgtcctgcaaaggccagcaggaaccgcagcagttgagccagggagaccagcagggctgccacataagtcatggcggcagcccccagcaccttgcgggcaccccgaagctcatcgtcctccagcagatgggtgccctccaggctggcaatggcccggcgggaggcgttgaactccaccggcagcgttacaagctggaacaccaccgccgtggcaaacagcagcacgcccacgccgaacaggggcttggagtagagcagcaggccgatgacgatcaaaatcagggagagctgggagccgatattgcagatgggcaccagggcggaacgcagcttaatggggccataccccaccgcgtactgcaccgcatggcccgcctcgtgggcggccactcccaccgacgcaatgctgttggagccgtacaccgcgtcggacaggcggatgacattgctccggggatcgtagtggtcggtcagccggccggagacccgctcaatgcgcacattttgaatgccgtgggcccgcaatactgcttccgccgcctgggcgccggtaaagccccggcggctggccatacgggagtaacggttgaaggtggaggacacattgagctgggccagcagggcgatcagcatggccggtaccaggatcatccagtaatagggatcataatagtagaaaaacggcatggaaacctccgttcacataatctgcccgcccaacaggtagcaccacaggttcgccaggaacccgacccccatcccgcccgccagcagggcggtgagccggggccgtttttccgtcagcgcagcggcgaacaggaagaacggcagggcgcaggacaggtagcgcccggcgctgagcagccaggacagggagtagttgagcaccagataggcgaaggcatagagcgtatacatactccggaaccgcccgcaggcgtaccagagcagggcaaaaaaggcggcaaagagcagcagggtgggaatccagatctgaatccgtatcgcctcgtcatagtaggacagggcattttgcagcacataccacagagtgtctgagatccagcataagccctggctccagtgctcctgcatcaccgtaaaggcaaagggagcccccgccacggcggcgttgaggccgagataggccaggctgcccacagcgggcagcagtaccgccggcaggcggcggaggatggccctcccgtcaaatttccccagactctctaccaattccgctcccgccgccccaatgagtaacagaccatgcatgcgggtcatagcggccaaaacaccccacatacccgcccgccaccaacggtggcggcggatgtgccagagagcggcggccgtagtcagcaggaacagcccctcggtcatcaccccgccgaagaaaaaggcatatggaaagagagacaagaagagaaccgtccgccgggcggcacctttccccagctcccaggccgccagccggtacagatagacgcaccccgcggaatagcacaaaaaggacaccatcaagcccgccgccatggtattatgccccgtcaaggggcaaaccagccgcaccagccagggatagagggggaaaaagaccaaaaacaggggtctgccgtcctcccaatagccggtgtagcccagttcggccaggccaacgtagtgccatgcatcccatttcttccagatatccgtggcccaggacagaccggtatccgggtagagcaccaggcaggccagcgcggccaccgccagaaagacggtcaggcggaagagcagggcggcggagaacacatgcagaagctcccggcggcttacctcacagcctctgggggcagatgccggtacggcacagggcgccggaagtccggcggcccccagccaccggagcagcagagacagccccagggccagcactactccagagaccgccagcgtccagagcagatggatcatcccacggggatggggtgcccccgcagatagtcggcggccttcatgcgcttgccgccgtcggcctgaagctcgtcaatgcgcagtaccgtgccgccgccgcaggccacctgaattccctccttcccggcggccagaatggtgccgggggcggcggaagtcgtggcgtccagtacagaagtggaaaatactttacagcgattgccgcccagctcagtgacagcagtcggccaggggatcagcccccgcacctgattgtggagcgcccgggcgggccggctccagtccataggggacagctcccggctcagcatgggggccagggtggccttgccgtgctcctggggggtgcgtgtggccgttccggcggcgatgtccgccaccacgttcaccagcagctccgctcccagcaccgctaggcggtcatgaagagccaccacagtctcgtcgggatcgatgggggtggcggcctgggcgatgatgtcgccggcgtccagatcgtgggccatgtgcatgatggtcacgccggtctcgcgatccccgttgagcaccgcccagtggatgggggccgccccccggtagttgggcagcagggacgagtggacgttgatgcacccctttgggggtgcggccaggatctcgtccggcagaatgcggccgtaggcggccaccacaatcagctcgggagccagctcctgaatcagcgccagagccgcgccgtcccgcagcttgacgggctgatagactgggatattgtgggccaaagcgcacaccttgaccggcggtgcctggagcttcatgccacggttcctgggcttgtcgggctgggtgaataccccgcagaccgtgtgcccggcggcaacgagcgattccagggagggcacagcaaaatcgggggtgcccataaacagaattctcattcgccctgctcctccatcatgcggtccagctcctctgtggtgtagagccggtcggtatgctcggtgaacagatggccgtccaggtgttcaatctcgtggcagaagcagcgggcgacgatctcctctccctccgcttcaaagaaattgccgttgcggtcctgggcgcgcacacgcaccttgtaggggcgcttgaccacgccccagcggccgggcaccgacaggcagccctcaaagccctcctgctccccctcctgggtgagaatctcggggttgaccagctccagcatgttgtcctcggcgtccaccacaatgaccacccggcggagaatccccacctggggggcggccaggccagccccgttggcatccgccagggtctccttcagatcgtccagcagcgtgtgcaggcgggcgtcaaagctggtgaccgggcggcacatcttgtgcagggcagggtctccatccgtcaaaatcttgcgcagggccatggtgtttcctccttaatccagtgggttcacgtccgccgagacggacacccccttgttttccttgtcggtttgcgcacagcggaccagatgggccaccatggcgcgaatttcctttgtattttgtgccgccagagtcaggcggtagcggtagcggtcgttgatcttggccacgctggccggggcggggccaaggacggtcagctcccagtcccgaaacggcggctgggccagccacccctccagggagcgccgcaggcgcatacaggtgcgcagcaccgcgctctccagcggccccgaggctgtcaggacaaacagctcccgaaagggcgggcacaggcgcatccggcgcagctcgatctcctgctcatagaagctgtcgtagtcctgacgggcggcgcagcggatcacgtcattctccggggtaaaggtctggatgaccgccctcccctgtttggccccccgcccggcccggcccaccacctgggtgagcagggaaaaggtgcgctcccccgcccggtagtcgtccacatacagggagagatcggcggagatcacccccaccagggtgacattctcaaaatccagccccttggccaccatctgggtgcccaccagcacgggaatccgctccttctcaaaccgggagagcagcttctcgtggctctgggtggcggagacggtgtcggtgtccatccgcaggatctcccgccccggaaaggcggcgtggagctcctcctccaccttctgggtgccgtagccgaggaagttcaacgccccgccgcaggaggggcaggcgtcgggcagcggctcggagtggccgcagtagtggcacatgagccgaccgttggccgagtggtaggtcaggtggacggagcagcgggggcacgtgggcacctcgccgcactcgccgcaggtgaccatgcggctggccccccggcggttgaggaagagaatactctgctcccccgcctccatggcggcggccagcccggtcctgaggggcccgctgagtgaggtgccgttgccggcgcggagctcctttttcatgtcggcgatgagcacctccggcagggcctgctcgttgtaccggcggcgcagggtgaataggtggtagtccccccgcttggcgtggtacatgctctccaccgacggggtggcggagcccagtaccagcagggcgtcattctgagcacagcggtattttgccacgtcgcgggcatggtatttcgggacattctccgatttataggtggactcctgctcctcgtccagaatcagcagccccagattccgcaggggggcgaacacggcggagcgggtaccgatgaccacccgggcctgaccgctcctcacccgcttccactcgtcgtaccgctcccccgcccgcagggatgagtggagcacagcgatgtcgtccccgaagtgggaggcgaagatgcgcaggagctggggggtcagggcgatctcgggcaccagcaccatggcggtacggccccgggccagggcctcatagatcaaccggaggtacacctgggtcttgccgctgcccgtcaccccgtacagcagggcggcagcgggtctttcggccgccgccagggcgtccagtccctcaaaggccgcctgctgctcggcgttgagcaccgggggagcggcccgctcccccgcctccaccgtcacccgacggaacacctcacggtgttccaggcgcaggataccgctcttttccaaagagcgcagggtggcgttggcggccccggtgaagtagcacagctccttagccgaggcgctgccgagggcgcacagcagctcggtcacggcataccgcaggggcgcggagcggcgccttggcgtgaccagggccatggcctcctcgggcgggatggccagcgaggccaccagctctttcttgtcccccaccccccgggaggcgctggtctccagggtaagaatccctttgtctcgcagcagcttgagggcgggattggggtccctggtgccgaaggcctccctgatctgggatacgtcggcctcccgccccgaggcgaagagtagctccacgatgtgccgggcgtgctctgaccggcccgccgccgcataggccgcctcccgatccacgccgggggccagcttccagcgatcctgaagggagaagtacagccccgccgggagcatggcccgggccgcgtcgtacacggtgcagaaccagcgttcccgcatccacagggccagccggagggcctcgccgtccagcaccggctcttcgtctagaacggtgagaatgctcttgcgccttgggtcgtccgggtacccgccctccagcgccaggacgatgccctccgtccggcggttgcccgccccgaaggggacgaccacccgcataccggggcgcagggtgtccagcagctccggcggcacctggtagtcgtagggcttgtcgatggcgtaggtggcggcctgcaacgcgatcttggccacggtattcccctccatctctccgccccctttcctccagaaaaggcaagcgccgggcgcttccccgtcgcttgccttatgctcactcctcgtcgttcagctcaaccttgccctcggccacctcacggatagcgatggtcacgggcttgtcgtccagcggaatcccggcatcctccgcctcgctggccacctggcgggcccgctgggccactacgttcaccagcatatagcggctgggtacctgcttgagcagttggttcatcgggggttcgagcatcatattggatcagactccttccacaagattgattcggtgcttggtacggcagctctccgccgtcaggatggcgatgatctcgcccgcggcctcggataccttgtcgttgaccaccagatagtcataattggggatctgcttgcactcctcccgggccttctggaggcggccctggatgacctcctccgcgtcggtggcccggcggtgcaggcggcgggagagctcctcaaaagagggggggatgataaagataaaaaccgcgtctgggcacttggcccgcaccttggccgcgccctgcacctcaatatccagcagcacgtcggtgccggcggacagcttctcctcgatcaggcgaagggaggtgccgtagtaattatggacatattcggcgtattccaacagctcaccgccggaaatcatggactcaaactgctcccggctgacaaaattgtagttgacgccgtcctcctctcccacccgtggctggcgggtggtgaaggaaacggagaagtagatgttttcccgttcgctcaggagctcggagatcaccgtgctcttgcccacaccagacgggccggagagcacaataagctgccccctggttttctttttcaggttcatgcgtcctcatcctcctctggggcgggctcgttctcccggccgcccagccgcccggccactgtctctggctgtagggccgagagaacgatgtggtcgctgtccatgatgagcaccgcccgggtgcgccgcccataggtggcatcaatgagcacaccccggtcccgggcctcctggaccatgcgcttaatgggggccgactccgggctgacaatagcgatgagccgtccggcggaaaccatatttccaaatccgatattgataagcttcatcctgccccaccgccttactcgatgttctggatctgttcccggatcttctcgatctcggccttaatatccaccacgtatccggcggtctcaatatcattgcatttggagccgatggtgttagcctcccggttgaactcctggatcagaaagtccagcttgcggcctacgggtccctcctgggccagcatgtggtccagttgggacaggtgactgcgcaggcggacggtctcctcgtccacagccaccttgtcggcatagacggcggcctcggtgaggatgcggctctcatcaagctgggtgttctgaagcacctccgccattttggcgctcaggcgggcccggtagtcggccacaatgccgggggcgcgctcctccaccctggtagtgagggcctcgatggtgcgtgcccggccggtcacatcctgaaagagcttttcgccctcccgcgcccgcatggcgtcaaagtcctgaagggccagctccagcacggagcagatgtccgcgctcacggcctccagatcctcctgggtcttctctaccaggaagacatcctggaaccgggagagcagggaaaccgaaatgtcgtcctttaagccgtagctgtcccgcagcgcgcacagcgcggcatagtagccatccgcaacaggcttgttgaccgagatggatacatccccgttctctgacgggccgatggtgacgaacacatccaccttgccccgggagatatgggcctgtaccttggatttgatggcgtcctccgcaaacacatagatgcggggcagcttgatggtgcagtccagatagcggttattgacggagcgcagctccacagtgatggagcggccatggaccacggcctctcccctgccgtagcccgtcatacttttcaccaacgcgggttccccctgttccattcgtcttttgttctgaggctattcaaaaattataccagactaggaagtctttcgcaataccctgtccacccgggccacataaaaggagatgagcttggagaagcccacgtcgtaaatcacaaaggctgcgttccccgccgcatagaccatccaaggcgcttgcagcgtctccggcagggagggcagaaacaggctgtgcagaccgaaccagaacagggtcagaacggcgttgaataccgccagcttgcacagccactccagcggccggacgggaatgcgctccagcaggctcttgagcatgggccagaggccgaaaaagagcaagtagagcagggcgttggccttgtcgggcaccagcagcaggcccagcaggcctgctgcgccgtagcagaagaaccccgccttcagcccggccgacaccaccgcccccgcaggaaagaggccggcaatggctacaatacccatccgcgccgtgggcgagacggcggagagatagagggcgatcagcgacagcgcggccagcacgcccaccaaggccacccggcttgcgcccgtttcagtatggtttcgcatggctcagttcccacagcacatgttcatgcaaaggcaggccgtacagcagtcgcaggcgtcgatcccaccgccgtagccgtaggggcggtaggcctgtccaccctggcgcatcatcatcagcgcctgccggtactccccgttggccgggtccatgttgcaggccatctggaaatgctgggtggcctcgtccagccagcccttgcggtaggcgatggacccggtgaggaagtgccactcggcatcctggctggcagcgccgcggaggagctgctcggcccggccgatgtcgcccatgttgatggcctgccgtacctggttgtagaggctccctgaggaggcgctggagtactgctgctgatagccgccctggtaggagccgcggtaggccccctggctctggtagccgccggaggcccctcccccgctgcgcatcttggtaatggtatcgtaggcctcgttgatctccttcatcttctcctcggccagatcggccagggggttgttttgatagttgtccgggtggtatttccgggccagctcccggtaggcgcgtttgatctcctcgtcgctggcgtcgggcttgacccccagcacaatgtacggatctgtcatgaaatccttctcctgttttgatgattgacggccttccaacggccggtaaagaccagctcctccaccataggcagccccagatagaggatattctccacggcgccctgccagtggcccagctccaggagcgcacaggcggagcgggccaggttcagagagtggagaagggtggtgcgcagataatcccggttggcctccacctgctccgggaaacgggcggcaatggggttgtaggacccggtgcgtccgtcctcctccagatcgtcccaggcgtccaccaggtaaatccaccgccccacatggtagaggagctgctccagggcgcgggtccgggcggaggactccgccggaagggcggccgccgccaggatgcgggcaaaggtgtccgccgtccggtccagtgagggagagccctcctgctccagggcctggagctcctccagacagcttcgcaccgcccggtcaaactccggccgggcctgggccgcccggcggtagccgggtcggagcagaaaggacagaacccgggcggcatttcccttccagaagggaccgtccgccaccgtgtcccgcagcttccaatagctgaggatggttccagcgtccgccgccgcatccacgcttccggcgcagatgcagccttttttccgacaccagaggcgggccggacagcgcttccgctccgccgtaggcttcgagccgtccaagagcatggcgagaaaggtaaagtcgtagttcagaaagaaccgggcgaaaaagccgtgccgccttcccaatgcgcggcagagtccgcagtagagggcctcgtagtcccgcagctcgcgcactttcaactcgtcccggttggggcgcacatagccgaacatcaggcctccggcgcaatggcggtaatgcagaaggaaatggcctgctgcctgcgcacccggcggtcccacagaacggccagcaggagccctagtgcgaacccggccaccccgacggccgcgctgactcccgaagagagccggaaagccgcacagaggaaatagccggcgaaaaagagcaggaagggcaccagatagacgatcacagccgcgcccagtacccggctggtggaggactccaccgtcaccatgtcgccgggcatggcccggaccggattggcggcaatcactgctacggtggagctgaccatcagttcgctgcagcctccgccgcatttggagcagtcgtggccgcaggcagactgacgcttgacggccacctccgccctgccgtcagccaggacgcgggttacctttgctgtttgaaccatactttcacctgatttctacgatcttgagaccgaaatggaaatgttgtactcaccgaccacgcccacctcgctgctgccatccagatagaccttgaccggcactgtccggcttccagtggacagatccaggttggacagatcggccacaatccggacttgggaggccgtgaccgcatctacggcttcctgggtgccgcggatcaaaaccgtgcaggactgggtgttgcgtgtgatctcatagccgctcggcttattgataatctcaatatttccagcctccagtgtcttagtgaccaagccctccacggtgacggttaccttggcctctgtagtgccgctgacattggtcagggatgggtccaaattgatcgtcatagactgtgtcagggtgccaaataccttggacaggtcaatctcacccaggctgatgcggtccaactgatccaggatctctgcgctgcccgctaccatcagggttctgggctcaatgtctacggttacattatctgcggtggcaccgccgccgggaatgagatccacggtcagctccacctccttcatcttctccaccgggagggtaaccagcacggtctccggttccgtctccaccaggccggcggcgatgggctggccgttggtgccgatgagggtatagctacagtcggcgctgtaggtggaattcatgtcctcctgagagatggtgatttgggcgtgatccacctgactgaccagctcctcctggccgctgacggtaatggtatccggcgcgaaggagaagtcacggcgttggaagccttcggccacgctgccgttaaaggtgccttgaaccgggatctccttgctgctccagcgggaaacggtgaagtcgatggtacttgggctggtgtagcgtacatcaatggagtcgattatggtgatggagcggggaaaattgatgttgcgtgaggtaatagccacactctgctcccctggctcggtaataccggagacatccaccaccacagtggtatctccctggttcaggcggctccacacctcgccgcgggcagacagctgcaaattgaccgtctgctctgctccctcagagatcatcagtccccgctcttcaagcttttccaatccactgaataccacccggacattccgcagggttccggtgtccaccgagttggggtcgttgccgacgtagacccagaggagaaacgccagcaggatggagagcaccacatagaaccaccggctgttaagaattttcgttcccatcctgctttttcccctttccaaagcggagcagattgcccagcttgaatttggacgcggcctcgtcattctcccgttccggaagcagctcattgcggagcaggcgctccagagtctccggcgccaggtggcgcttgagcatgccgcccaccgccacggagatggagccggtctcctccgagacaatagccaccacggcgtccgtgtgctcacttgctccgatgcctgcccggtggcgcatgcccagctcccgcgacagatttacattgcccgacatgggaagcatacagcccgcgcccacaatccgtccagcgcggacaatcaccgcgccgtcgtggagcggggccttgttccagaagatatttttcagcagttcggcattcaccgtacagtccagcgcggttccggtcttaatggcgtcatctagcatgtttttccgctcaaacaccatcagcgcgccggtcttgctcttggaaagggacatataggcatccaccgtctgagtgatggcactatccagctcgttgcgtgcctcctccggtgtaaacaccttcccgaggctggtgcggcccatctgctccagaaagcggcggatttcaggctggaaaatgaccaccagggctaccacaccccacaccatgagctgctgaagcagatagctgaccgtgttgaggtggaaaaaggtggagacacccagggcaaacagcagcagcagtacgcccttggccaccgcgccggagttggtgcggcgcatcagcataatcaccttatagataagaaaggccatgatcgcgatatcaaccacatcagagataccaaacaggacgacctttcccttgaattcctggagcaaatacaaaatgccttccatttcctcgtctcccgcttccggccgcgccggcatccttgcttcccgcagagtacatgtatatcctttaactgatttattatactgtattcacaggcggttgacaagtagaagggaaatcaattttctgtgaacaggccctgtgtgcagacacaaaaaatagccgcagacgcggctatttttgcccggcggtcagccgcgcaacctcctgtgtgaagcgctcgacttcccggggtgtattgaaggcggagacgctggcgcggactgtcccagcctccagcgtcccggccgactgatgggccagcggcgcgcagtgcaggccggcacggacggcaatccctctggcgcccagggcctcgcctaccgcttcacagtccattccgtctatctggaaggagagcacgccggcctggacggctcccccatccccgtagacagtcacgccgggaatgcgggacagtccggcagccgcttggcggatcaggcggcgctcatgggtcaaaatacgctccgtcccctgtgtctgaacataacgaagtccctccagcaggccggcaatgccgggcatgttgtgggtgcctgcctccaggcggtcgggcaggaaatcgggcatggcctggagcgccgaggcgcttccggtgccgcccatgagtagtgggtgggtctccgccccgcagagcagcaggccggtgccctggggaccgtaaagtcccttgtgtcccggcatggcgacaaaggctgcgcccagctcccccatgtggacgggcagacacccggccgactgggaggcgtccagcacaaagggaattccacgttcccggcacagggccgcgatgccctccaccggcaggatgaagccgaacacgttggacacatggttacaaatgacggccctcaccgtctcgtccagctggcgctcaaaggcgcggacttgagcctccggatcaaagagcgggcctgcagccacccggatattgacaccaagggcgtggagcggtcgggtgacggcgttgtgctcatagccggagatcaccacggcgtccccgggcttcaacagggaatgaatggcgagattcagcccatgggtggcgttggaggtgaacaccacctgttctgggctctccgcctgaaagagctccgccgctgcctggcggcagagaaaggcggtctccgccgcccgcatggcgggaacatgcccgccgcggccaggggttgccaggcgccccactgcggacgaaaccgcccgcgccacggcgggcggtttttgtaaggttgtggccgcgctgtcaagatagatcatagcagaacctctttatagctgccgtcgctggacatgatatagatgcgcttgggcgccagcccggcgcggcccaaaatcagcagcgccggggccagattgcgttccgaaaccttgacggagtggctgcacccctccccggaaatcatctttggcgagcggaggatgtgggccgtaatgcccgcccgctccagagcggaggccgtccgctgggcgtaggtcagggaacggcagacaatgagatagtaaaccatatagaaacgctcctctcagtgcagtgtatgcaccggaggagcgtctggttcgccggttacagaaggttctccaccaggcagacggcatgggcggcaatgccgtctcccgtgccggtaaagccaaggccctcctctgtggtggccttgacgctgacagcgtccaccggcacctggagccgccaggccagattccggcgcatttgctccagatagggggccagttttggggcctgggccagcacggtggcatccacattgcccacccggtatcccctctgacggaggcgggaaaccacctcgtccagcagccgcaggctgtccgcccccgcgtaggccgggtcgctgtccgggaacaggtgcccgatatctccaagggcgcaggcgcccagcagggcgtccatcaccgcgtgggtgagcacatccgcgtcggagtgacccagcagacccttgtcaaagggcacctccaccccgcccagaatcagccgccggccctccaccaggcggtgtacgtcatatccatgtccaattctcactgctgctccctccaagcgaaaagcgcctccgccaccgccagatcctccggggtggtgattttcaaattgcagtagtccccctgcgtcagggatacgccgatgcccagccgctccaccgctccacagtcgtcggtcagggcggccccgtcctccagggccttgaccagggcggccttgatcagatccacctggaacacctggggtgtctgcacggcaaagagctccgaacgctccagcgtagcctccaccagaccgtcccgcgcccgctttacggtgtccttcaccggcaccgccggggcggctgcgccgcactctgcggcgcggagaatcaccgtctccagcacctcctggctgaccagggggcgggccccgtcgtggatggccaccaactccgcgccggaggagagctccccaagcccggccagaaccgagtgagtgcgggtagccccacccactatcaccttgcggaccttggacaagccggcatcccggcagagctggccaatggggacgatcagatcctcccgggtgaccacgataatctcggcgagataggggcacagctccagcgcccgcagggtatgtagcaaaacgggctgatcctccaggggaaggagcagcttgtcctggccctccatccgggtggagctcccggccgcggggaccacggcggaacagcggagctccggtgtccgctgccgccggaatagccgcccaagcagtccggccatgtccattcctcctccacaaaaaaagagccgtttcggcccctcccccgtttccctccaggggtccggtgggcggtcacagcggaccgcccctacagactgtattaggccaaggcggtatttatgcgcgcctcaacatcttcataactggcatcctgcgagagcacaatctctgagatcaaaatctgcttggccgagtggagcatcttccgctccccggtggacaggccgcgctcctcctcgcggagcatcaggcccttgactacacgggccacctccagcagattcccgctcttgaggcgaagcatattctcccggtagcgccggttccagtttggggtcatgtccacctcgatgtccgggatggccgcgatcacccggtccgcctcgtcgcccttcaccaccgggcgaacaccgatctcctcactgtttgccgtggggatcatgaccagcatgccgcccaccggcagcttgagaatgtagtaatcccttaccacgccgttgacttttttctgcacgatgctgtcaatgataccggcaccgtgcattggatgcacaatcttgtctccaacctgaaacacgctcccacctcccagcagaacattccgatgcgtataacttcatttttaccctacatatcgtattatagacgcattcctcaccctttgcaagtcattttgtgtgtcttatttgtaaaaatgaaaaaaaccgtgcggtttccaagcggaaacagcacggtttcattgtaggaatgtgattactcctcgttgacatcctcggactcagcgggctcgtcgccgccctccagcagggcgcggatggacagggagaccttcttattgtcgtagtcgatgtcgatgatcttcacatccaccatctggccctcgctcagcacgtcaccgggcttgtcgatgcggtggtcggcgatctgggagatgtggatcaggccgtccacaccgggcacaacctcggcaaaggcgccgaaagtcatcagcttgactacgcggacattggccacgtcgccgggctgatacttgccggtgaacacctcccaggggttctgggagcggtccttcatccccagggagatcttcttcttctccttgtcgaaggagatgacatagacctccacggtgtcacccacggagacgacctcggagggatgcttgatgcgggaccaggacagctcagagatgtgaaccataccgtccacgccgccgatgtccacaaaagcgccgtaagaggtcaggctcttcacagtgccggtatagcgcttgttctcctcaatgttggcccacacctcggcggccttggcggcgcgctcctcggcctcaacggcgcggatggagcccaccacacggcggcgggcgcggttgacctcggtgatgcgcaggcggacatgctgcttgagcagctggctcatcggggtctcccggggcaggccagtctgggaggcgggcacaaagacgcgcacacccttgatggacacaacgacgccgcccttgttctcctcggtgaccacaccctcaacggtggtgtgctcctcacgggcctgctcgatgtcatcccagctcttcacggtgtcaaggcgcttcttggagagggtgaccacaccctcctggtcgttcacacgcatgacataggtctcaatctcgtcgccgatctttaccaggtcctcaaccttggccgtagggtcgtcggtcagttcggacaccggtatgtaaccggcgtgcttggtgccgagatccacatagatctcagtaggcgtaatgccagtgacaacgcccgtaaccttctcccctgtatttaaagttttgatcgacttctccagcatttcagcgaaggattcctcgatctcaatgttttcgtcgctcattttgtcatagacctcctttataatccactcaggcgtggacgcgcccgcagtgattccaatagaagccttccgacacaggttggaaggttccagctccgccgcccgttcgatccaaacgaccatgggacagagtgccccgcataactcggccagccgtttggtattggagctctcccgccctccgatgacgaccatagcatcggagcgcgcggccagcgcctgggcctcagactgtcgtttacacgtagcattacatattgtatcaaaaatttttaagtttgtacactctttttttgctttttctacgcaggaatcccaaataaaacgggtggaggtggtttgtgagaccatagtgagaggtatgtcccgccgttccggcgcggtttccagccagtccgacagctccgccaccccctccagcaccaccggccgccggcaccatccggcgatggcggccacctccggatgggtgcgggtgccgatgatgagcacctgccgccccccctcctcagcgcgggagacgatctggtgtatgcgggacacattggggcaggtggcgtcgatgaccggccggcccaggcgcgccagcgcctcatggacgggccgtccctccccgtgggaacggataagcaccgccgtcccaggcggaacctcctccggggtgtccaccaggcccacccctatggactccagataggcgatcacgtcccggttgtggatgatgggccccagcatgacgcacggccggcccccctccgccgccatctccgccatctgcaccgcccggcggactccgtagcagaagccggcggagcgggccagctccagcctcaccggccagcctgaggcttcaaagcctcaatgcgctccatcagatcatcggccaccgcgtggtagtcctccggcgtgggcttacgcccctcgggggccttaggatagtatgcctcgccgaacacgacgggattccagcggaaccactttttctccgcaggaagatagatggggacgatgggcacgccggtacgcagggccagcatggccgcgccggtcttggcatcgccgaattcgccgtcctggtggcgggtgccctccgggaacatgagcagcagttcaccgtccttcaggtacttcatcgccgtcttgatagccgccacgtccgccttgccccgcttgacaccgaaaatgccgccgtgcttcagcacccagccgatgaagggccagtgcataatctcctccttggccatgacgtggatctggtaatgccaccccagtgcataggcgatgaacagtgggtcattggtgcgggtgtggttggcgcacagcagcgcgcccccttcgggcctgttctgtttattgatgcaccgtgtgggcatcacgatacggaacacgacccagagtaccatataggcaatgcagtaaatgacatttttctttcgcttcttcatgccttcagacgctcctttatggtttccagaaggacgtccaggctctcgtccagggaatttccggtggtatccaccagcagggcgtccttcgcctgccgcagcggcgcggcggagcgccgggtgtcgtgctcatcccggagaatgatatcccggagcacggtgtcatagtccgcctcctgcccccgcttccgcagctcgtcaaagcggcggcgggcccggtcctctggcgaggcggtgaggaaaatctttacatccgcgccggggaggaccaccgtgccgatgtcccggccgtccatgatcacatcgtgctcccgggccatgtcccgctgacgctccaggagaaaggcccgcaccgccgggatggccgacacgccggaggtataccgggagatcacatgctggcggatggcatcggtcacatcctcgccgtccagatacatatgctgcaggccgtccgcgccatacttcagctcgatgtccaggccgtccagcagagcggtcaccgccgcctcgtcctccgggtccactccggcccggtaggcccgcagacctacggtccgatagatggccccggtatccacatacaaaaagcccagcctgcgggccagcagcttcgccagggtggactttcccgccccggaggggccgtccacggcgatgctcttgtgctttgtcatgggttgattcctcctatgtcttgtgcggcggcctctccagcggcgtggccggtggaccaggcaatttgcagattgaagccgccggtgtaggcatccacatccagtacctccccggcaaaataaacgccaggggccttcttggattccaaagtggtgggattgatctcggatacctttatcccgcctgaggtgacgatggcctcctccaccgggcggggcccctgtatgtcgatgcgcaggcacttgaggacctccagcagacggcggcgctgggccttcgtcaccgaatgaaccttctccgccgccgggatgccggtacgctccaccagcaccggcaccatcaggcggggtaccaggccctccagaacattgtgaaagtcccggttggcgttctcctcaaagtcccgcagcagacggcggtccagcttctcctcatccagtgcgggcttcaaatccagattgatgtagtagtgctctgtgtcaaagtcccgcatatgggcgctggcgctgagaatcagcggccctgacaggccaaagtgggtgaacagcaactccccctgcccggcgtagacggtcttctttttgccgttgcgcacctgaatggccacgttgcgcagcgacaggccctgcatttttgcacaggcatccccctccgccgccagtggcacaaggctgcctctgggcggcagaatggtgtggcccagcgcctcagccagggcatatccgtcaccggtggagccggtcagcggataggaaaccccgccggtggcgatgaccaccgccccgccggggtaaaagccgcgctccccttccacgccggtgaggacctcaccctcccgtcgcagggcgcgggcccggtcctgcacaatgtgcaccccggaccgacgcagggccaacagcagggcgtcgatgatgtcggcggctttgtcggagcagggaaagacccggttcccccgctctgttttcagcggcactcccaggccctcaaaaaacgccttcaccgcctccgggggaaagcgggtgacggcgctggtgaggaaccggctgttgcgtgggacattctgcagcacctccggcgccgcacagtcgttggtcacgttgcagcggccctttccggtgatgtagagcttgcgccccagcttgggattgcgctccagcagggtgacggctgcacccttttgggcggcggcgacggcggccatacagccggccgcaccgccgccgatgacaattacatgcttcaagtgatctcttccactttctcatagacctcatattcatcccagatctgctccagtgtctcaaaggtctgggagaggtcgtcgtttttcttgcggccgatggccacaatcagcgcgttgatcagcgacagcggagccaccagggagtccacgaaggacgccatatcgctcttggccagcagggtcagggtggagatgggggccaggggggaggtttcgctgtcggtgagggcgatggtggcggccccccggtcgtgggcaaactgcatggccttcaccgtccggcgggaataccgcgggaagctgacacccacaatgacatcgttgggaccaatgcgcaagagctgctcgaatacctcactggtggaggtggcgtgtaccacggtgacattgtcaaaaatcaggttgaagtagaagcccagaaagctggccagggccgccgcggagcgcacgcccaggatatagatgtgacgggcgtccacaatggcgcttaccgcccggtcgaagtcctcccggttggtctcctccagagtcatatggatcttatccatatccgactgcatgaccatggacaggatgtcctgattgccgatacggtcgttggagacctcaatgcgctggatggaggtgagcttgctgcggatcatctcctgcagggccttctgcatagcgggataaccgtcataccccagttcggcggcaaagcgcaccacggtagactcactgacgttgaccgtcttgcccaggcggctggcagtcatgaaagcggccttgtcataggattccaggataaagccggcaatcagcttctgtcccttggaaaaggtactcatattggtctgaatgaccgaaaggatatctttggacattgtggacgatccctcgcatttctgcccgcccgtggcgggaatgataccacgctgtgttttgattcgtccctatcataccgggaattgaccggaaaagcaatcccctttctgcaagttttcctgatctccttgcaaaaaagagatcattttcgcaggagacaaagctcctcacctgtcaggcgccgccatgctcccacaggcagcgcgcccaggcagagctccccctcccgcacccgctggaggcggcgcacccgcaggcccgctgcggcgcacatccggcgcacctgccggttgcgcccctcatggatgaccacggagagcactccctcccccgccggagtgacccgggccggacggagggcgtacccatccagctccatagggccccgcagcaccgggagggcggcgtccacgtcgccctccacccacacccggtattccttctccacctcgtggctggggtggagaagggcgtgggtcagcgccccgtcgtcggtgaggaggagcagcccctcggagtccagatccagccgcccaaccggccacacccgggcgccgcatccggccaccagctccgccacggtgcgccgccccttttcatcagagagggtggttacgtagcccctgggcttgttgagcatcagataagtacggcgggcgggccgccgcagaggccgcccgtccactcggatgtcgtcccgctccgggtcggccttgtcccccacccgcgcggtacatccgtttaccgtcacccgcccggcggagagatatccctccgccgcccgccgggaggacacgccgtgggccgaaaggattttctgcagccgctcttccatggccgctcccccctttttacaaattcgaatcagagatccagcggcagcagaccgtcgccagcgtgtcggcctcccccgcccggaaccagtccagcacccggccgaacaggccgcggccggcccggtcgtccgccacatcgccggcatagagcagataggtctcgccgattaccgcgccgtccagcgtaaagagcagccggccggcaatggttccgccctggatcggggcctccacccgctccggcagctccacacgggccttgaccagctctccctccgtcagcggatagtacacatcggaggccgtatagaccggaacaaagcggttgaggctgcccgtcaccgggagcatgcggaaggtccggttcgccagggccagcatggcgctgcggtagtgggcaaagccatagtcaaacagggcggcgtggtctgcccagtcgttgggatcattcagcgtgacggcgatcaggcgctgcccatcccgctccgcacaggaaaccagcgtccgccccgccctgtccgtgtagccggttttgaggccagtgcagccctcataccgccagagcagcttgttgtgattggtgagggtgcgccctgccaccgtgatggaacgggtacccacgatctttgccagcgcttcgtgctccatcaccacccgggccagggcagccatgtcggcggcggtggagtagtgcccctcgtcattgagcccgtttgggttttcaaagtgggtgtgctccatgcccagctcggcggccttgtcattcatccaggccacaaaagtgtccacgtccccggcgcagaagcccgcaatggccaccgccgcgtcattgcccgatgcgagcagcagcccgtagagcagcgcctccagcgtcagcccctcccccgccttcagatacatggaggagccctccactccggtccactcgggccggatggtgactacctcggacagatcagggtgagattccaccgccaccagggcggtcatcagcttggtaatgctggcaatggggcgctcctcctccgcgttctgggcataaaggacccggccgctttccccatcgatcaggatggcggaggcagccgagatgccgggcccggcggcccggacagaggaacagagcagaacagccagtgtcaaaaggacggcggcaaaccgtttcaaacagcatcacctcaggggatagatgctgctagtatgcgtgtcagccctgggatttatccttgtcctgctgcttctcgataaagccggtgaccttgtcaatcacatcgggcaccatctctaccacccggtccacggcggtgccgggcggaggcgctacgggcatcaggcgcaccgagtcccccttgacaatcaggaaggccaccggggacaggttcattcccgcgccgctgccgccgccgaaggagttgtcgtcctccggcttctggttcttggaggtaaagtcgctgccgccggaggcgaagcccaccgtcagcttggagatgggaatgatggtgatctcaccggccaaaatgggcttgcccacaatcgtgttgacgtccgcgatctcccggagcttctgcatagtggtggtcatcagatcaccgatgggatgctgcttttccatacgttaaaccgcctctttctgcttgcttgtcgccgggctcccggcctcggcgcgatacttggagaactctgccagaaaccgtgtggtcaggcgcaggcccagagccagcgcctggccggcggtcagggtggccgccgcgtagagataaacggagggccgctccgcgtcaaagtccacccgggtgcgcagcctccgctccttcacgttaaaattctgctccaccagcggccagatcataccgataaatgcgttcaccccgccgaagcacagggcggcggcagcggggtccggcgccgccgcggtaacttcaagctggaacacatcaatgcgcagcttgcgccggaagcgccccgccgcctcggcgatcagcggaagaaaccgcttcaccagcgccagcggcccgccgcccagctccggctgcgggcgttcctcccgttttttctcccttcgggacgatttcccagcctttcggcggggccgtttcggctttctgggatagagcatcaggcgcagcggccctaccttcagtttgagccgcagtccggcggcggagtactccgccagcgcgcccagtcgcaccaggcggaggagcgctcccagcgccagaagcaccgcgcccaggatcaggattgctttcatccagccctacgcctcctcctcggcctgtgccatctcccgggccgcctgaagcagctcctcctcggtgatctcctctgtcccctccgcggtctgggcggcctgaagccgctccaccgccgcctgcatctccagggtaagctgtccgtcctccggggtggtgttgggcagctcgggcagctcatccagattggatagtccgaaggagcgcaggaaggtctgggtggtgcggtactggatggggcgacccggcacggccaagcggccgcactcctcgatcaagtcacgctccagaagcaggctgacggtgtaggagctgtccacgccgcggatctggtccacataggcccgtgtggcaggctggtagtaggcgatgatggccagcacctccagggcgggctggctcaggcgggcgggccgccgactctcaaacgcccggcggatgcagtcggcaaactccggcgcagagcagagctgatagctgttgtccagccgcaccaggcggatgccacgccgctcatagcggtaggcatcggccaggcgttggcacacggagtccgccgtgatccgatcgatgtccagcgccagacacaggcgctccacccccaccggctctccggcggcaaagaggaccccttcgatggcggattcaatttccttcaattccatagtataccctcaatctgccgttttctccccatcggtggtcagctccagctctcccccgccctcctcggtacaggtcacggtgcagtcgctctccgtgcctgccagccgcaggcggcgggccttgcacagctccagcactgcgataaaggtggccaccacctccgagcggctccggttgcccttgaacagagcccggaaccgggtcacaccgaagcggctgagccgttccagaatttcgccggccttgtccgccaccgggtagggctcccggcccacgatgccctcgaaggccgccatgggtggcgggaggcggtggtccacccgggccagcaccgccgtcatagcacgcagcagatcctccggcttgtggacgtagcggtaggtcctattaaccggcagggcctcgggcaccttgggaatatagtcccggccgatggcgtagcggtcggacagctctggcacgatggccttgatcttggcaaagttttcgtggcgctggtgctcctccagagaggcaatgagctgttccatctcggagatggcctcctcgtcgtggatggagagcagcatccgcgtcttgatgaacaccaggtgggccgccatggtgacaaactcgctcgccacctctagatccagccgcttgcgctgatccatccactccagatactggtctaggatcagggagatctggatgtccttgatctccatcctgttcttgctcagcaggtggaggatcagatccagtgggccgttgaagtcctccatagcctcatcccgggccttgaccaccttttccagatgaaaaatcggcgtttcgatggtgcctcacctcaaaacagatttaaaatagcagacgcgtcctggaacagcagcagcccgcccagaggcattccggtgagggtgcaaaagccctgtaggacatggaccatcaggaaggacaggggcttgtcgaacacccccaccagcaccaggaggatcaccactcccatcacatacttctcatagcgcaagatggtgtagtagattcggtcgggcagcagggcgaacaggattttggagccgtccaggggcgacagggggatcaggttgaacagccccatccccacccccaacagggccatgttggacaggaagcacagcacgaacaccgccgccgggcccagaggggccagatggaacacggcggagctgactcccaccgccgccagggcggtgaggaagttggccgccggtccggctagggcggtaagcgccattccctgcctggggtgcttaaaatagcgcatatccaccggcaccggcttggcccagcccaccttggccacgagcatcatcagcagacccaccacatccagatgccggatgggattgagggtcagccgcccggcatttttggccgtgggatctcccagtcgccaagccacaaagccgtgggacagctcgtgcagggtgatgcacagcagagctgccgcggcgctgataaggagggtgagcaggccccaccagtccatgttgttgagaaagtcggatatggagcccaatcgtccgcccccctagcacaaagatcgtgtcaattatagcaaatttccaggagaaactcaaggaaaagcggcggagccctcccctgagcgtccgccgtcctctcatacaatggagttgcataggattccgatgcctgaaacctccacctctactgtatcgcctggctgcatggggcccacaccggcgggggtgccggtggcgatcacgtcccccggctccagggtcatggaggcggtgatgaaagagatgagcgcccgcacaccagtgatgagctgctctgtcctcccctgctgcaccacctgaccgttcagtcgggtggtgatggtcaggtgttccgggtccacctcgtcggtgatgacgggccccgtgggggcaaagccgtccatatttttgccgcgggcccactggccgtccgccttctggacatcccgggcggtaatatcgttgaggcaagtataacccagcacatagtccagtgcctcctcctccggcacatccttggcacgccgcttcattaccacggccagctctccctcgtaatccagccgccctacaaagtccggggcgtgaaccttccccaggtgggcgttgagggcgttgggggccttgagaaacagggtgggccggtcgggggtgtgggaggcatccaacatggacttcatttcatggatgtggtcggaatagttctttccaatgcagacaatttttgtggcctcacagggagccaggaggcggcagccggacaggggcaggctctctccgtcataacggacaccctcgaagggcggctctgtcagagtgcgcaccacatcgccgtggagcaccccccacacgccccttccttctcgcagcagtttgacgaatctcatactcttccctccgcgtgctccaggatcagattgagcagctcctgtttgccgtctcccttctcagccgaaaagggaattagctttacaacctcatccagctcaagggtttcccggatgcgcgccaggttcggctctatgtcgctcttgcgcagcttatccagcttgttggccacaaccgcaaagggacggccgctgttcttgaaaaactccgccatggtgcagtcgtccgccgtgggcttgtgccgggcatccacgatcatcagtcccagggtcatcagggagttgtccgcgaaccactcctccatcaggcggccccagcgggccttctctgcctgggacaccttggcgtagccatagccggggagatccaccaggtagaaagcgccgtcgatcaaaaagtagttgatgtgggtggtcttgcccggtgccgcacccacccgggcaaaattcttccggttgagcagccggttgatcaccgaggacttgcccacgttggagcggccggcaaaggccacctgaggcaggcgatcccggggaaagtccccggccttggccgcggagcgcacaaactccgccttctgtaaattcacactcatgtcaattcctcactgtcggaaggtgggtacttcccggctccgggagccggactcagggggcgggagcgcgtcatcccgaagggggtcgcaggtcttcagctccagcgcctcggccagcaccgaatccacctgctccaccggaacaaagtgcagagcggcccggacggtggggtcgatctcctccagatccggcacattgtccgccggcaggaacacggttttgatgccgctgcggtaggcggccatggtcttctccttcaggccgccgatgggtagcactctgccccgtaaagtaacttcacctgtcattgcgatctcccgcctcaccggcgcgccggtgagggcggacaccatggcggtggtgatggcaatgccggcggaggggccgtccttgggcactgctccctccgggaagtggacgtgaatgtccttcgtcttgtaaaaatccgcctcgattcccagttgggcggcgcggctgcggatgtaggacagggcggcctgggcggactccttcatgacgctgcccaggttgccggtgagctctaccttgccggagccaggcaccacgcccacctctacctccaggatctcgccccccacctgagtccaggccaggccgttgaccacgcctacctgctccgtccggggcagccgctccgggtgatagcggcggatacccagatagtcctccaggttatctcctgtgatgtgaatcgactttacaccatttgacacaatggccatagccgccttccggcatagtgcccccagcttccgctccagaacacggacgccggcctcacgggtatagccccgaatcagctcccggatggcgtcgtcggtcagcctgagctgggcctttgccaacccgtggcgtttcagctccttgggcagcaggtgccgcttggcgatctgcagcttctcctcatcggtatagctggtcagttcaatgacctccatccgatccagcaggggccgggggatggtatccagggtgttggcggtggtgatgaagagcacgtcggagagatcgaagggcacctccaggaaatggtcgcggaaggtgctgttctgctcggcgtccagcacctccagcagggccgaggcgggatcgccccgctgatcattgcccagcttgtcgatctcatccagcaacagcagcggattacagctctcagcctgcttgacggcggcaatgatgcggcccggcatggcccccacataggtcttgcggtggccgcggatctccgcctcgtcatggacgccgcccagggagatacgggccagcttacggtttaaggcccgcgacatgctcatggcgatggaggtcttgcccacgccgggaggccccaccaggcagaggatctgtcccttcagcccgggggccaactgcttgaccgccaggaactccaaaatgcgctccttgaccttctccaggccgtagtggtcggcgtccagcaccttgcgggccgcctccacgttgactcgctccttggtgtgcttgccccagggcagctccagcacggtatccaggtaattgcgcaaaacggtggcctcggcggagccaaagggctgcttctccaggcggcccacctctttcgtaagcttgtccgccacctcctggggcagcttggccttggcgatgcgctggcggtactcggcaatctcgctgtcgccgccggccccctcctcccccagctcctgccggagaaccttgagctgctcccgcagaacatagtcccgctggctgcgggtgagctgctcccgcaccttgccctgcatctcctgttccaactccagaatctccacctcccggcggaggctctggcacaggcgctccaggcggcgcaccggccgcagctcctccagaatggcctgcttgtcccccgtgcgcatgggcaagttctgagcaatgtagtcggcgatgtagcccgggtcctcactggagagcaccgagaggagcacatcgggggtcatcttgggagccagctcgatgaaccgctcgaacagctcgtaggtctggcgaatgagggcctccgttcgtgtggaacggcggaccggctgttccgccggaagctcctccaccagggcgttcaggtagggcgtggtcttgggcagaaggcacagccgcccgcggctgaccccctccaccatcacccgcacgttgtctccgggcaggcgcagaatctggcgcacattgcagatggtcccgatgctgtaaaggtctttttcctgcgggctttcaacggccagctcccgctgggccaccaggaaaatcggctggcctgaggccatggactcgtccagtgcctgaatggacgcctgccgtcccacatcgaagtggagcagcatctgcggaaagacggtcagcccccgcagggccagagcaggcatagtttgctgccggttcagttcttccatcacacattcacttccttccagggcagggatttgatgcagaatggggcgagggatgctcccccgccccaccggttcaattgctgtttaagagacatttcccttgggggatacgcccccctgctccgcatggagagcggcaccgccaagacggggccgctgggtgcggtcgggatcgtgctcaacggcgggggaaacgtgttctttcacgctctcagccgtaatcgtcacccgggtgatcgttggatcggagggcacctcgtacatcagaggggtcattacctcctccagcacggcccgcaggccgcgggcgccgatgccgcgctcgatggcccggtcggcggcagcctccagcgcctgggtatcgaagtccagctccaccatgtcgtactccaacagcttctggtactgcttcaccagggcattcttcggctcggtgaggatgcgcaccagttgtcccttgtccagagcgttcagggtggtgatcaccggcaggcggcccaccagctccgggatgattccgaacttgagcagatcgtggggctgtacctgcttgagcaccgaggtagtatcccgctccttcttactctggatgtccgcgccgaagccaatggtctttttgttcaggcgctgctcgatgatcttctccatcccgtcgaaagcgccgccgcagatgaagaggatattcttggtgttgatctggatgaactcctggtggggatgcttgcggccgccctggggcggaacgttggccacagtaccctccaggattttcagcagggcctgttgcacgccctcgccagacacgtcgcgggtaatggaggtgttctcactcttgcgggcgatcttgtcgatctcgtccacgtagatgatgccgcgctcagccagctcgatgtcgtagtcggcagcctgcaccagtcgcaggaggatgttctccacgtcgtcgcccacatatccggcctcggtgagggtagtggcgtcggcgatggcgaagggcaccttcagaatccgggccagggtctgggcgaacagggtcttgccgcagcccgtaggccccatgagcaggatgttgctcttctggagctccacgtcctccccgccgccgaagtagatgcgcttatagtggttgtagaccgccacggacaaggcgattttagcgtcctcctgcccgatgatatactggtccagcacgtcgcggatctccctgggggtggggatcacatcggggatgtccggcccggcctgctcctcgggatcgtaagtgtcgtccagaatgctcatgcacaggtggacacactcgttgcagatataggcgcccggaccggcgatgatgcgggcgacctgttcctggtgcttgccgcagaaggaacagcgcacggatttgcgctcgtcatttttcggcatggtttgctccctcaagtctttctaaggctcagagggagcggggcgtttgcttccccgctccctctgttggattttatcgcgtataaatgaccttgtcaatcaggccgtactccttagcctcctcggcggacatgaaattgtcgcgctcgcagtcggctgtaaccacttccagcggcttaccggtgttgtccgccagaatgtggttcatgcgctttttgataatctccaggcgcttcaggtggatggccatatcggtgatctgtccctgagtgccggcggagggctgatggatcatgatctccgcgttgggcagagccaagcgcttgcccttggcgccggaggagagcagaaacgcgcccatgctggcagccatgccgatgcaaatagtggatacatcgcacttaatatactgcatcgtgtcataaatggccataccgtcggtgacggagccgccgggactgttgatgtaaaactggatgtccttgtccgggtcctgggcctccagatacagcaactgggccaccaccaggctggccgtggtggcgttgacctcttctcccaggaacacaatgcggtcgttcagcaggcgggaaaagatgtcataggaacgctcgccgcggttggtctgctctactacataaggaactaggctcataatgaaggatctcctttaattttgatgtcggggtgcagggcgccccaccatcctaccgcagacgggcaggctcacaaacagagtatgcccatcgtttggaaacttattcctccgtcttctccacggccgcctcggcggtctcctccaccttcttgcgggaggtgcccttgcgggcggtcttcttgggcttctcctcgccctcggcgctctcctccgccttcttcttggcggacttcttcttggcgggggccttgccgaccttggcgctgtcgtagaccacgtgctcagccttgtggtagctctgctccttgcggatgctctcggcatccaccgcggccttcaccttgtccacatccatgtgatactgctcggccagacgcttgtactcctcctccagctcctcgtcggagatggtgatattttcggcagccacaatggcgcccagcgccagctcacggcgcacgcgctccagagcagcggccttggcctgctcccgcatgatatccatggtcatgccggtcatggccagatactggtcaaaggggataccctgggcctggatgcgctgggccatgtcgttcaccaggttatcggcctcatactccaccatagcgtcgggaatctcgacctccatgttgtccataacctgctccatcagagcggcctcgaagtcacgctggttctgagtctcgcggcgttccttcagcttctcacccagatcctttttaaagtcggcgagggtatcgaactcggacacatccttagcgaactcgtcgtccacctcaggcagctccttggccttgacctcgtgaaccttcaccttgaagacaacagccttaccggccaattcggcgtgatagtcctcggggaaggtgatgttcagctccttctcgtcgccggctttggcacccacgagctgctcctcgaagccggggacgaaggaaccggagcccagctccaggctgtggccctcggccttgccgccgtcgaagggcttgccgtccaggaagccctcgaagtcaatcaccacagtgtcgccggtctcggccgcccgctccacggtcaccatgcgggtggcgcggttgatgaagggcttgagctcgttgtcgacgtcctcatcagagatggcgacctcggccttctcagcagtcaggcccttgtactcgcccagcttcacctcggggcggacggtgaccagggccttgaaggtcaggccctccttgcccacatccacgatctccaccttgggccacgccacggcatccagcttctcctgctcaatagcctgggcataggcctcggggtacaagtcgttgatagcatcctcataaaacacgccggagccgtacatgccctcgatgatcttccggggggccttgcccttgcggaaaccgggcacgctgatcttgccgcgttgcttcttgtagaccttctcgacagcggcctcgaactcctccttgccgatctcgatcaccagctcgacggtgctcttctcctgcttctcgacgctcttgacattcatgttgtttacttcctcctgtcagccctgtcccgccgcgcatcggcggtatacggggccatctttcgcgttatccgttatatactagcagatatgcgtcaaaatttccataccttttttcaattattcacagattttttgcgggcgaaaccccacatagtctgcggagaccagataataggccacgcctccctgccgtccttccacggccaagcggtggctgccgccgtggagatggccgtaatagcagcgctccacgccgtactgctccagcagggcaatgatctctggacagcggtagccttggtagaggggcggatagtggagaaagcacagcttgggccgctcccccgccgccttcagcgacgcctccaagcggatcagctcccgcttgaacaccttctggtcgccggtctcctcatagaaccagccccgggtgccgcacagggcgtagcccccgtattcatagcagttgttgtgcagaatgcggagggttgaaaagccgctctccgcaaaaaagcggttcatcttggcggcggtgttccaccagtagtcgtggtttcccttgagcagcagcttccgcgccccaggcagggcgtccaggaaagcgaagtccttctttgcctcctccagactcatgccccaggacaggtcgccgcagagcaccaccgtatcctccggccccaccgccgcgaagcccttctgcagcttgtccacatagccctcccagcccccgccaaacacgtccatgggcttattggaggacagggaaaggtgggtgtccccgattgcgtagagagccattcagcgcagcatctccagcacctggtccaccatgtgctctttggtgacgctccggccaaagcggaccgtcttgtccttcaggacagccaagggcgccgggacaggtacgccggtctgctgggagagctggtccaaaatggccgtgccggcggccagctcgctcacgcccagggcgcccagcacgctgtcacagaacttgaaggggctggcggtggacaccaccacggtgggggtagtgtcaccagtatcccgccggtactggtcgagcacgtcaaaggccacggcggtgtggggatcaatcaggtaacggtgctcctgccacatgcggccgatggccttctgtgtctgatcgtcgtcgcagaaaccggcggcgaagagcttctccagcctgcccttgatggcggggctcacctcataccgcccggaccgggccagctcctccatgtacccgcgcacctcggcgtcatcgtggttggacagggagaagagcagccgctccaggttggaggagatcaggatatccatagagggggacatcgtattgtagaaggtgcggttgcggtcgtacacgccggtgcacaggaagtcggtcagtacattgttgctgttggaggcgcagataagcctgccgatgggcacgcccatctctctggcgtagtaggcggccaggatgttgccgaagttgccggttgggacgcagacgttgatccgctcccccttctgaatccgcccctcccgcagaagatcacagtaggcggagatgtagtagacgatctgcggcaggacgcgaccccagttgatagagttggccgaggagaggaaaaagccgcggccggccagcttctcccgcaggacctcgtcggagaacaggcgcttgacaccggtctgggcatcgtcgaagttgcctgccacggagcaaacccctacgttgtctccctcctgggtgttcatctgcagctcctgaatagcggaaacaccgtccttggggtagaacaccaggatgcgggtcttgtccacgtccttgaagccctccagggcggccttgcccgtgtcaccggaggtggcgaccaggatgcacaccgtcttctcctcttggtttttcaccagggaggcggagagcaggtgtggcagcatctgcagggccatgtccttgaaggcacaggtggggccgtgccacagctccagacagtaggtgttttcgtccaccgcccgaacgggtgccacctccttcacatcgaacttctctccgccgtaggccttgtccgcataggcagacagctcagaggccgtgaagtcgtccagataggagttcatcacatagacggcccgctgctgataggacatgtcccgcatggtgtccagggcgttgtgggacagctttggaaatacctcaggggtcatcaggccgccgtccacagccagtccctgggcgattgcctccgccgccgtgcgccggtcttccttgttcctcgtgcttacatagtacatacttcgctcacaaccctcatcagattctcaaaaaacagggcgcgcaccagcgcctcactgtaattccgctgcagcagccgctcccacagccggtccagatcctgaatacccgtgatcccctccggcaggctggaacagccgtccagatcgccgcccaaagcgacggtccgctcgccccccagctccagccagtgctccaggtgggcgatggcggtgtccaggtcggcccgctcccccaggaagttggcgtagaggttaaggccaaccactccgttgtggtctattatggcagtaaattgctcatcggtcaagttcctgggatgagaaaagaccgcccgggcattggaatggctggcaaaaaaggggccgctcagctcctccgccacgtcccagaagcctggatccgacaggtgggacacgtccaccagcatgcccagccgctccattttgcggacgaacgccctgccctgaggcgtcagcccccgctccggctcctctgcattcgtgccggagagggcgttgacgtggttccatgtggggttaacggcccgaacccccatggcgtgggcctcctccagccgctccagggagcagtccagcagctccgccccctccaccgagaggaaggccgcccgccgccccgaccgaaaggccgcctccgcctccgcgccagtgcggcaaaaggctgctagatcggcattggccgccatttcccgctcaaagagcgcgtactcctccagaaagagctcccggtgggttttcccgctgagatcccgaaccggggtgggctccggctctccgaacagggcgaaaaactgggcgcagcggcggtatttccccatacgctccagatccacatggccgtcgttccggcgcaggcctccgccggagagatagcgcagaaacaccgcgtcacagtgtccgtcaaacaaatcaattgcataccgctccatctggaactccccctaaaatgcattttcaagccaggtgatccgggggcggcgggtggcggtgccctggggggcgtagatctccgccacgtcaaagcggggctggcgcgcctcctccgggtgctccgccagatagagctccgccgtggcgcgcaggcgggcctgcttccggcgatccaccgcctcccgtccgagggcaaagcgctcctccgtccgaagctttacttctataaaggataaatacttgtcagtagctgctatgaggtcaatttccccaaaccggctgcggtatccggccgccaagaccttccagccctttcgccgcagctccgccgccgccagcgcctccccccagcggcccagcagctttgcctctcccccgctcacagcttcttcaaaaaggtccgccggtggatgggacaggggccgtaccggcgcagcagctcatagtgccgcttggtgccgtagcccttgtggcgctcgaactcatattccgggtagcgttccgccatctgctccatatagcggtcccggctcaccttggccaggatagaggctgcggcgatcgaagccgaaaggctgtctccctttacaaccgtctggtgctccaggaggatagccgccgttttgccgtggtcccggttgccgtcgatcagcgcaaagccgggtgcgggctccaggcggtcgatggccatctgcatggccttaatgcgggcgctgaggatatcggtggcgtcaatctcctcggcctctacccgggccaccgcccaggccaccgccacggttcggatcgtgtcgtacagggcatcccgccgcttgggcgtcacctgcttggagtcgttgagtccctcaatggagcactcggggggcagaatgaccgccccggcgtagaccgcgccggccagcgggcccgcccccgcctcgtcacagccgcacaccagggcgatccccctcgcccagcaggcccgctccagcgcccagcggtcaatctctgccatgggccgcctcccggctctccagatcttggggcgtctcaaatgtcaagtttcccagcttgccggagcggtactcgtccagaagcaccttcgccatgcgctcggtgtccacctcgccgccagagatccggaagccccgctttttgccgcagagctccagcagctcccagccaggcagccctgggtcagcctccagcttataccgctcggccagcgcctgggggtagcgccgggccagcagctcaatgaggtgacaggccagggtctccagatccatgatttcgtcctttacagcgccagtaaaggccagatggatgccggtagtctcgtcctcaaacttgggccagaggatgcctggggtatccaaaagctccagcccggcatccacacttacccactgtttgccccgggtgacgcccggccggttgcccgccttggcggacttccgcttggccacctggttgatgaaggtggactttcccacgttggggacccccaccaccatggcccgcacggggcggcccaccagccccttggccttccactgctccagcttctccttcagcgcctgccggatgacggtggagaactggccaactcccttgccgtctctggcgttggtctccagcaccgcccagccctgtctgcggaaccagtcagtccatacccggttcatggccggatcggcctgatccgcccggttgagtacgatcaggcggggtttctcccccaccagttcgtcaatatcagggttacggctggagatagggatgcgggcgtctatgatctccgccaccagatccaccagtttgagatccgcctggatctgccgcctggttttggtcatatggccaggataccactgaatattcacgcgttcaccctctctaccgaatattcttgtattatacacaatgctccggtatttgaaaagggcaaagacgcataaaaagtgcccggccaatggccggacactttttagcggctttggatcgtactatttgagccagccgatggagacgcagttactgggtgcataccaggtcacgttgcggcccaggccctcaaagagggcgcgcacggcgacatactctacgccgtccacagtcttgacgggcagcttaaccgacttgccatccagcgtaaccagaacgctggagccttctgtgcgcttttctgcactgataccgttcacaatgtcgttcagaggaacccagattttcccgggctccacaactagcttgttgttgaaggactgaaccaggccattccacatcactgtgggaacagaggcatccttgcggtagacctcctcacctccggagacggtaagcagcacttgggtgtccttgatgtactctgcggggcaggtcatcagatcacggtcaatcactgcaaagtccgccagcttgccgacctccagggaacccttgatatcctcattgaactctgcataggcagaccagttggtaaaggaacgcagggcctcctcacgggtcatggcctcttcaatatgccagccgccctttggctcacccaggcggttggtgcgggtcacggctgcatagataccgtggtaggggtttaccagctcgaccggagcatcggagccgttgggaatcacactgcccttgtccaaaatggtacgccaggcataggcccccttgatgcgctcactacccacgcgatcctccgccaccagcatgtcagaggtagcgtgtgtagtctgcatagagggcagaattcccaggctgatggcgcggtcaatgtcagtgggtgccacaatctggaagtgctcaatgcgcagacggtggtcatcccggggattggccttgatggctgcctcataggcgttgatcatctggttgttggcgccgtcaccgatgcagtgggtcgcaatctgataaccggcgtcataggccaccttaacgacttcgttcacctgttcctgtgtatagcggtaatcgccgatatggccctcacggtcggagtagggctccagcatggcggcagaacgggcacccaaagacccatccgcaaacatttttacgcagcgcagactgagatgattgttgtataaaggctcgtaattctcattgtcaatgggatggctcttcaaatactcgacggtctctcctgcggcagatgtgtgggaaatcatcccgtagacacgcagcttcaactctccggactcatacaggggtacaaagacctcgttatatacctcaatgctgttgcctgcatccatcgcagaggtcagcccataagagaatagctgctcttgcgctttcagcaggccttcctgcatctgctccaccgtcagctctggaatcagctcccggatgggattcatggcggtatcggtcatacagcccagcagctctccatttgcattcttcaggtactcgccgccctggggatttggcgtatcgggggtaatcccagccaactcgatggccttgctgttggcccagcccatatgcccgcatgcccgggtcaggaatactgggttgtttggggcaaccgcgtccaactcctcctttgtagggtagctggtgtcctcccatactgtgttcatccagccgcggccctggatccactcccctggctttgcctgttcggcggccgccttgactagatccaaaatcgcctgcttgggcatccagaagcagtccagattcatcagactgctgcccaagccagccacgtgcatatgtccctccaccaagcctggaatgaccgtctctccacccaaatcgacaaccttggtatcgggaccgatgtaagcctccacaccggcctcaccgcctacatagaccaggcggtcgcctttgatcgccagcgcggtggccttggaaaatgcctcatccacagtatagatgtttccgttgcggtatacgctgtcggcagcctctgtaccggctgccattgcagggaatgctgagagaagtgtagcgaggactaagcatgcggcgagagctttataaatgcgtctgcgtgacattatggttcctccctcatcatattcttctttctgaattcctggatcagcgtgcggccccctaccctccttccagtcttcataatcacagcgtaccacattttatacatcatatcaaggaaaaacgcaaattaaatttgttatttttcacatattatactctgcggcatagagatgcgagctccggtattgcagaagaaatacttactaaaaaggctgtggagaggcagttgcctctccacagcccaatatccaagactcagatgcgctccttgaccttagcgctcttgcccacgcggtcgcgcaggtaatagagcttcgcgcggcggaccttacccttgcggacggtctcgatcttctcaatggtgggagcgtggatggggaacaccttttccacaccgacgccataggagatgcggcgcacggtgatggtctcctcgatgccgccgtgcttcttggcgatgacggtgccttcgaagacctggatacgctcgcggtttccttccttgatatggacgtgaacgcggacggtgtcgcccacttccgccacagggggctcggctttcaggtacttgttgttaaacgcctgcatgagatccattttaaaacttcctcctagtttataggtgttcttgcagccatggatgccgcctacctttggcggcggccgcagaggaccaccctttattgagactgcaatagtttaccacaagtctcaacggattgcaagcagaattttcatcccatccgtgtccctcggcatggtttggctgcaggcggcaccagcagccaaaccgcggtaatgagcagagtgaggtttcccctcccctgccagagcagcaacagcgctccgagaaccagccccactgccagcgcggaggagagcacccgcagcagccgttctgcccgttcctccgaggtcagcagcgccaggatacaccagaggatgcgcccgccgtccagttggacagcgggcagcagattgaatgcggccagcgccagattgagcccagcaaagcagtacgcaccctccgtcccaagcccggccgccatccgggcggccagcagattgaccgccggaccagccagcgcagcggctatctgctgccagcagcccagcggacagcgagcggagagacgcatctccgcgccgacacaggtgatgcgcagggcggttacccgcccgcccagggcccggatgaccagccagtggcccagctcatgcagggcacaggcacaaaaggccatcagcagtacaccctgttcatccaaatagtagagcgccgcccccagcagcagcgcgcctgcgctgatttcaactcgtttccatctcagcattcagttcgtctcgatataatagagcgggttgagcagcactccgttcagcttcagctcaaagtgcagatggggccccgtggaattgccggtggcacccgagagggccacccgctctcccgccgccacggtctgcccctgctgaaccagcagctcgctgcaatgggcataaaagcttttcagccctccagggtggctgagctggaggtagagaccgtaaatcgggctgtcgccgatatagtctacggttccgtcggcaaaggccagaacatccgttccgtcgttcactgccagatccacgccgttgtgaaatttctcaccaccgtctactgggtgttcccgccagccaaagtcggatgatacccaccccagcgccggagttaccgtctcccccacgcccaaggcgttcagattgtagcggtccatggtggcgttgtccgggagcgtgggaccgttgtactctacatggactacggccggctccggcgtggcggtgggaaccggagtgggttccggtacggtattgggctccgctggttctacagcgaccggctccggcttcccagcctcccccaaccagtggctcaccgcatcctcacgtgcggggaagccgctgagaaatgcggcctgggcgcggaacaggggcgtgctcacctgtccctctccgtccggcaccgtgacagcctctccgccaaagacctccacccaaaggtcccccagggtgtccaaaatcggttccccctcggagatcgaccggcccaggctcgcaaacgcagctttgaaatccgtgtctgcctgaatagcgctcaaaacagtctcccgcacctccgcgagctttcctggaaatactccttttccgataaataccaccagaaacagcgccagacatactgccaactgcgccatccggcgcttctcacgcggacccagcgccacgctgcccttttttctccggtgggacagcgccggcctatgcccgcccgtccgctcctgcctccgcttttcccacttttgataggccgtttccatagcggcatcttcccttctgtacgcatttcaaagcatgtatatgcggacgtgccttttgctatgccgagaagatttcctctcttgacaaccggcggcaagacagctataatagtatccatcgtgtgaacggggtgtggcgaagtttggtatcgcgcatggttcgggtccatgaggccccgggttcgaatcccggcactccgaccatgcggagtatcattaaaggatctgaaaaggtctgctgatgatactccgcattttttatttccaagtttatatagcaatctgtgtgggggcgtagcttaatgctacgccctttctcgtttccaaaagaatgtcccgctcggggatcttccggcgatccggtacctcaaaagcaccgatgcagttatagtggatcgtcacccgctgattggtaacgccgtcctccttgaccgccggataaacctcgatatactgaatgagctcggcaaccatgcgcttggtgatggtggcggcgtcggtgtagcgtcgcaccgtttccagaaaggtgtccacatccatccgcttatcttccagcttttttagctccagacgcaacgccttgatccgtccggcgttttcgccctgttcctgctcataccgcttggacattttggcgaaccgggcatcgtcgattttgccggacacattgtcctcgtaaagccgctcaaagagcatatccagctccctatcccgggccagcagcccatccagctcccgcttcttgcgtacccggtcattttccgctaccttggcggagcggcccactatcgccttgataaagtcgttttcgtactcattggcgaaacaggccagccggtgtacctcgtaaagcacgacctgttccaagaagtccagccggatatagtgggtagacgagcatttgcggagcccggaattgtggttgttgcagctaaagaacttgatgtcgtggttgccctggttgaagtggaaagtcagattgcctccgcactctgggcatttcagatagccgcaaaaggcgctggactcctttgttacggtaggccgcctgcgccgggtggtttgtaggctttgcaccttttcccaagtcacacggtcaatgatgggctcatggacattgaggaagattgcccggttttcttccgggttttcaatacggcgcttcatcttgtaggacttggaataggtcttgaagttgatcacatcgccacagtattcctgcaaggtgaggattttcttgacggtggtgtggttccacttggtaggctccagcgtgcttttggagccgcccttgctaatccccttgctggttcgataggccgaggggttcagcgcccccatattccccagcgccgtggcgatctgcaaggggccgttgccctccaaggccagacggtagatgcagcgcaccacctcggcagcctccgggtcaatgacccaaaaccggggatcgtccgggtttttcatgtagccgtagggcggcggcgaaagcggaatcccggcgttgcccttcatcttgttgacgatccggcgcttcttggagatgtccttagcgtagtactcattcataatgttcttgaacggggtgaaatcgtcctcgccctcgtcgctgtccacaccatcggaaacggccaccagccgcacatcatggagcgggaaaaactcctcggtgagcttgcccacctcaatgtagttccggcccagccgggagaggtctttcacgaacaccgccgagatgtacccggcctcgattgcggcgatcattttctgaaagccagggcgcttcatagtggtgccagtgatgccgtcatctacaaaaaagatggtatcggtataacccttgtctttggcggccttttggagaattttcttttggttttgtatgctgttggactcgctgtccatgttatcgtcacggctcaggcggcagtaaagggcggctgtgccggtagagatttttttgcttgactgcttcataatgtcctcctttccaagcagccgagcaaggcttcatcctatgtatattatacctctgccgaccgcccgagttaaggatgtcgatggaacagttaggctggctccagatcggccagcatcagcttcaacaggatgtcacgcatggactcgcctttgtccttgtagacgggcgtgacgatgaattggattttgccgacttgataggtgtattcctccttgacgggtacgggatcttccatgtgggcctccttccagagtgatacgaaacaatgatcgacagtcccccttgtcccgtggggaaacgcaagagggcggcaccttcggcggtgccgccctcttgccttgctccactttgggacaacttgtcccaaggtcagtaagagctgttctcaaaatgctgctgggcctcctccagcccgcagaagtcaaagacctcatggagttccgccaccacacgccggatgtctgtgggcgaaaacccgcagttttccatggcgtagatgacatagccccggcaggcattattgctccacggctgggcaagcaaggccgccagtccaggatcatacttcatgttggtttcctccttgataaaagtttcgggagcgccacgctcatttccttggcccgtcataagacagcaatactcagcatggcgctcccgaggaggcggcggcccggaggggcaagcggccagcttgtccaactgcggatcgtggccgtgggggggcttgtcccacttgcggcgctggtgttgttcgctcgttctcctgccggagaagtcacagcgcacccgccgcctggctccccgctctatggctcggggccgccgctattcagttgttgatgggatgtaactcctctcatataccaaggacatctggcagatcaattcggacgggtttacaggcactttttcaaatactgtttcatcttctcaagtccccgctccacagagcgccgcacggcactctcatggacaccctcagcccttgctacttcggaatagctcttgccgaggatcacacaggcgtccacccgtcggccctgcgtttccggcaaagaattgagcgcaacacacagatggcagaacagctccatgcgttccagcagttcctgcggggtaggttcagaaacgcatacagagtattcgatcccgtcctcacaatcgagagagtactgcgctttgttgcggacgatccgccgctgataggcggcctcgtacagtctgcttgccctgagctcgtcagccacttcctcggaaacctttatgtattcgtcgcgggtgtaccacggataaaagtctttcagattgatagtcgtcatttgtaattcctccgttcagatggttggggggtgaatggcgatctgaacggagggcggtggagaacgacaccccggtctgccttttcccacttcgggacaacttgtcccaaagcagacaaaacaaaatgcgctcgtatgccacaacgacacacaagcgcacgatgttttattgctaattatatactgctgtatttcatgttcaacaccaaactgatcctgtctggaagtcaggccttttttgacaggttaggtgggtggaagatgaaaaaggacacagcgatacctcccggacaccgccgtatccttaaaaaagggcgactttaacacaccctccgtattctaatttttcaaaaagaaaacggcggctttgatttcgcaaaaccgccgccggaaaatataaattgagcgcacaaagtcaacctgcccggcaacggtttttttctttccccgtcgggcggggcaggttgttgtcaatcgggaccaaaataagaagagccgacaaccacaagagaatgtcttgtgtgttatcagctctgcgtctgtgcgtctggctctttgataatggaaatatgcatttgttgtatgttgacaagcgtttcatgcttgcactttggacagaatagcggaaaacttttcaattccgtgtctgcacgaacctttaaccgggttttgctcttgcagaccgggcataagacccacttttcttttaccacggcataacctccacttcataaagaaagttgggcttagaagtaaaacagctcttcaaacttcttgtcaagggcaatgcacaaaatgagtgcgagttttgcggtagggttaaattgacctgtttcaatcgaactaatggtattacgggatacgcctaccatatcagcaagctgtgtttgagataatttacgctctgctcttgcctctttcaaacgattttttaatatcagcttatcattcataatcgttttgtgcccttaaaaaagcccaagaataaacttcaaaaccaaaacaagataaatcgccgttgcaataaaaaacagcacagtaaagaaaatgactgtttttgtccggttctgggtaaactgatacgcaaaattagaaaagcaagtagtcgtgactaatagccccatagcgtactgtgcagtatcctctaatttcaaccccctcgaaagcacgatccataagagaaccaacacgctaatggaaaaattagctccctttaggccaatgtactttgtccgctcgtctgaaatatcgttttcctggcggctctttttcagaatttcttctttgtccatttaactatacctccattgatttgccaagtgtacttggtatcatcataatagcattaccaagtttacttgtcaacagtttttgcaaagttttctatacaaaggcgatttttagtgaaattaaacagtctataacatgaaatatataatcgttcaaatagcaaaaccagaaatgtaaaatcattttaggtgatgttatgaagtttgaaagagatgagcgacgctttgattttcacgatatagggcttgccatcaagcgtgctcgggaagccagcgggatgacacaggagcaactggcctatattgttgaccgggctcctcgcaccatcatgtataatgagaatgacggccagcatcccagcctcaacaccttttatcagatggtgacaatgtttgatatatcggttgaccagtacttctatccgtccaagaataaaggcagcgagtgcagaaagcgtatcgacgccatgctcaacgctctggacgaaaaagaactgaaaattgtagaagccacaatccaagcgatgaaagcggctaaggaaacggaggatgcgtaagagaaacacgcacctccgttttttgtgctgttttggggacaacgcactaacggcaagcagggcaagtgtggccacacttgctatttttgcagcccgaaagggccgcaaaaacgcttgttggggagcctccccaaacccggcacttcgggacattttgtcccaaagcaaattgtctgcgtcaccgtcgctaccgctcctgttccttattcttgcgcccgtccgtcacgcccagcagatagtcaatgttggtcttgaccaccacggcctgccgcatttcctgttgggcgacccggtacttggcgtacagggcctttttctccgccgccagcttgcggcgcttttcttttaattgggccatcttgggcagtttggccccgtccagtagatcgttcaaagtagccttggctgcccggtagtccgccagctctgcctcgtgctgggccagaaatctcttgctatacttggccgccttgtactcgtcaaacacgggccgggttttggcgtattgcaccacggcccccataagcccggaagtataggcaaggtcagcctcagtctgccggagctgctccgtcaccgcatggaaacgagcggacgcagcctcggcctcggtggtgagctggtcatattcgctgatctgatgctcctgcataaattgcagcgcagcggccatctgtttgaggttatacaccttggcccaccgctcataggccgggcctttcccggagcgcagacgctcctgtatatccacgatcagatcgacacgtctgggcacagcgggggctggagcgtccagcttcggcattgggcgcttgcccgcaattacatcccggatgtccccgggatcaaagccttccccaagagtggacgagcggagccgggtggcccgctgctgccccggcacaaggaatgagattgcaccgcaccgtccccgcttgacagaataaccggactcctccatgagccgcaaaaaggcgtcaaaactgtccgggccttttgcaagggcatcgcagatggccgcccgcagctgttccttgtaggagggctggcgctccgcccccagccacgctccataatggagaaagcggcccttgctatggagcttggggttggtgatcacggacaggtcattttccagacacacccggtcagagagccgccgcaccgcccgggccgagccgatgaaatcccggaacttgtgggagcaatccagcgaagtggagttgtagtagatatggttatggatgtgctggcggtctgtgtgggtggcgacgaaaaaggcatacttgccctttgtccagcgcatcgccgtttcgtagcccacccggtttgcatcctccggggtgatctcgcccggcttgaatgactggcggatctgatagcacagcacatcggcatcccgccgctgttcccggcccgtggcggccttgtacttggccttggagagcagaaactccgcatcggcggtcatgtagtcacactcataggaggaaatcaattcgccaccctgtgtcttgtccgggttttgtccatagtcaaatcgctcttttaaggattgggcgacggtttcccccttactgatcttgtgtttcttgaaataggttgtggccgtaggcagccctcctctcaatacaacaaacggcggctgttgccagccgccgctcggactttgggacaagttgtcccgaagtatcagcctgtgatgaaatcctgcaaggagtatttcagcgagtaaagcctgtccatgagccagtcagcgatggccgggatgccaaagggcgaaacgaggaacgccagcacaaggaacaccacgccgcccagcgtctggccgccgatgaacaggacaagggccagcagggtcagcactacgcagcctatatgacacagcgccgaagccacgcagtacaggaacgacacgatggcaacgagcagggtcagcgccaccacaaagggggcggcaaggattttgagaatgatcatatcagctacctcccgtaaaatccgcttggtttgtgcttctatgataattgtacctctgaaaaaatcggggcacaaggatgtgaattgtcgaaccattttgaggtaaattatatcaagtaaaccaacatagatatagtgctttacacccaaatgtggtattctaaaaatataaaatatctagtgttgaggcgatgatatttaatgggcggtacagcgagacaattcaataagatgtacatagattataaacagcagtttaagaagccgatacatattgttgcttcacttatgcctcaggagttttccgatgatgatttcattgctacttttaaacgactatacccttatatgtggagtgatttagagaaacaatacctatattggcacgggaaaaatgaatatttgataaaacacggaaaaaagagccgatacaacttccgtaaaccgtataattttattttagattgttcctatcatgtccgaaagaatttacgaaagaatcatgagcgaacaatattatcagatggagaaaaagcaaaaatagaagctgaaattttggccgattctttgaaaaaggtaaagaaaaaacaaaacaagttacttagtaaactgcattatgtgcaggagattgagcctcagtatacccaagcatttattgatcattattttaatactaatgacctgcacgagcgtcttgaaataattcgtgagttgtcaaaatataaatcagataaaattattaagtttttttataaagtcaatacttaactgaacaaacattgaaatctcagtggtgcccatgggaattaggttatgcagatgcgctgggcaaaaaaatctgcatttttcagaggtttaaaagtgactcaaagattccggagttctattctgcatatccgaaattggtatttagcaatcagcctataattcgattaaacggtgaagatattccgtttgataagtggattcaacaatgatgggagtgttatatgatggataacaaagtaaatcatttagaaatgattcaaggagtgatttccagaatggcaagtaactccttcgctttaaaagggtgggctgtcacactagttgctggtatctttgctctatcaagcaaggacgctgataagctctactttctcgtagcgtatattcctattgttgttttttgggggcttgatgcatactatttgctgcaagaacggctatatcgagctttatataacaaggtgaggaatttacctgaaaatgaaataaattttgatatgaatacttcaccatcggaatttcacacaaataaaaacacatactggtggtgctttgtatcaaaaactattttatggttttatcttccgctggcacttattactgctggaattattatcctcacacatctgtaaaaataaattggaggggtacagctttcacttcgactgtacccctccaattacttacatctccaccaccgccgacagctttttcagcagatcggacagcggcccccaaaggtcagcgtagtcccgttgcagggccttgatctcgtcgggataaatgccgccgtaggtgttcacatggatcgccacttggttgaggttgttggcgcaccgccgctggagggacaccagctcccggatgtccgagagatcaacatggagcacatagccattcaaggccattttccgcatataggcccccatgttggaaatgcccgcctcggccatgcgttccccgatcagagcctgctcctccggcgtcaccatgacatgaagatggacacagcggcggcgtttctttgtcaccgctcctcacgctcccagctcctgtgcttgttgggggggctccttcaccttatccagctccttttccgggggctggggcggcagcgacgggccgttgttcaaaagcccgtcgatcatgttgtaattctgctcggtggacagctccacggttttcagcgggttatcctgttcgtgcatagtacctcctatctctcgtcacggtgaggaacggacttcttgggggcggtctggccccggtgctcctcggcctgtttttgggcggttttcatctgctgggcaatcggctgtttgcactccttgtgggccttggccgctgcttggcgctccaccccatgagcacgggcggcaagctgctccggggtgacatactctttcgccgcatagctgccgaagtcggggtaaaaccatgtcagccgcctttgctccgggacatggtgagcatcctcccatttgcccaccacctgagcctgggcgtccatctgccgccggatgtccagattttcacgggcgggccgcagctcatagtcccgcatttcccgatccgtcaggggctgggcataggtgattgcaccccacgcctggaatgactcgcccggcacctgctggcgggtaaagtaaatatccatgtggatcgggcggttgaagtagctcttggggtaggtgccgatgtcgatgggccgttgggtggagtagtatttgtaggtttccttgtccggggcctgctccacctcctgcacatgatagcgccgctgatagtcctcggcccgattgtgcaggtcacgctcggccatatccggctcgttgtggtagtggccccaaaagtagtcccggtgtccgtcctgctcgttgaattgccatgtcacataggggttaggggccttggggttttcccccagcacaaagccgcatttgttgtcaaacaggatggtgcggcggatcacatagtccgcattgatctccacgggcatcctcctttccgaaatgttagcactatttccgcaaaaccgggacggacgggaaaaggtattgccccctcccgaaccggccccggaaagccttgtaacaagcgggttttccggggtcaaatgctaacgcattacccccggtatttccgcatatagccccgctgctttttgagccttgcggccttggcgcagccaggggagcaataccgtgtccggccatcgggaagaaaggccctgccgcataccgggcagggccgggtttccggggcggggccttccgcagcgagggacgcctccagcacgggatcattgggcagcaccgcctcccggaagtagcggcatagcgcccccgtccagcacttctccagcatatagcaggaaccgtccagcggcaggcagcccatatcccggtcatagttggcgcagagccttgtcaccagcttgcggatcgctgttttttcctcacgggtcagctctcgggccaccgcttcacctcccgccgccagcgcctttcagcagctcccggtagcaggccacgcacccgatcccccgccagtaggggcagccgtggcagcgggagccctccggggccttgacaggctcgggccgctcataccggggaacctgctgcatcatcgtttcatagggactgttggtgaatttcatttgtcgccctccgtttcgtcctcgtcctcctcgtcccacggcggggtatcgtcgtaggtttccagctcgtccccgtagtcctcctcggtttcagcggcccgctgctgcttggggcggtagaccttgaaataccacccggctccgccgcccaccagcgccaccgccagaatgagcaggagcgtcccggtgtttccacccgcctgttcgggctccggctcgggggtaggctccggctcctccacgggttcgggctcgggctctacccccacgcactcggtcatattggtggagcataccgggcaatccatattgatcgccccggccacgcacttttcggtacaggtacactcgggcagttccgtcccggacgcctccagagcagccagcagatcggcctcgtccaccacgctgaaaaagtaggtttcatattgttcgccctcctcgtcggtgggcttgtcgtagtcaatgacgatataaaaggtgctgccgccgctggtctggacggtgataaactgcttgttggtgttctcgtcgtagagcagatcccgggtcacaaggctaccctcctcggtgaagccctctcccggctcaatggtggactcgggggtggtggtttcctccgccgggtcaaggccctcccattcggggccgcccccggcgtaggccgtgacggagaagccacaaagaagaacaacggcgcaaagcgccgctgtcagcatcttaattcgctttttcattcggtatcctccttatcctcggtttcggacttcgggacattttggtgtgcaccccgtcaagtggacagcgaaataatttacatttacgcatgaaaatccttcctgcacaccatatggtgctgggtactatgcagccagcagacggtcatggacttccataggggtccgcacgcccaggccgcgctggaggcggcggaagttgtaataggtgatgtactcctggatcatcttgaccaactgctcccggctggtgaaccgcctgccatagtagcgctcccgcttgaggatgccccagaagccctccatggggccgttgtcaatgcactttcccacccgggacatactctgtgtaatgccagctgcagccagcttgtcatggaagatctgagtggtataggcgctgccccggtcgctgtggagcagagggcgggcgccgggattgccctccaatgcctgagccagagtgcgatggaccaaggcagcgtcgttggtgtcccggatgacaaaggaaacgatgcgccggtcacacagatccaggatggcgctcaggtagagcttgcgtatgttggtgcccgtatagtagtgaaactccgtcacatcggtgagccacttttcgttggggcggtcggcgtaaaattggcggtccaacacattctccgccagctgtcggggggatgatgccgcccgagtgcagccatgtggggcatgttttaccacagactgaatcccaaggccacggcagatgcgcagtgtccgcttatcgttgaccggcgtatggtaatacttgtccaaatcgtcccgaatgcggcggtatcccttgtccgggctctcccggtggatctcctgcaccaactgggcgatgcgctgattctcggcgacgcggcccccggctttcccggagcgccaccggtaatagctggcccgggagatatgcagtgcacggcacgccgcgcctatggggaaaccttcctcttctgcgccgcggcgcaccgcctcgtactgccgctcctgacgaaactgcctcagcgatcccccctttccagctcttgcactttttttcgcagatacagttccattttcagcaattcattctccttcttcaaccgggcgttctcgatccgcagggcctcatcccggctccggggcgtttggtccgccaggcgcttgccacgccggtcctccaatcccgcgggacccaactcctgatactttttcacccagctccgcagcgtctgtacggctacttggtgtgcctgcgccacctcttggagcgtccggccgccctccagacaggccagcgccgcctccagccgttcctctatggtgtggtcgttcctcatgatagtccctcctctttctctcttggagtttctctcatgatacgcctttacccagtccaataccagattcccggagcgcaaatgatacttttccgcgatggccatagaactgccctgaccggacaggtactcctccgccacttggcgcttgaagtcctcgctgtacttccgtttggagcgattcccattctcctccaatgccgaaattccctccgagcgataccggctgatccaactctccatagtggtgtgccccactccggcccgacgcgccgcttcccgcattcgcaaccggcctgcaaggcattcctctaccagcgagactttttcctcgagcctaagctcttttcgtttccccatctatgctccctccttatattattttcttgtctgccttattgggagcataccattttgtcccaaggtggccccggcccggatctgctggagcaccacgggtagctcggcaagagggatgctcatgccccgcacgatgtccacgatctcgctgttttccgcctccacctttttctgttccagctccttcagccgggcctgctgttcggtgattttggtcttgaccttttcgatctcggcctcgatctttgcacttttggaaattgccatgaaagcctcctttacggtaaacgcccataggcgtagaaatgagattgccaatagctgctgttgaggttggcataactgatgggatctccacaatggagcatccagccatcgcccacatacagcccacaatggctgacccccggcgtgtcgtaggtgccgacaaaaaacaccagatcacccggctggggtgagctggtgggggtacagtagttgtataggccctgtgcgcccagccgccccacatcccagccgcattgattgagcacccatgagaggtagccggagcagtcaaaggaagtggacgggctggagccgccccagacatagggatagtcgatgtacttttccgcctcggtgagcagggcggaaaaggtttcgtccgtcagatattcctcggggacttcatgctccacgggatcgcccgtgtacttgcccacataatcggagccggggaacagatcgggacggttgccaagcgtcgccatgtagagggcatacctggaaagctgttcctcgcccatgatgtagacaggcaggtgagaaaggttttcgttggagagggtcacggtgcaaatgtagtaattgtacggcacttccacatcgtagtcgttgccctcactgtccgtccgggtttccgtccgataccgcacctccaccaccacattctcggtgagaatgtactggcggtcaaagagcatttgcagggtgtcctgtacctcggccagcgtccattccccctcatgccatgcgctgataatggacagcagcacataggggtcatgctcgatctcgtccagatcgtagtggtactcgtcatagtcgtgggtgctctcgtaggtgtccagatagttttgcagctccgcctccaaagcacagtaggcagcctccgcccccagcagatcagcgtcctcggcgggataggtggatgccccgatagcgcccgctgtgccgttgcccagcgttgccagcgaggacatacaggactgcatcatcaccagcagcaggaacaccgccacaaacagcagcgcccccacgggatgccgcttgatgaaacccacggcccgggccgccagtttttccgtggtgacagctgttttttcggcggccttgacaccttgcttggcggcctcccgtgcttgtttggcatattgccgcttgatcttctgcttttggatcagctgggacagggcgttgccccgcatttccgggtgctcctgggcagccatgcggtagtaatagtccgccgtggccttgatgtgcctggactcggccttgcggacagccttggccgggtgctcccggattttcttttgcacaaaccgcttgccgtggcgcagggcggactcgcccaccagctcggaacggtgagcgccctcggtgcccacattgtcctgctccacctcgaaaatcttactatgcacataaccgtgaacaccaccgcccaccgtcccggccacccagcgaaccgggccgggcggcttgggcggtttctgctttgccagcttttccttggcctgctccagcttttcaccccgcttttccatgcggagcttgctggcggcggtctgctcctgctggctcttatggcggaacttggactttgggactttttgtcccgaagtggccccggccttattcgtcttttcgttcatgggccatatcctccgggcgggtggtcagcaggttatagatctcccccttggggaaccgatccacaaacgggatggtcacatttccatagaacagcagcccctcgccggaattggagtgggtgatgtaggagagctgatgctcggaaatgcccagctgcttggcgaggattgcccggtcactttgggcctgggacaacaggatcagaaaatccgtgttgtccagaatgttggagatggccgggcttgccagcaggtctttcacattctgcgtgagggcactggggacgcagccctttttgcggagcatcttccaaacggccacaaagtagctggcggtgagctcgtcccgcagcaggatatggaactcgtcaaagtagcaccatgtagcgatcccggccttgtggttggcgttcaccgccgccgtgacaaactcgttggtggtgtgcatggcgatcttgcggaggttttcgcccagccctttgaggacgatacacactacccgggaattgaggttgacattggtgggatggttgaacaggttgagggagccggtgcagtagagctccagcgctgttgccacacggcgggcctccggctccggctgcttcaaaagctcctcgtacaagtcctgcaacagcggggttttggccgtttccagccccagcgccatctcccgatataccagccgcacacagcggtcgatgaccgtcttttcaatgggctgcaagccctcccgtccgcccacgatcagctcacacagggacaacaaaaaatccgccttcatagaaagcggactttcatcgtcgttggtgttcatctgcaaatccataggcgaaatgtggtgggggctgtctggggcgatgtcgatgacctgtccgcccagccgctgcaccagcggggcgtattcgcccatcgggtctactacgataatccggtcattggtggcaagaaacacattgatcagctcccttttggcggcgaagctcttgccggagcccgtggagccgaggtacatcccgttggccgatttcagctttttgcggtcagccatgatgacattgtgggaaagggcgttcatgccgtagtagagcgcctgtccgcccatgcggagctcccgggtcataaagggaatgaagatggccgtggagcttgtggtcatgccccgctggatttcgatgccgttgtagcccagtaccagcgaggacacaaagccctgctcctgctgccagtccagccgcttcaaggcgcagttgtatttctgtgcgatgccgcccacggtgaacacatcgttttccagccgctgccgggtgggtgcgatgttcaccacggtaaaggtcagcaggaacatccgctcgttgcgggactggaggtcggccagcagttcggcggcgtccttggaaaaggtaatgagatcagggggcaaaatctccatatcgtacccggcccgcaccgcctttttctgttcctcggccttcatgcggcctatgtcagagattttccccttgatggtcttgatggctttgagctgatccaccgtctgaatatgcagcgtgacggtgagctcggcgtccagctccaagatttccgccagcagcttgtccgagagctccgacgctaaaatctgcaagtaggacgcagcgccccacgactggcccacccggaaagtccgggattgccgaaaatcgaagctgtccggggcgatatagtccttcgtccccataccgtgctggggaatgtccttccacgaaaagcggaacggctcccggctccccgggtgcatctggccgtggagcaccgccagacggtcacggccatccaagggctgggactgtacccccagccgtttgaggttgcccatgacatcggcctccacacggcccagccggggccgggcctcggccacgctgccagcgggcagcccaaaggtgatgtacttggtgcgctcaatgccgttgttgctcttggcgatctggcctttgagtatctccacatattcatgccggatgctgttgaactcgtcctcctgttccgggatgttcaccttgtagcggttggcgctgcgggaacggcggttgacaaaggagagctgaaagggtaaggaactgtcgaagtagttgagaaacgagctccacccgccaaagatggcggtctgatcctcggtggatgccacggcgtagttgatgtcctcatattccacggtcttggtatagaacccgccggggagctggcataccccgtccgggtgcatcgccacataggggatggtctgctgggcggacaccaccgcccgacgctcatttctttttgcgtttggttttgttttggctgcgttcaatagactcctcctttcccgtgaatggagcatagatattctgcgtccgatagggccggatgccgggacgcaggaacttggtgttgatcatgttccgcagcaccttttcaaagggcagcccgtctttttcgtacatcgccatgagaaaggccgggagcatgatccccagcatgacgaacagcgccccggtattgccgatggccccacgggtcagcagataggtgggaaccccgatagccgccccgatcccgaagcagatcagctgccgcttggtcaggttaaaggcaatcttggttttgactttggacagatcattggggacattcacatagggcataggtcagcctcctttcatgcccaccttgggacaatttgtcccgaagtcccggagcgtggactgtacctcgttgccccacacatcccagccgggcggggtctgccgggcgaacagctccacacggggcagatcgcccatgagggccacaatcttgtcccgggcctcgtccggctttttgctgtggacctcgatgggcgaaatgataaactggtgggtgttggccgcctgccgcttggggtggcctcgtgttgcaagcaggcacacctccgcattggcccgtgtccagaagcccagtccataaaaccagctatccgccttgcggtttttcttgagccagacgaaagccacgcttttgtaggtgaagccccattcccggatcagccgcagggcctccgggagctggggaaaggtggcccacaggaaaagtgcgctgtccggggccgcaagatcggccacaggcagcgcacaaagctcgtctatgctcatggtggggtaatgatgctccgccgccccctgcaagcccttttgggagtagcgccacgggggatcggcatagatgatggaatatgctccgataattacactcctttcccgccacgctccacggccagtcgtgcctgctcaatgcgctgggcggcggggccgtagatggccggggcgttttcaaagcagatgaagcggcggcccgtattgagggccgccaccgccgttgtgccggaaccagcgcaaatatccgctaccaccgctccttcgtcggtgtaggtctttatgaagtattcgcacagctccacaggcttttgcgttgggtggatgccacccatcaccgtggggacaaacagcacatttcccggatagcgccgcccatcgctggagccggagccttgccgcacaaatttcccgtagttggtactcatgccgctgctggtgtgcgtccgggtgtatggcttgccgtaggtgaattgcggatgatagaccggggacttctggtagaacaccagaatgttctccgactttttcagcggggctcggttggcgttgagaaaacccgttccccgttccttgtaccatacccactcatagcggagcatggacaggttggacgcccccagcaccttgtcataggggcattgggcgaagaacagcaccgccccgttgggcttgaccgcccatttcaccgcctcccacagctcggggagcggcagcggcacatcccagtaattccgggtggtgccgtagggcggatcggtaagcagcatatcaaccgagtgctggggcagggacagcagccccttgatcccgtccataaggtacaggccctccgccatgtttgggacattttgtcccaaagcggttttatcggtcatgcccggactccttcaccgcagccttggcggggcgggcggcgttgtcccgggcggcctgtgtgcggccctcggccagccgctgggcaatcgacctggcgtcgctttctccgcccagcagctcccgcttttgcagcacttcctccgtttccgccatgaagcggtacacatccgcctcggaaaattcctccggggcttttccattccacagggccgttccgtccggcccatatcttctcggcatataacacccctttcttaatgagcactaaagatgctccgggcaatcgtccccgttttgaacaagcagaaacacagcagcaccgtgtaccccacacagccccaaatggctccgatggggtcgccgctcgtggcgatcccttgaatgagcaccgcatagatggcgacgcacacaagaatcagcatcccttggaatcccacggcaaacagggacttcaaatagttttggcccatgctgcccaacttccggttggagagggtcgccacgggcagcggagccagacttgtgagcaggtaaatctcaatcatgcgcccgtagacgatgacgaaaatcacgatgttcagcgcccacatggtcacatgaatgaggaacgattggagccacagccccaacagagcgccaaggctcatggtttccagacttgcctccagcgtatcgatcatggaggaagaaatgtccgttgagccctgcacaatcccggctgcgctggcaatcacgctttgggacacatcaaacaccgccatgacgatattgaatgtgttggacagaatgaggatggccgcagccgttttgaaaatccacttgaagaaaatccaatagtccagatcgtgcaggttgtttttttcgatgatgagctggatcagctcataggtagcaacaaaggtcaagaccagaccggcaatcggcagtatcaccgtttcagaaagctgccgtatgagggaaaagaccccggcgttccacgccgccggggtcgtccccacttgcaccgcaatctctccgacacgggtattgaccgtatcaaaaagccccgtgaggttgcccatgatcccctcgatcagaagcccttttaaccagtctgtcagccagtcggtgagaaatcccataaactatcgcccttaaaacaggccggacagcagggggatcagggtagtgcccagcacgatgatgccgccgcccgccatgagctgcttcatgccctggcttttggagccagggttgtccgagccgtagccctccaggagattgacaacgccccacacgcccaaaccagcgcccagcgcaacaacgagagtctgcaaagtatcaatagcggaagaaaagaactgcatatagcctccatttctccgggttttccccggccatgaaaaaagccgccatcactggcggcaggttacgacctctggacactttggtgtgcaccccgtcaagtggacagcgaaataatttacatttacgcatgaaaatccttcctgcacaccatatggtgctgggtactatgcagccagcagacggtcatggacttccataggggtccgcacgcccaggccgcgctggaggcggcggaagttgtaataggtgatgtactcctggatcatcttgaccaactgctcccggctggtgaaccgcctgccatagtagcgctcccgcttgaggatgccccagaagccctccatggggccgttgtcaatgcactttcccacccgggacatactctgtgtaatgccagctgcagccagcttgtcatggaagatctgagtggtataggcgctgccccggtcgctgtggagcagagggcgggcgccgggattgccctccaatgcctgagccagagtgcgatggaccaaggcagcgtcgttggtgtcccggatgacaaaggaaacgatgcgccggtcacacagatccaggatggcgctcaggtagagcttgcgtatgttggtgcccgtatagtagtgaaactccgtcacatcggtgagccacttttcgttggggcggtcggcgtaaaattggcggtccaacacattctccgccagctgtcggggggatgatgccgcccgagtgcagccatgtggggcatgttttaccacagactgaatcccaaggccacggcagatgcgcagtgtccgcttatcgttgaccggcgtatggtaatacttgtccaaatcgtcccgaatgcggcggtatcccttgtccgggctctcccggtggatctcctgcaccaactgggcgatgcgctgattctcggcgacgcggcccccggctttcccggagcgccaccggtaatagctggcccgggagatatgcagtgcacggcacgccgcgcctatggggaaaccttcctcttctgcgccgcggcgcaccgcctcgtactgccgctcctgacgaaactgcctcagcgatcccccctttccagctcttgcactttttttcgcagatacagttccattttcagcaattcattctccttcttcaaccgggcgttctcgatccgcagggcctcatcccggctccggggcgtttggtccgccaggcgcttgccacgccggtcctccaatcccgcgggacccaactcctgatactttttcacccagctccgcagcgtctgtacggctacttggtgtgcctgcgccacctcttggagcgtccggccgccctccagacaggccagcgccgcctccagccgttcctctatggtgtggtcgttcctcatgatagtccctcctctttctctcttggagtttctctcatgatacgcctttacccagtccaataccagattcccggagcgcaaatgatacttttccgcgatggccatagaactgccctgaccggacaggtactcctccgccacttggcgcttgaagtcctcgctgtacttccgtttggagcgattcccattctcctccaatgccgaaattccctccgagcgataccggctgatccaactctccatagtggtgtgccccactccggcccgacgcgccgcttcccgcattcgcaaccggcctgcaaggcattcctctaccagcgagactttttcctcgagcctaagctcttttcgtttccccatctatgctccctccttatattattttcttgtctgccttattgggagcataccactttgtccagaagtgctttatacataggcatccggatcgtccacatcgtcgtagttgaggatgtcctcgtcctcgcttacgggccctgtgtccgatacggctacctcgtacacctcacaagcctcgttcagcccaggccgcctgcggcggtttatgagcttatcaaggtcaaaggcgtttttctgtttgtcagcctccgatgtatatttgtagttcgggtgctgcttcaaatcgtatttggacgaaaagaacgggggcaggccccgtagctgcaaaatgcacttatcgcccggcatggtagccagctcgctgggtgtcatcagctcccggcccagccgctggatgttctggttgtagctttccgactgcccacgggagcggccctcggtctgcatggagatcgtggcctttcccagccagttttcggaaatctccttgatggtggagctttcccgcccgcccaggaaaatcacgctgtccatgtttcccaggattgtttcggcgttgtccttgtatatggccttgcattgagcgtactgctggtagaacaggcacaggcttacctcacgagagcggatcacggccaccagcttctccagcgagggcacctgtcccgtgttggccgcctcgtcccacagcacccgcacatgatggggcaggcggccaccgtgaacattgtccgcccgttcacacaggagattgaacatctgcgaaaaggccagggcaacaatgaagttataagtgggggttgtgtcggaaattgtgaagaaaaccgccgttttccgatccccgatgcggtcaagctccagctcgtcatagctcatgatctcccggagctgggggatgtcaaagggggccagccgggagccgcaggaaatcaaaatgcttttcgcggtcttgccccgtcaaagtcggtgatgaagatttcctcataccgcaccccgtcaatgccgatgcgcttcaagagagtctgcacctcctcgggtgtcgtggggaattttagatattcgcctaccagttcaccttcgttatacttccccaagttggtgacataggcttcaaacagggcgggcatcagcgccgcccctgtcctttgacggtgaggatgccctccagcgttgtggcggtgatccccagccgctgggccacggcgatgtcgtttttcatggtctcggtgacggtatggccgcacaccaccagcacatgggaacgccgcagcaggtcacggctcatgtcgatgccgctcttgtgctcctctgggacggcatcgttgaggaacaaaggcagatacagcgtggggcagatgggcgaaaagcccgcctcgtacaccgcccggcagtaccgggccgcctgttccgtgtttttatagtcctcgccgcaccatgcggcggtgatatacgcaaggggtcttttcatagaaaacctccgtttcatggtgttcaaccctatccccccgccctttcccattcatgggaaagggggcggctctggaagatatacccccgtcacgcccccgggaatggcacagccggggccgcccgtaaagggcaagccgccgcaaggcggcggtgccatgcacccttgacggacagcgcccggccatgccgagtaaaaggcggcgacgggggataaatcccaggagccttgaaagatggaacgaaaaagacctcgggacaaattgtcccaaggtcggttaacttctccatatcctttttcttgttgggcttgcccagctccgggggctgcttctccttccactcgtccagcagggccagaatggtgtccttcatctcccggggcgtcttgtccttgccaaaatacttttccagttcggcgctgttgatgatcaccttgtcaacctcctttttctgttcgctcaaaatgccgtcgatcacatcgccgttcagcttgccctccttatccagttcccgcatcttctgcgcttgggagagtgacggagaggacgcctgcccttcaatggcaacggcgatatacttctggtgcttggggcggatgaaagaaatctccacggcaggggtaaaggagagctgcttctcgtctaccatcttttgcagatcagggacaagctcggtcaggcggatataccgctgcacctgcttgtagttcatgccgttgcgatccccgacgatctgcgtggagcgttttcctgcgtcccggtcatcctcgccggggcgtgctccttggtgcttgatggcctccacctgctgtttcagcgcagcggctttttccgtaggcaaaattctctcccggtgccgcaggttgtcatccgtcatggcgaggatagcctcgtcatcggccatgttgcggacgatacagggcatgttgacaaacccggcaagttcgctggcccgctggcggcggtgtccggcgataatctcatatccgccgccctcacggggccgcaccagcgcaggctgattaaccccagcggccttgaccgactccaccagtccctgcatttccgcatcgtcccggacgccaaaggggtgatttttgaacggatgcagctcggaaagattgagatacacgatctcctctttcacgccacgggcagcgtcccgaggggcgggcggctgctcggttgcagccggggcctccgccgtggcgggagcgtctttcccggcagacggtttgctttgggacattttgtcccgaggttgcggcttggccttgtcaggggccgccttgtcagccttgggtgggcggcccctgcggggcttggccgcatccttcgctttatccgcctgcttgcccttatcctgggccgcagctttttccggaggcttgcccttcgtcgccccatcccggacagcggaaaaatccaccacctttccagcaggggcaggagctcccatgccggggattgtggtttgcttctcgctcttgcccgactgcggcgccccctctaccacgggggcctctgtcttggccggggcgggctgatcccgcaccggggaatcggctttggcaggctccacctttcccggattggtgggctcatccaccttcccagcgtcgggtatattctttttatcgtcagccacctaaaaacctccttcgttgtgaaataagaaaagccagccccgtggctggcagcgaatacagaacttcctccttcttaattttagtatatgaaaataccatccatagtcccattggatgcttctcacacaaaatggagtataataatcagttgaaaaaactgtaagcttcaggtattatttaaatatacacttgtggcatctattttaacttctacacagaggtggacatacatgaaaagacaggtttttttcagcttccattattctgaggatgtttggcgtgttggccaagttagaaatatgggaatagttgagagccaaaggcttttctctgacaacggttgggaaaaagtacgattgaaaagcgagagcgcaataaaggcatggatcgatagtgaaatgaaaatgcgctcttgtgtcgttgtacttatagggaataaaactgcatccagaaagtgggtgcaatatgaaattgagcaggcttggaaacttgggaaaggcattgttggtatctatattcataaccttgccaattcaaatggcgaacaagcatcaaaagggcataacccttttgatgacttttgcatcgataagacttttaattatattgcgcatcattcgctgccagcagatgctaatgaaatccagttgagttctatttgcactgcatataatcccgattggcttacaagcgaatatgtctataatgacatcaaaaaaaatatagagcgcttgattgaaaacgcaattctaacacgcaatcgttatccgaagtaaggaggactgcaatgaaacggatttttgaaagccgtgagtttagttcatatcatgtttcctctttatttgaatctcgtagtgctattgcagaaagctacttgtattcttcttatactactgtttttctatcccacaaacatgatgatttggatgatttgaaggatattattggttttctccaagcaaaatatagtgtgaaagtatatattgacagccgcgatccatctatgccgcctcttacctcaggggaaacagcggaaaatataaaaaagcgaattaaacaatgcaacaagtttatacttctagcaacaaatggcgctattgaatcaaaatggtgcaattgggaattaggcttcggagacgcgcagaaatttaaagatcatattgcgatttttccaatcaaaccatccggaacttttgattatgaatataaggggacggaatatatgtcgatctatccatttgttgcgttctacgatggaacagaaacttatacaaacgggaaccgcgttgaacgaggatattatgtttgtgttagtaaaaatggaatcaatactataactcccttagccgattggtttgctgcccgataaacccgccaattatgatattaggatgaaagccttgcttgctgcttgcaaaccattgatattactggatttccgcagatcctttaatgacactcggaccaagcgtagagaggcggacaggataaaatcctgtccgcctctcttgtttcatatctgtctttctgtagcccccttcatatgctgatgaaccagttatataattattgttgaaaacaaaaatacaataatattgattttctaaccgcatgtcgacaaaaagttagcatttggggccctgtttttggaagataacacgcccatttacgcaaaaatgtggtatattgaatataaagttatatctaataatgaattccattatgtcagttcgtttttccgccatgtcagtaccctattttcgacgattttccctaaaatagtagtcgtatactatctacgggaggtaaatctatgaatttcgacaaacagcttgacgtattttccagaaacctgtccgaaatccgccggaacggccgctactcctaccaggcattctctgaaaagcttcgggttgggaagtccacggttcaggccatcgaaagcggagactacaatattacgctgagtacgctcatcacaatcgctaattccctggaaatccatccggcactcctgttgatggatctgccgatagagttggatctaacagggacaaaccgctattatgccaacttactcatgacctactccgctctgccggaggaacagcggtcccaattccgaaacataatccaacgcctggaatgcagcctggatggggaccatttagagcagaacgacaccggagtgaactgaaatggaaattgcagcccgcctgcgccagcttggattcccaagcaactatgtggggtttccctaccttgcctgcgccatctcattggtgcagaccgagccggagtacctatatcaggtattcaaatgtctttatcccgccgttgccacagcgtttcaaacctcggcagcctgtgtggagcgggacatacgcaccctgctctgcgcatactggcgctccggcggccagccattattgcaggccatctctccgcgtccgcttaccgcccgtcccacggtcagtgagctgattgccctgctgtccgggtatttccaggatgtcggagacctataattcggggcgcatcatggcatactgaagctgaggtgatttccatgttgacagaagcggaattgctccagtatatctaccagactacagaaatgggccgggacggcattcagtccgtcctgccccacgcggaggacgagacctttcaccaggcgctggagcagcaactcacggagtatgaaaagctctacggcgccaccggaaagatgctgcgggaacgtggccaggagcccaaggggctcaatcccatggtcaaggcatcctccgagatgatgagcgcgatgaaaaccatggctgaccactctacctccaagatcgcggagatgatgattcagggcaacaccatgggcatgaccaagagcctcaagcacctgcacgactaccatgggaaggacgaacgggtacgggatctggccaacaagctgctgaaaaccgaagaggccaatatccagcagatgaagaagtttctctagtctcctcaagggcggcgccgaattggcgccgccctttcttgcgcttgctgtcacaaaaaccggaacatatccgttataatgggtgaaaaccggttttctatccagcagacaaggaggaggatgctatggacgaggcggagctgagccgggcgttccccatcggggacggcgcctgtctggaggcagtcatcgcccgctatggacaggccctgctgcggtactgccatcatatcctgtgtgactaccatgaggcccaggacgcggtgcaggacgcgctgctgcgggcctggagtcgccgcaaccgcttccgggcgggcaccaatctggaggcgtggctctacaagctggcctatcacgcctgtatcgacctgctccggcagaggcggcggcaactctttgcccctcccccgccgtccgggtacaacccagattacatcgggccggagctgcgggcggccctgtccgtcctcacgctggaggagcggggcctggtcttcggacgggtgatggagggccgctcctatgaggagctgtcccagatctacggcccgtccgccgccgccctgcgcaagcgatacgagcgggcgcggaagaagctggccctggcactgagcgaatcggaattggatgaacagaaggaggtcgttccatgaagcggacaccagaggaggagcgcattttccgcgccctcgctcagatcgaaacaccagaggccgacctgtccgccgcactccggcggacggaggagccgcgccgcatccggcccgtccgtcccctggcggcggcggccgtgctgtgcgccctgctgaccatcggcgcggcggcggtgggcttttccggggcgtggcggtactttgccccctccctgccccagaacgccgtgcagaccgtgggggccagccagacctccggggactacaccctcaccgtggaggaggcggtggtggacgacagcaattttatgctcctgctggccctgacccgggcggacggagagcctatcgatccagaggcatcgctgaccaccaacagcatggatctggaagtaacggtggacggccactattttggccgcgccaccgactaccagctctcccctgacggaaaaaccatctacatctgctacgaaaacactggcgcactgaccgagacatccattttgggcaagcctatcaccctcacggccgatggagtggccgtaaggctttttgacgatgacggaaatattcgtatccagtgtgacaaccctatttccctatctgcgcttacggaatgggggactccggacttctctgccgtacccctggtggatcatgtagaggagattatccaaactgcagcaaatggcggggcagctcttccgttgtttacggtggagggagttcccctcctgacacttcgcggtgcggccctgacctcggagggactggccctggtgacgcaggatgcctcctacgtctccggtgacctggcgtatacgagaagcagctgtgaagccatcatcgatacccgcaccggagcacgctatctttgccgctccggtcacggagcagcattagaggatggcacctgggcctttctggaggtattcgatgactgcccctttaccctggaagatcttccctatcttgaagtggaggtgtcctataccgtcgaccggattctctctgaccagccgttttggctcacttttacggtggaaaagtcatccgggtggaaactcccgttagatgatgtcctggaattagacgggctcaccctgcatcctgcggaactgcggttgtcagccctggatctgcaagtctatttccaagatgaagcggaggcggccttctccctctatcgggacggtaccgctccggtgctccatctggcaaacggcacagatatcaccaccacctggcatggaggcagacatctggactctgctctgcctatggtgtcattccaaaccattgatgccaacggcgatcggctgttcatcgaccccgcacaggtggtttccatcacctttggaaatctggagatccccgtggagcactgacctgtttccctccccaaaaacggcgcgcccggtttagggcgcgccgttttccattgcccggccccggcaaatctgctatgattgtaagagatttgtcagaattgtctcacgctctttgacagaaagggctggtaagatagcgtccataggagggatttgtgtgaacgagtgtattctggtggtggatgacgatcccgaaatcgtccgtgccatcgccatcctgctggaaaaagagggctatcaggtgctcaaggcctacaacggcatggaggcgctggagcaggcggtaaaccccgccctgcggctgatcgtcatcgacgtgatgatgccaaggctggacgggctttcggcggtgatgaaaatccgggaaaagcgcaacctgcccattattgtgctcagcgccaagagcgaggactcggacaaggtgctcggcctgtccatgggggcggacgactacatcgccaagcccttccatccccaggagctggtggcccgggtgcgcagccagctccggcgctatacccaactgggcgacgtgaacgcccagagccagggcggagagatcgtcaacggccgactgtgctaccgcccggaggagcgggtgctgctggtggacggggagccggtgaagctgacggccacggagctgaaaatcgtggatctgctcatgcgcaacctggggcgggtcttccccgccgaggagatctaccgacgggtatggaacgaggaggcctatgccacagagaacaccgtcatggtacacatacggcgcatccgcgaaaaaatcgagctcaatccaaaggaaccggaatatctgaaggtggtgtggggcattggatacaaaatcgagaagcgttaagcccgccctggcctttctggccttcgttctgggcgtcacgctgctggtctacagcgcagcggcggctgtgattgtgaccgttgccagcaggggttctttctacatcccctggcgcgacatattctggaccgactaccagactacggacagctttcacagctttatcaaggatcggctctatgagctggccaccgccgccgataccccggaggaggaaaatcccctggagggctgggacgacggcctgctctaccgcgtccgggcggatggagtgctgaggttctccaacaccgacaccctgtctcccgaccggctgcccgacgggtataattttctgatcacctacgacggggagaaggtgactgccgtcaaggacggccgcgacatctccagtcagttctcccccctccccttcgcggatccggccggtgtgtccgtctctctggccgcggccgagcacccgcccgcatccggctcgtcgtctctcgcctccctggtcggttctctccgacagaaccgtgccttctttttctgcttcctgtttcttccgcccctggcgggtatcgccctcaccgccctgtccattgtgtggcaccgtcacaaggtgcgggccgaccgggccatcgcctggttcaccgggcgggtgtggctggaggtcaagctcctgctgctcgtccccttcctctgggcgtgcgccctggccggaatgtgctgtctggccgcgctgatgggggaggtgctcacctacagcattgtgcgctacctctccgtccccctggccctgtggtgggcttacctttatatcaacgacctgcggtacaatttcggacacctcaaggagcagagcctgtgcgccgcctgtgtgcgcctgctccggcggcagatcctgcgccaccccgccgcccagcgggccgaccgacggatgatctggcagtttgccgcctgcctcccctttttcctgttctgcgccctgtccgtgccggcctttctggtgttccgtctgccccttccgctgctgctcctgctctgtatggccgggatcgtgctgatcggtctccaggtgtggctggtcagggaaagccgccgctctgccgccgagctggacgccctgctggcctgcattgaggccgccggggcgggaaggctggagggagcccctcccctgccgccggactcagatttccacggtgcagcggagcagctctcccacatggaggagggtctgcgtaccgcattggccgaacaggtgaggagcgagcggatgaaggtggagctgatcacaaacgtctcccacgatctcaaaacccccctcacctccatcatcagctataccgagctgctccagcaggaggagggcctgcccgaccatgtgcaggactacattcgtgtcctcaccgacaagtccaagcggctccaggtcatggtgcgggacgtgttcgaggtgagcaaggctgctacgggcaacctgagcgtagatataaagccaattgattttgcaaagctgcttcgccagacccttgcggacatgggtgaggccatcgaggagagcggccttgccctgcggccccgtctgccggagtccccggtctggatcgccgccgacggcgaccggctgtaccgggtgttccagaacctgatcggcaacgccctcaagtactccctggagggctcccggatctacctggagctgaccgcagccgacgggcaggccgcggcggtgctccgcaacacatcgcgggaggagctgcccgacggggtggatctcaccgagcggttcgtccggggggacgagagccgcaccgacgggggcagcggcctgggcctgtccatcgcccgcacctttaccgaggcctgcggcggaactttctccgtccaaacgcaggcggatctcttcaccgcctccgtctccttccccctgaccagggaacggccgcccaaggaggagagcgcggtatgagactgctatgcgcgtgctttgccgccctggcgccggccattcatgacttcctgcggattaccggccatcaataggactacagtaccgttttagaagccgaggatgcagcctccccctgtccgaaatgagtttatcaacgcagcatccggtataccatatataaaatccggcaactcccattttggggggtgccggattttatttgacgaatctttgtgtttatactacaataagagtattatcaggcgatttgaaagcgaggaaaatggtatgccagacagcaactcaagccacaatcccctcggctccctccccatcaataccctgctgcccaaattcgcaatcccttccattgtcgcctatctggtcacctctctttataatatagtggatcagatcttcatcggccagggcgtgggatatttgggaaacgccgctaccaatgtggctttccccttcaccaccgtgtccaccgccatcgccctgatgatgggcatcggcactgctgccaacttcaacctgaatttaggggccggaaatgaggaacgggctcgccgggtggccggcaccggactgtcctgtcttgcgctgttcagcctcaccctgggcctgatcgccttgtttttccgaggcccactcctcaacctgtttggcgctacgccggaggtattgccctacgccatgatctacacgggcattactgccttcggcctgcctatggtcacctttaccaccggggccagttccctggtccgggccgatggaagtcccacgtattccatgctctgtaccctctccggcgcggtactcaacaccatattggacccggtgtttatcttcggtctggacatgggcgtggccgggggcgcactggccaccgtattggggcaggctctctccctggtcatggtactgtactatctgttccgcacccgcatccgtaccatccgcctgacggcggcctccctgcacccttccgggccacttctgcgtgccatctgctccctgggtgtttccccctttttaaatcagatggccatgttcctggtgcagatcaccctcaacaataccctgacctactacggtgcgctctcccactacggtgaggacattcccctggcgtgtgttggggtcatctccaaggtcaacatcctgatgctgggctttaccttgggtatctctcagggctgtcagcccatcttcagctacaactacggcgcccggcagtatagccgcgtacgtgaggcctaccgaaaggccattgtcgccgcgtccgtaatctgttgcattgcctttgtgtgctttcagctctttccccggccgatcgtggcactgttcgacccctctggcagcgaggagtattttcagttcgccgagcggtatttccgcatttatatgtttatgacactggccaatgccttccagcccattacggccaatttctttacctccattggcaaggccaagcggggcgcactgatcgccctcacccggcaggtgatctttctcattcctctgattttgatcttccccctcttcctggggattgatggcgtcatgtacgccggtcccatcgccgacagcgcggcagtagtggtggccctagccctagttacccgggaaatgaagcggatgccccacgtggacgaacccgtggcggcagatacgctggtgtagctggctccagcggcggcgggcaatgtgggcggcggcatcaccgccagtctcttaggcctctagggtcagccaatcggcccatcccatactcttttctcgataccggcaccatagggaggtggccctgggcggccgttccggctgccggtatctgaggctgtcaccccagcttttccggctgctgcgtggaccatatgcgtcccccaaataaccaaacaggaggcgccccacggggtgcctcctgtgtttactttcacagatacagctcgggcggcttgtcccccttggtcaatgcctcctccaaatgagccgctgtagcggcaaaggcggggccttccacccgtcggctgcccgccgggcaagcccggacacaggccaggcagcggatgcacttctcaccgtcggtcgcacggggcgcggcaggatggatggcctccaccgggcaggccccgacgcagcagccgcagcgggtgcaggtatcgtcccccactgggtagaacggcgccctctgaaagctgcggtagggccggttcccgggcaattccggggtgcaccaaggccccgacagcttctccgccgcccgacgtcccagctccgcggccgccgccagatcccctgcgttgggtcgccccacggctaccttggcggaaaatgtgtgaggcgctacaaaggtccccgccgccagagggcggaacccccgggcggcacacaggtcgctcagctccgccagcgcgtcgtcaatgagccggttgccatacacagccagcaacaccgccggagtctcctccccctgtaggccgtccagcagccccggcacctccggcacccggccgtaataaaccggtacgcccaggacaactacgtcatctgcgccgaacatatgaactttgcgccgctcctccggccgggtcaggtccacttctccgcccatgtgtggcatagctgccgccacagctcggacataggtgcgcgtcccgcccgtgggactgaaatagagggctgttgtacgtctatgcatgtgttccgcttcctttccacttgtttgatacacaggaacgtgccgtggggaaaaacaccccacggcacgtctgcctgtttgccgttcggctattgtactgccttctcagcagcagctgttcccgcagccgttgttgcagccacagccaccacagccgcaaccgccccagctcccgccgccgcagcagcaacagagcaggataatgatcagaatgatccacaggcagccgccgccgccaaagccacagccattattgcaccccatatgaagtacctcctggtttgatgatggaaaccagaggcggagcggtgggagtaccgccgctccggaccggtctcactccatactatgccggggacgcagaggggtgcttggtacaaattctttttattccagctcaaaggcgccggtatagagctgataatagagtccgtgctgccggatgagatcctcgtggtcgccccgctctacaatgcggccgtgatccagcaccataatggcatcagagttgcgcacagtggatagccggtgggcaatgacaaagacggtgcggccggtcatcagggagtccatgcccctctggacgatggcctcagtgcgtgtgtcaatggaggaggtagcctcatccaggatcatcaccgggggatcggccacagcggcccgggcaatggcgatgagctgccgctggccctgggacaggttggcgccgttgccggtgagcatggtgtcgtacccctggggcaggcggcggataaagtcgtctgcgttggccagcacggcggcggcctccacctcctcgtcggtggcgctcagattgccgtagcggatgttttcccgcacggtgccggtaaagaggttggtatcctggagcacaatgcccagggagcggcgcagatccggcttatgaatatcgttgatggagatgccgtcataatggatcttgccgtccgcgatgtcgtagaagcggttgatcaggttggtaatggtggtcttgcccgcgccggtggcgcccacgaaagccagcttctggccgggcttggcgaaaaggctgatgtcgtggaggatggttttgccctcctcataggcgaagtccacatcatcaaagcgcacgtcgcccgccagcttggtataggcgaagctcccgtcctcctggggaaccttccaggcccacagattggtgcgctcactggtttcctggagggcgccgtccttgttataggagacgttgaccagggtgacggtgccgtgatcctcctcggagggctcatccatcaggtcaaaaatccgttgagcaccggccagagccatgaccacagagttgagctgctgagagatctggctgattgggttggtcaaactcttggagagctggaggaaggatgcgatgacacccagggtaataccgccccccaggccattgagggccagtgctccgcccaccatggcgatgaccacatattggatgttgccaatgttgatgaggatgggcatgaggatattggcgtacttgttggccttataagcgctttcaaacaaggcgtcattcacgcgatcaaagccctcctgggcctcctcctcgtggcagaaaaccttgaccaccttctggccgttgatcatttcttcgatatagccgttcagatcgcccagcttcacctgctggcggacgaagtagcgaccgctgcgtccggccaggaaccgggtcaccagcagcatgcacacgatgcacacgattaccacgccagtgagagtgaggttgagtacaaccatgctgacaaaggtgaccacgatcatcatcagggaattgattacctggggaatgctctgggagagcatttgtcgcagggtatccacgtcgttggtgtagacgctcatcacatcgccgtgggcgtgggtgtcaaaataccggataggtagcgtctgcatgtggccgaacagatcgtcgcggatcttcttctgcacgccctgggagatggtgaccatcaggcggttgtaggccagggcgcacagggcgcccaccacatagaggcaggccatcaggagcagagcgtggagcaggccggtgaacaccgggtgttccatggccagcagaggcgtgatatagttgtcgatcagggcgcccaggaagatggagccggccacagaggccaccgcgctgaccaggatgcataccagcaccagaaaaaagcggatcaggtagccccggcccacataactgagcaggcgccggaccgtgtgggactttttcttcggcatcttattcatcctcgctccctcccttcgtctgggattcataaatttcccggtagatctcacagctctggagcagctcgccgtgggtgcccatggcggaaatccttccgccatccatcaccaggattttgtccgcgtcctcgatggaagagatacgctgggcaatgataaacttggtggtgtcggggatctcctcccggaacgccttgcggatcagtgcgtcggttttggtgtccacggcggaggtggaatcatccaaaatcagaatcttcggcttcttcagcagggcccgggcgatacataggcgctgcttttggccgccggacacattggagccgccctgctcaatataggtgtcgtacttgtcggggaattcctggataaaggggtcggcctgggccagcttgcatacccggaccatctcctcatcggtggcgtccttcttaccccagcgcaggttctccttaatggtgccggagaacagcacgttcttctggagcaccatggccacctgctcccgcagggcgtccatgtcgtagtcccgcacatccacaccgcccaccaggatgcggccctcggtagcgtcgtacagccggggaataagctgcaccagagtggtcttggaggtgccggtgccgccgagaatgcccaccgtctcaccggacttgatgttcaggttgacgtttttcaggcactccttactgggatccttggcgtagctgaagctgacgttctcaaagactacagagccgtccttgacctcctccaccggattctccccgttgcgcaggtcgctctcctcgttgagcagctcggtaatacgctcggcggaggcgcgggccaggatgatcatgaccagcaccatggagagcatcatcaggctcatgaggatcatcatgatatagctgaacatactggtgagctgccccacatccatgctgccgcccactaccagatgggcgctcagccaggacacggtcagaatacacgcatagacgcacaactgcatgagcggcatgttgaaggcgatgagcttttccgccttggaaaagtccatatagatctcctgggagactttcccgaatttttccttctcgtgctcctcacgcacaaaggacttcaccacccggatgccaagcaggttttcctgtaccacattgttcaagtgatcataccgcttgaacacccgctcaaagatggggtgggctccggtcataataaagaacaggcccaggcccaggatggggatcaccaccaggaagaccagcgccagtctggggttgatggtaaaggtgagcacccatgcacagataagcatgatgggacagcgcacagcgatgcggatgatcatcataaaggccatctgtacgttggtcacatcggtggtcaggcgggtaatgataccgccggtggagaatttgtcgatgttggaaaaggaaaatttctgaacattccgatacatctcccggcgcagattacgggagaagccggtggccgcccgtgcggcataacggccggacagggcgcccagcagcagagccgccagggccatgaggaccacaatgccgccgtagtagaaaatacgttccatatttcccgcctcaacgccctgggtcagcagacggcctgtcatcatgggaatcaggacatcaaaggccacctcgccgatgacaaagatcggcgtcagaatcgtgtcctttttgaactcctgaatacagctcacaagtccgcgttttttcttcatgcacattcctccttggggattgattcgcttgctaactgttagcctcctcacagtctttgccgcaggtgcacccggccggaagtacagacggctccatcaggttctgcttcatttttgcgatggtcatcatgaactgctgcaactcctcagcgccgattcccttggtcagcgccgcctctacctgtgtgatgcgcgaggcaatctgctggttcagggcctccgctttcggcgttgccatcacctgcttgagcctggcgtcacgggatacggagcaccgcatcacaaatccctcctcctccaggcgcttcagcagcctggacgcggtggagcggcggatataaaacgcctcctccagatccttctgaaagatttcctgatcccgattatggcacagaaatcccagaagcatcccctgcatctcggtaaaagcatcgcactccggctggccggagagctcccagaccttgcgccggatcagattggacagcgccttgacctcgtaacccgcatggcgttcttgccgcattcagacacccccttccatgcaagctgttttacaaagtttattttagttatcttgctaacagttgtcaatgagcaacatttacaaaaagaccctccggtaaaccggagggtctttccattcagctcagcctgtccacggtgacgccgttcatcaccgcctgaaatacggctttgtccacgccgctgctggcagccgtcctgtccagcaggatgccgctgccgtccttcagaggggccgacagtgcgaaatacgacagataggccacctgggcccgcaggaaggggctacctgtcagcttggcctgctccgcagcgttgagcacaccaaactccacgctcttgcccacggcattggcccaggagaagtcaggcgacgccccgctgtccgagtagcccagcgcccgcagaagaaaggtcatgtactcccctgccgagagctgtgcatccggtccaaagtagcgctgtccaccggcgctgacgttgttgcccttggtatagcccttctcataggcataggccacatagcggtcgcaccaggcgggggtgtccgcaaaggggttggccgctgtgctgctcagcgcagccccctcctccccgatcaaacgcaggaacatgaccagtcccacgatacgggtgggagcctgctccagatcatacccggagccgtaggccgttccagtgccctggaacagccccatatgctttaatgcgtcggccagagcattatagtccagccccgctccgaaggacacggtatagaagccctctacgcccaaaaccgcagtatcagaggtgattgtcactgccgctgtggtattttcggccgctaagacgcggtgacgtgcggtcagcgcggtgccggaggccacggtctgccccaccgtaatatccaccacactgccgccggaataggacacggttccgcttccagccaggagcagcagcccggaaccggcaggcaggctgaccacgtctccccttttaaagcggaaatccgtgattgaggcggcatagctctgttctccacctgcccgggccagataaccgctgtgcctggcattcagatccgccagcacagagtcgtagacggtctttgtctgctccgcgatgcgtgtctccgcctgccgcagtacgtccggaatataagtgtcgttcaggtagccctgcgttacaaggctctcccctgttcccgtatcggcggcatatactgccgcacagcctatcaggatgaccagggcaagcaggccaacggcaagtctcttcatggtacctccgaaatcatatagctcagcgccaacaggctgtcggcaaagtggacgttctcaatcactatgtccggcgcgtccaccgtcagctcaatattggtgaaattccagattcctttcacgccggaggccaccagccgaccggcgatccggttggccacgctccggggaaccgtcagcaccccgatgctggccggatgctggcccagatactcctccaactgatccacgtggtggaccggcaccccggagagtctctgcccaaccacatccggcgccacatcaaaggcggccgaaagcgccacaccggagcgctcgaagtgaaagttttccatcagggcccggcccaagttgcccgcccccagaatgaccgcgttgtggccgcggttcatacccagaatgtcggaaatctccccccgcagattttcaatattatagccgtagccctgctggccgaacccgccgaagcaggagagatcctgccggatctgtgaggcggtcagccccatggatttgcccagcgcgttggatgaaatgcgctccacaccggccaaatagaggtcgttcaggtggcggtagtaccgtgggaggcgacgtatcaccgcactggacactttatcttttttcatagctccatcactcttcttcttgttccaaagcggtaccgcacgtaactcgcccgttccgctgcaagattcctattcagtttactcgaaagaggggccgatgtcaacgttcttttccctggaaccgccttccggtccggtgcatagagtgaggaaaaggaggaatgccaattggcctcgattggaaccattgtcacccgcgtatatacctcccgggcccagctcccggtgccgggcgctactgtagcggtgacgcagagggcgggcggcgggcggcatacgctgctggccttacgggtgacggacgaaaacggacgcaccgcgccgatccgcgtcgccacacccgagccgtctgccagtgaatccccagggacagagtcccccttcgccgtctgtgacatctgggtggaggtaccgggctatgagatgcttctggtggagaatgtccaggtctttcctaatacggaaacactacaggagctggagctgattcccctgccggagcagacctcgtcgtctacccggggggagatcgtggatattccaccccaggatctgtaaggaggtacccccatgccgaccacacctgtaacgccctatgtcccacagtacatcaccgtgcatctgggcgcccccagcgccgctgcggaaaatgtgacggtttccttcccggaatacgttaagaatgtggcctccagcgagatctatcccacctgggagccggcggctatccgtgcaaacatcctggcgattatttcgtttgccctcaaccgggtatataccgaatattaccccagccgcggctaccccttcaacatcaccgccagcacggcctacgaccagaaattcatcaaagggcgcaacatttttgagaacatcagccagatggtggatgagatcttcaattcctacatacggcgcaccggctttgtggagcccctggcagccaaattttgcaacggcaccaccaccacctgcgacggtctctcccagtggggcagccaggccatggcagagcagggcgccgactccgtcaccatcctgcgaaactattatggcgacaatatcgagatcgtgaacaatgctcctgtcatgggtatccgcagctcctaccccggaactccggtgcggctgggcgaccggggggagccggtggtgcgcatccagaccatgctcaaccgcatctcccgcgattaccccgctattccgaaggttcagccggtggacgggatcttcggagcgtccaccgagcagtcggtcatcaaattccagcagattttcagcctgacgccggacggagtcgttggaaacgccacctggtataagctggtctttctgtacgtgggcgttctggaattggcggagctggtcagcgagggtcagaccttctacaccaccttggtgcccgtcaaccgccccgataccatttccctcggcgacaccggagaaaatgtcaaggtaatacagtaccttctctctgtggtggcggagttttataataacatccccccggtggctgtggacgggattttcgggcaatccacccaaaacgcagtcctggctcttcaacagatggctggtctgtaccaagacggcgttgtaggcgaggacacctgggccgcactctaccgattttatgtcggcatagtggataccatgagccaatataccaatgtcatcccagagcagttccggccggagcttcccgagagcgaagccaccagcctgacccagtaccccggccaacccatgacactgggcagcaccgacgagagaggagaagacgccacatgattcgctcccaactccacctgattggacagcccgtacgcagcctccaaaccatgctgcgcaccatttctttcgcttaccccttcctcccccgtctcacgccggacggaattttcggcgaacgcaccctagaggccgtcatgctctttcagagggaatttttccctccggtcaccggacaggtaaaccaggccacctgggacgctatcgtttccttgtatcaccaggtggtttcccgcctcactccgctgcccacccgcagctttccaagtccagagttttccgtcgcaccgggtgaggccagcgttcatcttaacctggtgcagtccatgttctgcgggctgtctcgggtcctgaacggcgtggaaacctgtgatgtctccggggtaaacaatgccgccaccgagcacaacatcaagtggattcaacatctgaatcaccgtccggaaaccgggacgctggatcaggagagctggaataccctcagccgcctctatactatgtttgtcaccagcgcccagtcgccctggactacgcggcctgagctttttatgccctgacgcggcatatatgtgtaaggtgggtgccctgtccatagcagggcacccaccttgtctacagtttcaactacaggttacagtaccagactgggagctgcataggtgcggcccgccagctcactgttgagcatgtagaggcctttggcatcgtcgccgtagagctccatctttttgatcatatcctcggcggtcttctcctcctcgccctgctctttgacaaaccaatccaggaactgcatggtgcggaagtccttgacctcataggctgcatcgtagatcgtgtgaatcagattggtgacatactgctcatgggccaggccggccttgagcacctccagcctgccgttgggggcggcggtgggcctggcaatgccctccagcaccgggcggtggctgttgttctggagatactggaacataagcatggcgtgatcccgttcctcctgcgcctgcaccttgtaccagttggcgaagccgtccagtccctcgtcctcgaagtaggcggagaactccagatacaggtaagcggagtagaactccttattgatctgctcgttcagcagagaggcaactttttcgttcagcataataaatacactcctttctcatctggatggcataagaataccacggattttattctgttacaactgtaaattccactcagaaattcctctgcgccctaacaatggccgtaggcaacagaggacaggataccggttaaaacagtccgtcgaacagggtaatctgactcgtatccggcatggcccaggggcggccgcgccgtccctggggtcccgtttccctccatctggcgggacgaaatcaattcgccccgccatcgaggttttgcctgcggcaaaacgctcggacgctacaggcagcggacggcatgccggttaaaacagtccgtcgaacagggtaatctgactcgtatccggcatgccgtccagagcaccagcggccttgagctgctcgatgtgggtcttggagaccttgggacaggctgcggaaaactcctcgatggatataaaccgctttccctcccgctgctccatgatagaccaggccgccgtctcgcccagaccaggcacagaggtgaaggggggcagcaggcttcccttctcattgtctggcaggaagttgaccgcgtgagagcggtagagatccatgtgctcaaaggtgaacccccgcagatagaactcatagaccacctcaagggtgaccaaaatatcctcctccacgggagagggcttctccttgctctcaatctcccgcattttagccttacacacatccatcccctggcacatgaaggtggcgtcgaaggccttggcccggatggagaagaaggcggcgtagaaggccagggggcggtggaccttgaaccaggcgatgcggaaggccatcatgacataggccaccgcgtgggccttggggaacaggtacttgatcttcttgcaggagccgatgtaccagtcgggtacgccggcggccctcatctcctcctccgccccatccggcaggccccggcccttacgcaccgactccatgatcttgaaggcccgcttctccggcatgccgcaggagatgaggaagagcatgatgtcgtcgcggcagccgatggcctggccgaccgggacgccctgatccacaatcagatcccgggcgttgcccagccacacgtcggttccgtgggagaagccggacaggcgcaggaggatgtcaaactcgtggggctgggtgtccaccagcatgccgcgggtgaacttggtgttgaactccgggatggccacggcgccggttgggcccaggatggggtcgtccacgaagcccagcacctcagaggaggtgaagatgctcatggtgtcccggtcgtccagagggatcttttgcggatccaccccggtgagatcctggagcatgcggatcatggtgggatcatcgtggcccagcatgtccagcttgagcaggttggactccatggagtgatattcgaagtgagtggtaatgatgtcgctgttgggatcgtcggcggggtgctgcaccggacagaagtcgtagatctcccggttctgggggatgaccaccatgccgccggggtgctggccggtggtgcgcttgacgccggtgcagccctgggccagccggttctcctccgcccggtttaccgtccttccccgctcatccatgtacttcttgacatagccgaaggcggtcttttccgccacggtgccgatggtgcccgcccggaacacgtgggtctgcccgaacagctcaaaggtgtaccggtgggcgttggcctgatattcgccggagaagttcagatcgatgtcgggcaccttgtcgccgccgaagcccaggaaggtctcgaaggggatgttgaagccgtccttggcgtagggcgttccgcagacggggcacaccgcgtcgggcatgtccgcgccgcagccgatccccttctctttggcggtgtcgaagtccgagtgcttgcacttgggacagcggtagtggggcggcagggagttcacctccgtgatacccgacatgaaggctaccagggacgagcccacggagccacgggagcccactaggtagccgtgggccagggagtcctgcaccagcttctgggccgacatataaatgacgtcgtacttgcacttggtgatgtcgcccagctcggcattgatgcggtccaccacgattttgggcggttcctcaccgtaaagggcttttgctttcccccagaccagactggtcagctcctccgctgagttctcgatcttgggggcgaacagcccctggggcagaggcactacgtcctcacaccagtcggctaccagattggtgttgcgcaccaccacctcataggccttctccttccccaaataggcaaactcctccagcatctcggtggtggtcttgaagtagatgggcagagacgagtcggcatcttcaaagcccttggaggccagcaggacgtggcggtagatctcgtcctccgggtccaggaaatggacgtcgccggtggcgcacacaggcttgtccagcgcctcgcccagggatacgatggtgcggttgaagtccttcagctcctcctggctctgcaccatacccttgcgcagcatgaaggcattgttgcacagaggctgaatctccaggaaatcgtaccaggaggcaatgcgcttaagctccgcaaagtctttccgctttacaactgcttgaaacagctctccagcctcgcaggccgagccgataatgagtccctcccggtgctggttgatcaggctcttgggcatgatggggtagcgtttgaagtggtccaggtgagaggccgagatgagcttgtagagattgcgtaggcccagttggttcttggccagcacgattaggtgcttgggctggcggcgggccttgcccccggtacgcagcctggccatagccggattgatctgctggagggtatgtacacccctgtcccgcagcatctcaaagaaaggtaccagcatatagcccaccgtggccgcgtcgtcataggcccggtggtggttgaaggcaggcagattcaggtgctccgccacgatgtccaacttgtgcttgcccagctccggcagcaggttctgggccagaatcagcgtgtcgatggaggtgctgtcgaaggggcggcccatgcggcggcacccctcggcgatgaagcccatgtcgaactccgcattgtgggcggccagcgggcgctcccccacaaagtccagaaaggcatttatggcctccgcctgggagggggctcccctcagcatctcgtcggtaatgccggtaagctcggtgatctcgcgggtcagaggccgttcaggatcagcaaacgtggagaactgctccaccacctccccgttccgcagtaccaccgctccgatctcggtgattacatcccgccgcttgtccagaccggtagtctcaatgtcgaaacagacgatatcgcctgtaaagtcttgttccttgtccccgtgtaccaccacccggtcgtctacgtcgttaatgaagtacgcctccacgccgtaaagcaccttgatcttcttggccgagtgccaggcatcggggaatgcctgggccacgccgtggtcggtgatggcgatggcccgatggccccacgcttccgcccgcttgaccacgttcttgtccggccccgccttggggctcacttgggtgagggcatccatggaggacatggtggtgtgcaagtggagctccacccgcttctccggcgcgtcgtcggtcttcatgggcttggcgctctccatgatggcgtagggctccagcaccatgtcgccagtgaagcggtcgatgttcagcttgccctggatcaccagatgctggcccttcttcaccccgtccacaatgcccttcccctcgtcaccggggaaaaacttggacacccgcaccgagccggtatagtccgtcacatcgaagcacaccacccatgcgccccgctttttcagctcccggtgatccacggcaaacacgtctcccttgacgatgacggttcccatgtccagctccagggtgctcatggggatgctctcccgcttgatttcgtgcttgccgtagagtagctttcctctcgggccgccggaggccgcctttttctcccgcgggctggcagttttgagaccagccagagctctccggcggatctcctccgtgcggcggaaggccgccatggcatcctcctccaccggggcggccgggggcggaggaggaggggcgctggccgcaggagccggttcagccgccacaggagccgatgtgggagcagtcgcggccgccgctcccatctccagctccacccgctccacccggtaggccaaggccaggctcttctcgatctggtgccgcaggccctcctcgggcattcgagggcactccaccttggcgcggatagagcgggccgccttatcgatcaccgcccccgtgaccagatagccgcctgccagggccgccagctcttcaccgggccgccaggcggaaaacaaattcaaaaagggaatcttctgtgcctgtgacatggttgaaacgctcctgcctcctccgtcaaagttcctcaattagtgcgaaaagctcgtccaccagggcctcctggggaacctttttcacgatctctcccttgcggaagagcaggccctccccgttgccgccggcgatgcccacgtcggcggcggaggcctctccggggccgttgaccacacagcccatgaccgccacggtgatgggcttgtccacggccttaagccgctcctccacctgggtggccaggccgatgaggtcgatacgggtgcgcccgcaggtagggcaggacaccagctccggtccctccttccgcaccccggcggccttgaggatgtcccgggcggcgtatacctcctccaccggatcggcggagagagagacccgcatggtgtccccgatacccatggccagcaagccgccgatgcccaccgcggatttgagggtgcccatgcgcagggtgccggtctccgtcaccccaagatgtaaaggataatcactttcccgattcatcaggcggtaggccgccatggtggtgcgcacgctggaggacttgagggacacgcatatgtcggtaaagtcaaatttctccagcaggcggatatgtccaaaggccgactccaccagggcctccggcgtcaccccgccgtatttggccaggatgggcttctccagggagccgccgttgactccgatacggatgggaatccccttttggcggcaggcgtcggccaccgccttcacccggtcctccccgccgatgttgcccggattgatgcgcactttgtcgcacccggcggccacgcactccagggccagccggtaatcgaaatggatgtccgccaccagagggatggggctccgctcccgaatggcccccaccgcccgggcggcggccagatcgggcaccgccacccgcacaatctcgcaccccgccgccgccagacgtttgatctgctccgctgtggcggacacatcgtcggtgcgggtgttggtcatggactgaatggtgaccggagcaccccccccgatggggacgccgcccacgcgaatctgtctggtcataggacaagcctccctacaggatcaatttgtttacgtcgctgacggccaccaccaccatcagggcaatgaggcagaagaagcccgccatattgatatagcccaggtacttctggtcgatacgcctgtgggtgaagaagtggtaaatgccgcccacgagtaggaaaagaatctgcccgccgtccagagcggggatgggcagcaggttcatcaccgccagattgatggcgatcagcgccacaaagctgaaaatattgagcagagccccggccattccggcggcagccgccccctgctggcccacctcgccggccatggcgaagatgccgatggggccggccatgtcgttgaggctcaccgcgccgcggatcagatcccccagactgagccataccgttcgcacgtagtcgatggactggtaccaggcgttgcgcagggtgcccaggggcccggcctcccggagctcccccaccatgactccccgcttcaggctctgctggccgctctcgtcggtgagggtacggtagggcaggtgcagagtgcccagatcgagccgccggccgtcccggagcacctcgacggccacatcctcccccgcccggcccaggaaaagaatcgcatcgctctggaaatagatgcggtgcccgtcgatgcggtagaattcgtcgccgggcagcaggccggtctcccgaatgtcctccgcccccggcagataaccgctgaccaccggcgcggacggactccccgccacggaaaagagcaccagcaggatcaccagccccgtcacaaaattcaaaaatgctccggccaccagaatgatgaattttttccacgccggcttaccgctgaaggaccggggatcgtccgaggcctcctcctcaccctccatggagcagaaccctccgatgggcagggcccggagagagtaggtcgtctccccccttgtcctggagagcagcttagggcccataccgatggcgaactcctccacccgcacccccagggtcttggccgcgatgaagtgtccgaactcatggatggcgatgagcgcgccgaagagcaggatggtaatcaggatgaacaggatggtcatagcatcgctccttactcagtgcgtatcgggccggtgtccccgtacggcctcccgggccgcctgatccgcgtccagaatgtcccccagggagggagactgcaccgcgggaaccgcggccatggcgtaggccacctgctccgcaatgccggagaaagagagctgtccggccaggaactgccccacggcctcctcgttggccccgttgagcaccgccgtggcgctgccgccggtgtgggcggcctccagggccagggccagacaggggaacgccacatagtccggcgcatggaaggtcaggggcgggcaggacagcaggtccagcggctctgccaccgccgcaacccggccgggccaagtcagggcgtattgaatgggcaggcgcatatcgggcacgccaagctgcgccagcaccgcatgatcacagtattccaccagggaatggactatactctcccggtgaatcacaatggagattttttccgggggcatgtggtaaaggcgcatggcctcaataaattccagtcccttgttcatcatggtggccgagtccacggagatcttggcccccatattccagttgggatgggccagagcctgctctaccgtcactccggcaaggtcctcccctttccatccccagaaggggccgccggaggcggtcagaatcaggcggcgcacctctcccctgtcctggcagccctggagacactggaagatggcggagtgttccgagtccaccggcaccacttgggagccgctccatgcagccgcatcgctcaccagctccccggcgcacaccagtgtctccttgttggccaaggcgatgcgcttaccagcccggatggcggccaaagtgggacggagtcccacgatccccaccacggcggtgagcactgtgtccgccgtctccaggctggccgcctccagcaggccctccatcccctccgccacgcggatgggcgtgtcagccaggcgcaggcgcagggacgcggcggactccgggtccatcatcaccgccagctccggccggaagcggcggcactgcttctccatctgctccacgtcccggttggccgttaaggcggccacacgcatgccacaggcggcaatcacgtccagtgactgccgcccgatggagccagtggagcccagcagagaaatacagcggttttgttccatgctatgctcctcccacggcgggcaggaaccggagcaacaattcgatcaggggcgcgcagaagatcacgctgtcaaaccggtccagcacgccgccgtgtccgggaaaaatgttgccgaaatccttgattccgtactgccgcttgatataggaaaatgacaggtcgcccatctgggagatggcgctgcccagggctccgtagagggccaggtacaggtagttcacagtatagccgaaggcgaagcggagcagcacgccgtacagtaccgtgcacaccaccgtccccacaaagccgcccacggccccctccaccgtctttttaggagagagctccggcgccagcttgtgcctgccgaaagccatgcccgcaaacagtgcgaaggcatcgctgataaaggccgccaccaggggcaggatgagcaaaggctcccagtgctccatctggcgaatgcgcaggaaggaggacaggaagaaggggatcaccacagtcaggaaaaaggcgcctcccagcttctccagagacaggcgcttgtggcttgcgatggcctctgcaaagagaagcaccacatacacgaacaggccgcacagcgcgggcagaggccgcccgtcatagtagacccagaagggaatcagcccggccagtatgatggagtagccggagatgcgggtatgcttcaaaaagccggtggaccagagcacctcatgcaccgcgatcatggacagcccggcaatgaggaggcacagagcccaaggatacgcgggagaaatcaggtaaaacagcaccagcaggagcgggatgaaaataaccgccaccatgattcgcttacccactcagacacctccaaaacggcgggaacggccctggtaggccgccaacgccctatgcagctcctctttggaaaaatcgggccacagtacgtcagtaaaatagaattccgcataggcggactgccacagcaggaagttggaaatgcgcacttccccgctggggcggatcaccagatccgggtcgggtacaccattggagcagaggtattcggaaaacagcacctcggtcagctccttcggtttccgtcctcccgccgcacagtctgcggcgaaatgtcgggcggcccgaacgatctcgtcccgtcccccatagttgaagcagacgttgacctgcatcccctcataccgctcggaaatctcgctggttttccggcacatatccttgagctcctggggcagcggctccagatcaccaaaaaagtggagcttaattttgtccttctccatcttttcgatggactccagcagatactttttcagcagacccacgatggcggaaacctcctccagcgggcgcttccagttctccgtggaaaaggcgtacactgtaaggtactccagtccgatcttctgacaataggtggcgatgctgcggaaagtctctgcccccgcggcgtgccccgccgtacgaggcaggccacggcgcttggcccagcggccgtttccgtccatgatgattgccacgtggcggggcaggcggtcaaaatccacctgtgcctccccgctctctttcgtttttaagaatgacatagtttatcctacccggtcccataaaattccggtgcgggacatccaggtgtcccgcaccgtgaggtctatctgctttacaggcttagaccgccatcagctctgcctcttttttggcagtgagctcgtcgatttgcttgcagcgcttttcggtcatgtcctggagctccttctcatagtccttccggtcgtcctcggtaatctccgacttcttttccatggacttaaacttttccatggcatcccggcggatgttgcggatggccaccttaccgttttcgccgtacttcttgacctgcttcgtcagctccttgcggcgttcctccgtgagctgcggaaaggcaaggcgaattactttaccgtcattctgtggattgatgccgagatcggaggtctggatggccttttcaatggccttgagcagggtgctatcccaaggctggatcatcaggctcctggggtctggggaggagatagccgctacctggttcagaggcgtgggagcaccgtagtagtccacggtgatcttgtccagcacagcggcgttggcgcggccggcccggacgctggcgaaatcgctcatgaccacgtcaatggtcttctgcatctttgcatcgaattccttgttgacttccttcatatcacggttcctccttgacaatggttccaattttctctcccataacgacccgcaggatgttctccgggtccttcaacgcaaacagaaccaccgggatcttgttgtccatggacagggacgtggcggtggagtccatcacctgcaggtgctgggccagcacatcgtcataagtgatggtgtcatacttgaccgcagaggggtccttcttcgggtcggcgctgtagacgccgtcaatgttcttagccagcagaatggcatccgcgtcgatctccgcggcccgcagcaccgcggccgtgtcagtggagaaaaacgggttgccggtgccgcagccaaagatcacgacccggcccttctccatgtgccggatggctttggagcggatgtacggctcggccatggcgcgcatctcgatggcggtctgcacccgcacgtccacgcccttctgctccagcacgtcggccacggccagggcgttgatggtagtggccagcatacccatgtggtcggcgcgggtgcgctccatccggtcgccgccgtccttgacgccgcgccagaagttgccgccgcccaccacgatgccgatctgcacgccacaggctacgcacttcttgattacgtcgcacacactgccgatcacgtcgaagtccaggccacggctggcctctccggccagcgcctcgccgctcaatttcaaaaggacccgcttatactgcggttcactcatacgttcaacccctttatacggtattcagtcccttttattttaatatagttttccacgtttgcctaggggttaggccaaagtttttacaaattattcgtaatcggagttttgccgctcacccgttgaaggggcatcctccggccaagcctccagcttcgcccggaaagagatccgccggggcgtctccatatcgtcgaactggaccaggtgggctccccggttcaggtccacgtccagcacccggcccagcccgaacacgaaatgccgcaccctctggcccaccggaaggagcaccgcgccgtcgtccgggggcagggcgcggttgctgctctcggcgtaccccctggccgccttcagcaggccctcctggggctccggtacggggatgaatgtcccccacatgtccagcaggaaccgggaagggtagcggggtgagccgtcgaaattcgtcccgtccgcctcggacaggtacagccccttctctgcccgtgtaaccgccacaaaggccagcctccgctcctcctccattccctgacgggtgcgcaccttccgtgaggggaagatcccttcgttcatgccgcacaggaacacataggggaactccagccccttggccgcatggacggtcatcagcttcacacggtcccccacctccccggtgtcgctattggtaaagagggccacatgggccaggtagtgctccagggtacattcctcgccgcaggtggtctcatactcatagaccgcctgcttcagctcggccagattgtccagccggtcctggcttccctcggtgcggagcatcatctcgtagccgctctcgttgagtacggcggacagcacctctgaaactggccgcccctcgcattcggtggaaagcccctcgatcaacgacacaaaagaccgggcccgcgtccccttaaacaggggctcgtccaggcactcctgcagggcgcggtatagagggcagccctgctgcgccgcgtattcctccagaaaagccatccgccgcttgcccaagttgcgcttgggcgcgttgacgatgcgccgaaaggacagatcgtcccggtaggcgagcattcgcagataggaaagggcatccttgatctccatccggctgaaaaagggcacgccgctgtagatcgtatagggaatcctctcacggagcagaacgccctccaccgcccgggtgacatagtgggcccgatagagcaccgccatgtcccggtagggcacccccttctcccgcagcttggacatctcacccgccatccatccggcctccgtcaccgggttctccccgaaatggcacaggacgggcccgccggatggaagggtggggcgcagctcctttgggatacgggcggcgttttgtgcgattagggcgttggccgccgacaggatctccggtgtggagcggtagttttccgtcatcagaatggtctttgtgcccggaaactgcttgtcaaaatccagcaggtactttacgttggcccccctccaggtgtagatggtctgatccggatcacccacgatgaacagattcctgtgatagccgcagagcacctccatcagtccatactggagcccgtcaatgtcctggaactcgtcgatcatgatgtactccagccgcttctgccacttgagccggatagcctcattttcctggaagatatggagggtgaatttgatcaggtcgttgtagtccagcccaaagcactttctctcttggtagaggtagccgtaaaagatcatatccccggcctgtaccgcgtccagatacctctgcttcagagcgtccagcgacagactaagcatgtcccggtaatactcaggttccttgaacagcttgcggatttcgatcatatcccgcgccgcccggaaggtcatatcccggaggctgaggccccgctcctcatagatcatctgcagcatggcgtcaatgtctgcgttgtccagtaccagaaagctctttggataccccaccacgtggctgtcctcctggagcacggagacgcagaagccgtgaaaggtgttaatgtagcccgtgtcgtcgtccccggtcagccgatggatgcgctgacgcatctccgcggccgacttgttggtgaaggtcacgcacaggatattccccggcaggatacccagctcattgaccaggaacgcaaaccgatgggacagggcgcgggtcttgccggagcccgccccggcgatcacccgaacaaagccttcggtcgccgtgaccgcctcccgctgcgcctcattcagcccctccagcaaatcctccatgataccgcctcctgatagaacatctgttttctttattatagcaggcggggagacaccactcaagaggaaaagcggcggcccggactgcctcgccgaaccgccgcattctctcacttgagcttctttccgtcctggaaggcgttgcccaccttctcccccagcaccaggtaggcgctgttcgccatgtcgaaggtgatggggcgcagcctggccggatcaatagtgccgtccgcgttcaagatgcgctcgtctgcactgacgttgacgatctcgcccaccaacagctcactctcctcgtcaaagctaacaaaccggcactccagggccaggggcagctcgtcgaccagcggggcgtccacatgggcactcttggtcacatggaaccccgccctggccaccttgtccggcacctgattggccgacacaatgcccaggtagtcgcactccgtcacgtggtccgcatccgccatgctcaccgtgaaggccttccgggccaggatgtttttcaccgtcttgtggctggcgctcagatacatggccacccgcttcatgtcggcaattccgccccaagcggcgttcattacgtccggggtgccgtcttcgccgtaggtggcgatcatcaagacaggctgagggtacaggaagggtttggctccaaaatctttcctcatgattgttgtcctccgttttcattttataatgtagtacttagtatagcacgtcccccgcgtcaagcacaatccccctgcaccaaacagaacccgctgtcacggaaaagcgccggacactgagcgtccggcgctcgaagccaatctgcggtttacttgcccagctgcttggcgatctccccggcgaagttccgccccacccggcttgccgggcggggtgccccgattttcattcgattggggcggaatgaatccgccccaatccaaggctttgcctccggcaaaacgcttgtacgcgccatgcggcgcggcccgccggaggcgggcgcaggagaacgcgcaggcatggaaaagcgccggacactcagtgtccggcgctcgaagacaatctgtggtttacttgcccagctgcttagcgatctcttcggcgaagttctcctgcttcttctcgatgccctcgcccttctcaaagcggacggcgttcttgaaggtaatggtgccgcccagagtcttggcaacggaggcgatatactgctccacggtcatggcgttatccttcacgaactcctgctgcagcaggcagttctccttgtagaacttgcccagcttaccggcgacgatgccctccttgaccttctcgggcttggaagccatcttaggatcgttctccatctgcaccaggaggatctttttctcctcatccagggtggcctggtcaacctggctcttgtcccaaaagcgggggttcagagcggcgatctgcatggccacgtccttgcccacggtctccacctgttcggcagtcaggccagtctctaggtttaccagcacgccgatcttgccgccagcgtggacatagggcacggagatgccatcggtaaagaaagcaaagcggcggaccttgatgttctcgccgatgacgagcaccatctcctgctgctcctcctgcacggtgcggccgttgccgtaggaaagggccatcagggcatccaggtcggcgggcttgttggcggccacaacggcggccacgcccttaacgaagtccacgaacttctcgttcttgcccacgaagtcggtctctgcattgacctcgaccaccacgccgacgccgttcaccacggtggcataggccatgccctcggcggcgatgcggcccgcctttttctgagaggcggccagacccttctcgcggaggatctcaacggccttgtccatgttgccctcggcctcagtgagggccttcttgcagtccatcatacccacgccggtcatctcgcgcagggtctgtacgtcttttgcagtgattgccatgatcacattacctccatctcaaatatcaaaaggagcgcccgcccgcgcgggcgggcgctctcaacatcacggtttggggccggaattactcggcggccgcttccttctcagcggaagcctcggcagcgtcctggccctgcttgccctcctggatggcgttggccatcacgccggagatcagcttgatggcgcggatggcgtcgtcgttgccggggatgacatagtcgatctcgtcgggatcgcagttggtgtccacgatggccacgatggggatgtgcagcttgcgggcctcattgatggcattgcgctccttgcgggggtcaaccacgaacagcgcgccggggagtttcttcatctcgaccacgccgcccagatacttctccagcttggcgatctcgcccaggtgcttcatgacttccttcttgggcagcatgtcaaaggtgccgtcctcctgcatcttcttgagctggttcagacgctccacgcggccgcgcatggtcttgaagttggtgagcatgccgcccagccagcgggcgttgacatagtacatgccgacgcgctcggcctcttccttgatggcctcctgagcctgcttcttggtgccgacgaacagcagggtctggccggactcgcccagagagcggacgaagctgtaggcctcctccagcttcttcacggtcttctgcaggtcgatgatatagatgccgttgcgctcggtgtagatataggtggccatcttggggttccagcgacgggtctggtggccgaagtggacgcccgcctcgagaagctgcttcatagatacgactgccatggtaaaaattcctcctttatttgttgattcctccacccggttcatccgaagccggccaacctcccatttggaaagcacctggcccatcgtccgcgggtgtgcgtaatcacatgctttggtataatatcacatcgttccccgttttgcaaggtttttttattcccgcgcaaaaaaggggcccggatagctccgggccccttcataaagtgtatactcagtccttcttccagtaatagttgacctcgttccagtaggtttcattttgaaaatgccgagggccgaaatcaaagtggattagagtgccggtccggtcctccccttcatagattcggctgttatcccctgtaaagaccagattctgtatttccgccacatcgatgggggattccagttcgaaacggacatgatccgcccggaaaaaggttcgtcctgcatcatcgtgaaatacgtcctgaacccctcccaccttctcaaaccgggtttggatcttgcttccgtctgacatcaggacatacatctgccaagggccatcctgaccgaaggccgcgtcataggccgccccgtccgggatcaccagatccatgctgacgctgataggcgagatggtcaggttctctgccaccgccagagtcacgccgttcagattcacaccgcaccggccctggaagtcgtaatgggtacccatgccaaccagggggacgaccagatcgatgtccataccatccagcatggtgacccattccccctgatattgcatacacaaggactggatcccggaaaacagacagtatgcggcatccttcggcatcggatctatatgcccacgaatgataaactccattttgttgtctgtggggtcgctgtcctccacatagtctattgcataccccgcctcgctggagccgataaagctggtgcagctctcgtccctataggctccgaagccgattcccctgccgtccggcccgccccagaggacggcgcggttgaagccctcctccacctggtcgggctcgggcagtaccgtcccctccggcgcggcaaactccaccaggatatagaactgttcctgatccgccgccgccgccttcactgtgacggtggccccggagccgttcttgtcctcgaacacctggttcatctgtacaatccccaggttttttgcccgttcctcgctggtgatgccgaacagctcccggaaggctggggacaccccggcaagtgagacggcccccaccgctcctgtcaggagtgaagcggcggctacgatggccaccaacccgcgataggggaagcgtgggcgcttctcttcctgcccgctcctccgctccagcaggcggcaggtcagcgcctccttttcctccgccgagaagttcagccgctccaactcatcccgatagcctgccatagcccaatccctccaatacatgctttaatttcatccgggcccggctcatccgggtccgcaccgcatcggcccgcaggctcaggatctcccctatctcgttggtatcatatcctaaataatagtagagcaccagcacctcccggtacttggcaggcagacgctgcacctcttccagcacgccgccctcctccggctgaaacgccgcaggctcggccacggcatccaggcccacagtgcgggtgcgccagggactccggcggacgtttttgcaggcgttaaccgtcacccgcgccatccaggcctgttcgtgcttctcattttcaaaggcacctggatattccagccgcttaagcagcacctcctggcatacatcctgggcgtcgggcacagaattcaggatggaataggccagcctcaagagccggtcggagtaggtctccaccagccgggcagccagcgcctcctccgtatgctccgccatgaatctccctcctttttctccgtttggaacgcgttcacctgatatacacctcacggctcccaaacgtgacaccctccggcagaaaaaatgccccggttttcaccggggcggcggaacgtatctcttttttaattatcattcaactgcgcactcatggcctggtcgaagtgctggttgatctgcttggtaaactccacggcggcgttgtaccccatcttcttgtggcggttgttcatggccgccacctcgatgatcaccgccaggtttcggccaggccgcaccggcacggtgagagagggcacctgcacgtccagaatcgtggtgtagaggttctccaggcccaggcggtcgtacatggccccgtccttccactgctccaggttgatgaccatatcgatctcggcctcgtccttgacggcgctcataccgaacaggcggcacacgtcgatgacgccgatgccccgcagctcgatatagtgtcggatcagctccggcgcagtgcccaccagccggtcggtgacgttgcgcttgatctccactgcgtcgtccgcgatcagccggtggccgcgcttgaccagctcaatggcggtctcgctcttgcccacgccggactcgcccagcagcagcacgccctcgccgtacacctccaccagcacgccgtggcgggtgatgcggggagccagataggacttcagcgccgcaatgatgttgctcatgagcacgctggtggtgtccgggctgcggaggatggttcggtcgtacttctcggccatctccatacactcggggaagggctcaatctcccgggaaataatcagggccggaatgtcctgggagagcagcagttcgaagctctcccgccgctcctcggaggtcagcccctccagataggtggtctcaacgcggccgatcacctggagccgcttggcgtcaaagtagtcgaaaaatccggtgagctgcaggcccggccggttcacgtcctccgtccggatcgacacatcctcgtaccccgccccgcccctcaggacctccaggcgaaattcctgaatcagttttcccagctttacgctgtaaaggctctccattggcgctgcccccttgcggtattattagttatagtataccattctcccctgctcctttgcaacacactttggaagaaagggattttttgaaaaaaatgcttgcaattttcgaaaagctctgttattatatcattcgatgctttatcaagctatcctgacgagcgaggaggtataagcgaatggccaaatgtgaattttgcgataagggcgttgtgttcggcatccgggtgtcccactctcaccgccgctccaaccgtccttggaagcccaatgtgaagcgcgtcaaggcgattgtcaacggcacgcccaagcacgtctatgtgtgcaccagatgcctccgttcgggtaaggtcacccgcgctgtgtaagtttgtaaaaaagggaccagcctttggctggtcccttttttctttggaacgattgcgcctgtccccacatagcatggggacagaatggaggcgtattccatggctgatgctctgtgccgcctgccccgggtcctgctggatggccgccctgccgcccgtgcactgctctgtggcagcaacgcccaccccggcctgcggggcgaggcgctgttttatccctaccaggacggaaccctattgctgatacgcgccctggggctgcccggggacggcttttatgcctgccacattcacgcgctcggcgactgctgcaccgggggcgacgtggcctttcactgcgccggtccccactacgatccggaaggccgcgagcacccgaaccacgcgggagatctccccgtcctgctctccagcggcggccgggcgctctccctcgtgtataccggccggtttcagcccgggcaggtgctgggccggtcggtggtactccacgctctgcccgatgactaccgcagtcagcccaccggcgccgccgggggccgcattgcctgcggcgtcatctcccctgtggcctgagccgggcccgcatggcttgtcatgcgggcccggctttctgctctctattatctattgtatcttgttttgctatcccacggtcaccacccgcaccacggcgtccccgcccagtgcgccgctgtagtacacggtcagctccgctccgtaggatttggcggccgagagggtcgtccagcgcccggtttcttggttgtaaacctctaccccgtcgctgacgggcacccgaaggccttccaccaccacggcctcctctccgtcaaaatcagcccggctcacatcggccttcttcaggctcacaacctccacggcctttccctcggacgacaccgcgatgccacccatggttccgctcctgaccgtctttcccgtgatatatgcctggctggctccgctgctgttctccacggagacggttcggttggtataggtcatgctgccgctgcccccagtctgctccccggcggtcagcagaccgtaggtaaatgcgttcccggtcacatcgtccagcaggaggaggcagaccttcccgttttcgtctgtggcgtaaaagtcgatttgggaggcgggtacggtatccgtcagaatatcctccagggcaatttccgccaccacgctggagccggcccgctcgtagagcttcacatcctccgacagcggaaggctccccagggtgccgtccgacggatccagggcatactggctcccgccggacaccggataggccgacagggccccgatcccggtggagctgacccgaaccagctcacccacaccggcgccgtggacgctgagctcacccgccgcagtcagcccgcaggtcagctccaccccgtcctcctgaagcacgccgtagagctccgcccgcttctccgagggggcgcaggcagagatcacctctcccgccccgttcagggtgacggtaatccggtcgcccaccgcgaaggcggacagcccggccgccgccccgtccgccacctccagctccacgcccagcagcgtgatggaggcgggcgatgcggcgttggggctggcattctcataatagccggtcagcatgaccccctcataggccgccgcctcggaggccacgaccagatcgagcgccccggagtccgtataatacagcgtcacctgctcccggccctccagctcataccagcagtcgccgtaggtgctgaccgcgccgtccagcagcaccctggttccgctggagatggcatacgttccccctccggcggcggtgatgccgtccgccgccacctctgccgggcggagggtgcgatgggacgaatcgtccggcaggaagcccaccgtctttcccgcctcgtccaacagcagcgcgcctttccgccccaccaggcgatccggcaccgcctccgcaggctcataccagctaatcgtctgattggcatagacctccaccgtgcccagggtgccgtccgccgcctcggcgttattgtccagcagcactgcaccggttaccttggaggcgcagaggttgtcgatgtaatcctgtccgtcccggtctgtctgccgcagcacgcgatagagcagcagggccgcgtctccccgggtcaggccggctccgccgtctgcgggcaggccgtccagaagccccagtgccccggccttattcagatagtcctccggccagaaggggccgatctcctccgccgtatagcccagcaaacggagaaccacagtcaccgcctgtcccaccgtcaccggatcgtccgggccaaagcggccgtcgccatagccggcagccagcccctcctcacaggccagattgatatagggggcggcccagccgccgcctggcacgtcggaaaaccgggtacggtaggcgcttcccttcgcctgatccccgtgtccctccgtcagaatggccagcttacagaactgggcgcgggtcagcgcgtcgtccgggtggtagcacccgtcggagtacccggagacaatacccagtcctgagagcacctccaccgcctcggacagctcctcgccgctcacatccgaaaaggccagggcgggcgccgccgcgatcagccccaggcacagccccgccgccagcagcagcgccagaatacgttgtttcatctgtgtttctcctctcgattagtcggcgcgcagggcgtccacgggctgcaaaccggacgccttggccgccggatagataccgaacacgattccgatggcgacagagaaggcgaaggcgcccgccgtcaccagcgcgtcgggatacaggatcagatcatacatggccttccccaaaatgagcgagagcaggtaacccagggcgatgccgatgaggccgcccagagcgctcaggatggcggcctccaccaggaattgtcccacgatctcccgccggggcgcgccgatggacttcttgatgccgatttcccgggtccgctccgtgacggtgaccagcatgatgttcatgataccgattccgcccaccagcagggcgatgcccgcgatgccgcccagtaccacgctcatggaggtcatctcctccgtgctctcgctcatggcggagttgccgttctccagctcatactcccccacgctcgtgtcgatggtctcccccaggaaacgctccagcttcgccatcactgtgtccatgtggtcggactgatctaccttgacagaaaagtgggtgagctgggcggtgcccagtatggcccgatccagggagtaggggatcaccgccatgtcgtccatggagccctcctcgcccccgtccttctggtagtagatccccaccacggtgaagggctcaccgccgaagtagacggtctccccgatgggatccgcatattgaaacaggctgtccgccacgtaggagccgagcacgcacacccggctgcgccggtcgacgtcaaaggcgctgatgtcccgcccctccttcagggtgtagttcccgcagacggagaactggtcgctgcccaggtagagcgtcccgctgtccagcgtggtggtgcggtatttcatgggcaggcttgtggacagatcggggctcacccccagcaccatatcgcccagctctccattcccatagtcatagagggcgtccatcacatccacagaccggctggtgtcgtaccagttcaccgtgacgttgaccttgttgacgcccagcttctcatagtaggcggtgatgtccgcgttgtagccggacaccagcgccaccagcaccagcacggcggtcacgccgatgatgatgcccagcatcgtgaggaaggagcgcccctttttctcccggatggagtccagggccatgcgcagcgcgttcatggcgccacccgcgccggcggggcgctccagtccaccagcacgccgtcccacaggctgtcgtggacgattctcccatccttcacccgcacggtgcggtcggcctgggccgcgataccgttgtcgtgggtgatcaggatcacggtggttccctcggcgttcatctggcgcatgaggcccagcacctgctcgccggttctggagtccagcgccccggtgggctcgtcggccatgaggatgggcgagcgggcggcgatggcccgggcgatggccacccgctgctgctggccgccggagagctgggccggccggttgtccgccttggcggcgatctccaccttttccagcgcctccatggcccgcgcccgccgctccgccagcgggacccgctggtagagcatgggcagcgccacattctgccagacgttcagggacgggatgaggttatagccctggaaaatgaacgcaatctgccgggagcggatctgggacagctccctctgggtgcgctcccggatcggggtgccgtccaggagatactccccccgggtgggcacgtccaggcagcccagaatgttcatcatcgtggacttgccggagccggaggtgccgatgatggccacaaactccccctggtctatgctcagcgtgaccccatccagcgcgttgacctggttttcctgcccctcggcgtaaattttatagacgtccttcaattgaatcaggctcatacagaatcccccttctcagcccatggggccgccgccgggcatcccgccgcccatgccgccaggcattccgccgccgaaatccggcatctctccgccgctgaagtccggcatttccccgccgcccgggaagccggattgctcctcactctggccctggctggtggtatccccgccgctcggggccgtctgctgatagcgggtgaacacctccaccccctcctccacgccggagaggatgcgcacatactggctgttggacaccccggtttccaccggcacggcatagaacccgtcgggcaccacgccgtcctccagctccaccgcgttgtccggcgccgcgtccgccttgacgaaaaggcaggttccctggctggtgctcttgagggccgcgatgggggccagcaccccctcggactcgtcgcccacagtgatggaataggagacgttgacgccggcggagagggcgcccccgctgggaatggtgatggtgatggggaaataggccacgccgttggagttggtggcctcatagctgatctccgtgacggtgccggtgtaatgggtgtcgctctccgcccccgactgggtaatgtccacctccatacccatggcaatgccgtcgatgtccagctcgtcaatgttggcggtgatggtcatggagtccaggttgtagagcaccactgcggtctgccccgcctcccgggggctctccccttcccggacattgaccatgatgatcttccccgccagctcggcggtcaccgcatagtcggagcgcttttcctccgcctccgcgatcttctcctggagctggacaatcttttcctgagtctgggtgatctgcttgttcaccgactccacctgcttctggtagtcggccccgtcgagctggacgaggacggccccggcgctcacctgctcatagtccaccgccccgatgccggtcacctcgccgcccacctcggcggtgagatcctggctgcggcggtactccagctccccctccaccgacggatagagcttttcgcccgagtccgccaccagatagccggcgcccgtcattccctcggtgaaggcgcccggattgtccagggtgacggtgacggcaaagcagtgggtgccctccgccgtcacccggtccaccatctgaatgtcggtgacggtcccctcctggttgagcatgaggctggccacggacaccccggccttcatgcccacgtagacctgatcctcataggcgtagctgaaatactgggtcaggcacatctggctgtcgtccacaagggtggccagcttggttccggcggccacattgtcccccacgtccacggccacatcggtgatccggccggcaaagggggctgtcacagtgagggcggcgatctcctcctggagctgggcgagctgttcctggtaatcgtccagctggttttcctgctcggtgatctgatcctgatactcctcaatctggtcgtccagctctgaatcgtcctgggtgtagagcagatcacccacctccaccgtgtcgccggcggagacatatacgccggtgatctccgcctccgaggcggtggtgtacgtaacgctgtccgccggcatggtggttccggtgccggagagcgttgtggacaggctgccataggtggtctgctccgtcaggggcgtctgctcctccccgctgaaaaacagggcctttcccccgagggcggcaccggccgccagggccagaaccagcagcagcgccgccccgcgcctcaccgtcagccgccggccgggcttccgctcgggcggcgcactcccctccgctttcttccgcagtgccatcaactgcatgcaatcgtcctccccttctgttccggtttcggaggccagtatagggggagaaactgaaattactctgaaaagggccgcgtgagattgttaacactctgtaaatccttttgttcgccgccccgcctatcatatatttcagacagatttcagttctctcctttataatggagaaaaacgcaggaaaggacagaaggtatgcgcatcttgattgtagaggacgagcgccgcctggccgaggcgctgggccagatcatggcggagcagcgctatcaggccgacgtggtgtttgacggggcggatgggctggactacgccctcaccgggcagtacgacgccatcgtgctcgatgtgatgcttcccaaggtggacggctttgaggtggcccgccgcctgcgctgcgcccacgtctccacccccattctgatgctcaccgcccgggatgagatcccggacaagatcgcggggctggatcacggcgcggacgactatatgaccaagcccttcgacatcggggagctgctggcccgggtgcgggcgctcacccggcggcagggcgaggtgatcggcgagcagctcgccgccggggatctggtgctggacacccccacccgcagcctgcgctgcggggaaaaatccgtccggctgggcttcaaggagttcgacgtgctccgcctgctgctggccgccccccgggccgtcattcccaaggaggacatcatctccaaggtatggggcctggagtcggaggcggaggacaacaacgtggaggtctacatctcctttctgcggaaaaagctggcctatctgggttcccgggtgagcatcggcaccgtgcgcaaggtgggctatcacctggaggtgcctgcggtatgatcaagcggctgcggcggaaattcatcctgatcaacctgctgctggtgggcctggtgctggcggtggtgttcatcctctttgtgggggcgaacgtccgtcgcctggcggggcagagcgatgccgccctccggctggccctgtcctggcaggagggggaggggccgccccgctttgaaatcggcggcccgccgccggaggagcgcgagccggacggggcgcaccgcttctccctgatcccggtttttgtggtcaccgtgaaggacggggccattaccggcctcaacgacggcggccaggtggacgtttcggaggagaccgccgccgaggcggtggagcaggcccagtcctccggcgccagtcagggcgtgctcagggagcttcgcctgcgctttctggtggagcgcaggcccgacggcgagctccgcatcgcctttgccgatctgggctgggagactgcctccctgcgcaatttgtccctgctgtccctgctggtgtgggccctggccatggtgggtctctttttcgtgagccttgtcctctcctccgtggccctgcgcccggcggaacgggcgtggcagcagcagcgccagtttgtggccgacgcctcccacgagctgaaaacccccctcaccgtcattctggccaataccggcctcgtcctctcccatcccgaagacacggtggccgcccagtccaaatggctggagtacacccacgacgaggcggagcagatgaaggagctggtggacgatctgctctttctggccaagtcggatgccgcccgccagccggccgcccgggcggagacggccatgagcgaggtggcgctgggctgtctgctccccttcgagtcggtggcctttgaggcgggcgtggcgctgaagcaccggatcacccccggcctgtccctgcgcggagacgaggggcagctccgccggctggtgatgatcctcctggacaacgccgtgaagtacgccgggccgggcggcaccgtcaccttcaccctggagcgacaccaggagcggctgcggctggcggtacacaacaccggcgagcccatcccgccggagcacctgccccacctcttcgagcgtttctaccgggcggacgccgcccggaaccggagcgggggcggctacggcctggggctggccattgccaggagcattgtggagggccatcacgggcggctcaccgtcaccagcaccgccgcggccggcaccaccttcaccgccctgctcccccgccggtgacggttttgcttgtcagaacggcgcggctgttgtaaaatgggcctgttccagaagaagttggaaaggagaaaccaattcatgtccgttactgtaggaagcaagggccgcgccgcgtgcgtggtcaacgatcagaacaccgccgccgccgtgggcagcggcctgctgcccgtgttcgctactccccagatgatcgccctgatggagaacgccgccgtcgacgccacccaggcctccctggaggaggggcagggcaccgtgggcacccggctggacgtgagccacgactccgccacccccgtagggatgcaggtatgggccgaggcggaggtcaccgccgtggacggccgcaagctcacctttgccgtcaccgcctacgacgaggccggccccatcggcaagggcacccacgagcgctttatcatccagaacgacaagttcctggccaaggcccaggggaaaaagaaggggaattgatatgtccattgagacgggccgggcctacctgcgggccagaggctatgaagaccggattcaggaattcagcgtatccagcgccacggtagagctggcggcccaggcggtggggtgcgaacccgcccgcatcgccaagaccctctcctttgcggtagacgggggctgcgtgctcatcgtctgcgccggggacgccaagattgacaacaccaagttcaaggcccagttccacaccaaggccaccatgctcaccccggagcaggtgctggacttcaccggccacgccgtgggcggcgtgtgccccttcggcatcgataaccccgctgtgaccgcctacctggacgtgtccctccgccggtttgacacggtctaccccgccgcaggcaacgccgcctccgccgtccggctcagttgcggagagctggacatcctgtccaacagctccggatggattgatgtatgtaaaaactggagctgattggacactcccgcccttctgtccaatgacttttccgcccgccgggggtatactagagcataaagggggttttcttatgcgggaattttttcataatatgaagcttagctttcttctggccgcggtgctctacatcatcctcggcctaatcctgctgatctggcccggcgtcagcgccaccgtgttttgttatgccttcggcggcatcctgcttatttacggcgtggtgaccatcgtcagctttttccttcgggacagccggcagggcagcttcgtgttcgagctcttcctcggtatcgtcgctgcggccctgggcctgctgttcctgctccgcccggtcatcgtggcctccgtcctgcccgtgatcctgggcctgtttatcgtggtggacggcctggttaacctcaagcgggcgctggagctgcgccgtatgctctatgtccgctggaccgtgcccctggtgctttccgccgtatcggcggtattggggctggtgatcgtctttcagcccttcctggccgcggaggccctggtcatgctcatcggtgcggtgctcatctatgaggggctgtccgacctatggactatcttccgggtaagccagtggaccaaggagtaccgcaagcaccacccggtggatgtcgaccagatcgattttgaataaaccaataaaaagcaactcccgggcgaacgcccgggagttgctttttatattgacatttcactttaacgtttatataataatagacactaaaacaaaatgtttgttgtgtggtggttgtcatggaagaacaggaattattatggtcgtcctcccagcaggagttggtacggggtatcgccctgcgggatggacagtaccgctgcctcctctgcggggccgtcttcccccagggggaggtctttccccgcgggggccgcttctatgatgccgaggccatggcagccctccatctccgggaggcccatggctccgtgctggagtatctgctccaccggaaccccggtctgctggggctgtccgaggttcagttggagctgctccgcatgctcgcggagggctgcacggataaggaaatcgctgcgcagaagagggtttccccctccaccgtgcgcaatcatcgcttcaagctccgggaaaaggagcggcaggcccgactctttttggccctgatggagctgctgcgtaccagccgcatctccagcccggtggataccggcttttgccacccccatcccactgcgtccatggttgatgcgcgctacgccgttactgaggaggagcggcaggccatcctggccgcctgtttcgacgaagccggcgccctgcgccagtggcctgcccgtgaaaagcgcaagttggtcgtactcagcgccatcgccgagcagttcaagcccggccgacagtatacggagaaggaggtcaaccggctgctgggccggatctatgaggactttccctacctccgccgcctgttgatcgaatacggctttctggagcgcaccgcctccggctccgcctactggcgcaaggagtaggcggtgggccgggctgtcggcggccgggccgccgccctcctgctggccggacggacggtctcccggttcggctcctccttttatctggtcgccctgcctctctatgtgctcgagcgcaccgggagtctgggggcgtccggccttttcttcaccctgaccagccttccgcccctgctggccgttcccttcctggggccgcttgtggagcgcacccaccggaaaggattgctgatcctctgtgattttggtgccagcgcgctctgtgcccttctcctgcttttccccggccccccgctccccttcctccttgcgggcaccatgctttttcacctgctgtcccatttgttcgaaattgcatccaaggttctcttttcggagctgtgtccaccggagcgtctctcctccctcaatggaatcaaaagcctgctggatcacggcgcggcggtactggcccctgcggcgggcgcgcttttgtttggactgtgtggattccgggccatcctcctgctgtgcgcgctggcctacggcctctccgccctccaggagtgcttcattccctacgcgccgcgccccatccagcaggcggaaccgccccgcctgcgggccggtattcgatatctgctgggccgacgggaattgttctccctctttcttctggtgatggccctcaacttttttgtagccaacagcgaggagatcatcttccccggcattctggtggagctgtaccagtttccagagtcccgatacggcctggcggtctccgcctccaccgccggaaccctgctggccagcctgttcctgatccgggcggcccacctccgccccctggaacacctgcgcgccctgtttctggtcaacagcgccctgatggccgcccttggtctggccgcgccccttctgcgttccgctccaaagctttactttgtcctcttcttcaccttccagcttttgatcggctggctcaccgcctgcatcaatgtcccgctgatctcctatttccaaacccgggtaccgctggaacagcaggggcggttctttgccctgctcgccttcttctccgggatactgatccccctgggcatctcctataccggagtcctggccgactggctgggtccaggcgcggcctatgcctgcaacaatctctgtgtcattgttctggtacttctggtaaggcttccggactgaagcggacaaagcccgcgggatataaaatcccgcgggctttgttcgttgtctcttattcccagttctgaaactggccgtccagcaccgcgcggcggtggaagatgacgaagtcgggggcggcatcggggcagtgctcccggatggccgccaccaccagctccgggttgaggccgggattctgggcccggagcaccaggtccagggcgatggtgtcccgccgctcctccacggttgccctagcgatcaggggaatgaggtccacctcggtaaagccgctcttggccttcttgctccttttggtcatcaccaggcagtcccgggccagcaaatcccggatggcgctctccgcgccgaagggggcccccgcctcatactccagggtgacgatatagttgacgtagcacagctccttcaccggccgcaccgcctcatagcaacgctggatggtgatgcccgcgggcagggcggcgttcatcttcgccggcacctgatccagcggggtgtccagcacctggcactccagtacctcgcacccgctggagaagcccaccgacaggggcagagggatggagacaaaggcgtggggattgaagccctcggtgtgcttgatggcgatccccgcccggaggaaggagcgctggaaggtgcgcatcagatccagatgggagataaacttggcggtgtccgccttgctgaacgctaatctatgcttcggcatcgcatttccctcccggatagagcttgtccgccccgcagccggtacactgtacccggcagtcgggggtgatcaccgcctgataggcccgctcccgctcccgccacaggaagggcgtggtcacgccggtggaggtgactgaccaaggcagcacctcgtccttttcccgcacccggttggcatagaaggcggggtccaggccgcaggcgtcaaaggccgccatccagcggtcaaagtcaaaatactcgctccaggcgtcgaacttggcgccctggcgccaggcctcctcaatcacgtcggccacctggcggtccccccgtgagaacactgcctccaggaaactggtgtccggatcgtgccagttgtagcggatggaacgaccccgcatgttgtcccgcagcagcttgacccgccgccggtactcctccatgctcacctgggcctcccactggaaggcggtgtggggcttgggtacaaagcaggcggtggacacggtgatggtcaccccccgcttggggttgggggtgcactccttccacgccttgtataccttctcggccagctcggcgatgcccagcacatcctcgtcggtctcggtgggcaggcccagcatgaaatagagcttcacgctgctccacccgccggagaaggcggtgcggcaggagcggaggatctcctcctccgtcacattcttgttgatggcgtcccgcaggcgctgggtgcccgcctccggggcaaaggtcagccccgacttgcgcacatgctgcacccgctccatcaggcccagggagaagttgtccgcccgcagggagggcagggacagggagaccttgttgggctcacaccactccagcaggccgtcgcacagcccctccaatgcccggtagtcgctggtggacaggctggagagggtcatctcctggtagccggagtcccggcacgcctcgatgccctgctggaccagccgctggggattgcgggggcgcaccggccggtaggcgtagcccgcctgacagaagcggcagccccggatgcagccgcggaacacctccagcatcacccggtcgtggacgatctcggtggagggtacaatggtcttaaccgggaaatagctcttgtcaaagtcctggacgatgcgcttggtcaccctggccggagccccctccagcggggtgacggcggccaccgtgccgtcgccgtgatagctcacctcgtaaagagagggcacatagacgccaggaatccgggccgcggcggtgaggaactcctccttaccccagccctcctcccgggcctggcggtagagctggataatctccacactcacgtcctccccttcccccaggacgaacagatccacaaagggggccaggggctctggattaaaggcgcaggttccccccgccaccacgatgggagacagctctgtccgctccccgctgcgcaggggaaggccagccagatccagcatgttgagcacattggtataggccatctcatagcccagggagaagccaatcaggtcgaaatcggcgatggaatcgccgctctccaggccgtacaggggaatcccctcccggcgcatctcctcctccatgtcgccccagggggcaaacacgcgctcacaccacaccccatccatctcgttcattagcccgtaaaggatacgcacgcccagattggacatgccgatctcataggtgtccgggaagcagagcgcgtagcgcacatccaccgcgcgccggtccttaaccactgcgttatactcccctcccgtataccgggcgggcttctgaacccgtgggaggatgtgttccaaagtacgattcatgccgaaccctctccatgtatctcgaaatcaatagaaaatgcagtaaattgtattatactatgtcttttcccgccttgcaacccccattcaaaaggaattgcattccatctttccgtctacccggccagaagggcagcgcataggcacaggagaaccaatgcagccccgttggccgcagtgaacagcagcagatagcgccccggcctggcccccggcgtacgcaggtagaccttaagcgagatgaggctggccagcgaggcaatgggggtccccaacccgcccaggttggagcccaccagaaggccgcgccagtccgctgtaaatccggacaggagcactgctgccggaacgttgctgatgatctggctggtcaggccggtggtcagcgccgtgtggccttccatcaaggaggccagggcggcatgtaccgggccgcaggccccgatgtttccggcaaacaggaagaagcagaaaaaggtagcaagcaggccatagtccaccctgcgaaacaatccccggtcaaagagcagcagaccgcccgccactacggccaacagcgccggatagggcagcacccggaataccgacagcaggcagagcacaaacaggcctgccatcagccccagacggcccggccttcgaagctccgcctgttcctgaaaccggacctgaattccctcatcccggacacacaggagggatgcggccgtcagcacagccaggctgaccagggtcagcggaagcatggtcccaaaaaactgttccgccgtcaattcgtagtcggcataaagatagagattctgcggattacccaccggggtagccatgctcccaaggttggcggccatggtctggagcaccacaaggggggccaggtattccgtccgtccgatcagccccagcaccagaaccgcaaatggaacaaaggtgatgagcgccacatcgttggtcaccaccatggacacaaagaaaggtagcagcactagggcaaggctgaccaggcgcatccgccgctcccccgccagcaaccgctgggccagcactgcaaaaacaccgcactcctgcagtcccgccaccaccgccatcaggcagaacagaagggtgagtacccgccagtcaatatagttcagataggccggcgagggcggattgagaagcgtggaaactgccgcgcaaaccgccgcgatacagagtaccggctccttccgcagcagggccagccacctccccctcttctcctgaaccatccattcatccccttccaagtgcaaagaaaaagccaccccggcgggtggcctttctctcatgttcgacagccgaatgccatacattagtttactcgcttcccgctctgtggtcaagagcaaagcggcccgccgccccgctctttcacgagtgccggaagtcctccaccacgtcggccagatgtaccggtgacaatcccgcgctgttgcagcattcggccagccggtttacctcctggaagtccgtggatatccgtcccacgcaaatgccattcgtcccccgaattccgtacatctgcgggtgggaggccacatccaggaatacacaatacgtcttgtggttgtttctcatgtaagctctctcctcattcctaatacttttcggtgataaacgactgaattcgaccaggttctctcctttgccgtggtatactaaccgttgcccctttcaaggtcagtgtttttcgaccatccccctatcttgtatttccttccgtgctaatccctatattatgtatttcgagaggaatgtcaatacaatccggttattttgaccggttcaccggatttttttaccacatccggttaactcatgttcgtacaggaggggtgttccatgtccatgaccgaaaaactggcctacatcaagaagctgcgccacttgaccacggaggagatcgcacagcagtcaggcgttccgctggggactctgaacaaaatcttttccggtcaaaccaaaaatccagccgtcgggcctgtggacaagatcactcaggtcctgcgcattcccatacactaccttttagatgacgagcttccgattgaataccatgtcagcacctccacggacgatgggattttactgctctcctcagaggaaattcaatttctcatgaaataccgggatctggagcctcacagcaagcgggcggtggataccatgaccgaacttctcaatatgccgcctggccggttggcaggaaatctgccggtcaagcggaccttttgctatgtaaccgctcctcccggggactccaacccattgggtgactccttttttctgcggcctgtactgatccccgagacagatgccgccgcccgtgaggcagactttgccgttctgctcaccaacggcagtatggagccgctctactccgccggaaccattctgctctgcaaaagggagcatgcctcccgccaggaatatggcctgtttcttctcaatcaggaggcgttcattcgccgcctgtactataaacggggcatcaccaaactggtcgcccctaatctgaacttcaaagacattatcatccatgagaacgactctctgaagtgtatcggtactatcactggcatcgcacacggatgccggtgggaatagccgggtccacagcccgattcgggctgtggacccgttctgtttacgcccattttctgagcccgtctctcaaaatttacattttaactcttgacactttcgctgcgtcggctactatatggaaggaggaagctatggactttacataaggggatgtcgtgcgatgaataagaaaaagtggatcaaacgcctgctgatcaccttggccgttctgctctgcggctttgccatttttgaaatcatcgtccatgtgctgatggactctgagatgagcagccgggacgattggaacatccagttgggagagcgtatgtataccagtgaggagcggggcgtttccctctactccgccccctgcgaggccagcattcccgtctcccggatggtgccggatgagtatgaggaggacggcttcacctactacgacgagtcggttcagcaccggctggggcaggagctgatggaactggtacagcaacaggggaacgccgccatcgacgcgccgctggccctcctaaatccttttggaaccgggagcaacgggctcctcctcgccttccagacggaccggaaaagcgaaatccgctataccatccacaccaccagcgcagagctgcctgactataccgccacagcgcagggcttgggggacaagcagttcagcaggaagcactgcttcctgctggtgggtctcgtcccgggcgagacccaggaggtgacactggaggccataggcgagtggggcaaggtacaggagcgcgccaccttcaccattaagatgcccccctccagctccggctatgacagccggcttacatacaccgacggggacagcgccgccgcactgagcaacggcctcttctacgccaccggactgggcgattattacggctacaccttcttctttgataactccggtgtgctgcgctatgagatggtactggagggcttccactccgaccgtttcctctacaccgacatgggactctacacctgcgtcagcagccgaaaaatcgcgctgctgacccccattggtcaggctatccgcatctatgacctgggccagtatgagctgcaccacgacatcaactgggggccggacggcaccattctggccctggtcaacgacacggaacaagacaccgtgatggatgtggttgtcgagttggaccccgaaaccggcgctgttaccgagctcgtggatttctccacgctgatggacggctattacggcgccatgacccatcccgttcccctcaccggctcctccttctggcaggccggcgaggacgactggctccacctcaactccgttcaatacaggcaggcggacgacagcatcctggtcagctcccgggagacctccaccattgtgcaggtatccggcgtccacagcacaccaaccctcaccgccctgatcggcgatcccgcgttctgggcggggacggagtatgagtcgctctcctatcagccccaaggggattttgtcccccagtacggccagcatgacgtggagctggtggaggatgacagcctgccggagggacaataccttctgcgcatgtacgacaacaactattggagtctgagcacccgggacgactacgagcctgagctgcccgacagtgttggaaccagcctcacaggtgggtctggaatccactcctatgtgacctattatctggtggactccaacgccaaaaccttctctctggccaagcagtttcccgtcacctattccagcatcgtttcaaacgcccagtcctttgacggcaattatgtggtcaacagcggtgtggcccatgaattcggcgagtatgacagcgaaggcaacctgatccgcgccttctcctacgactgtatgatgaatggctaccgtgtcatgaagggtgactttgagggcttttggttccgggaggcgtcataaacaggcaacagacaagggagcgccgcagattattctgcggcgctccccgttttttgctcatccatcatctggtgcaggcaggccagcgcgtcggacaggccgccgatttcgtcaatcagtcccaggcgcacggcctcctccccgtagatcacgctgccgacatccgcggccagctccccggtttggagcatcagccgggtgaagtcctcccgttttacacggctgttccgggtgacaaactgaataatccgctcctggatgcgcgcaaagtagttgaaggtctgggataccgcgatcaccaggccgttcagccgcaccgggtggatggtcatggccgccgacggggcgataaaggacctcttggccgacaccgccagaggcacgccgatggaatgcccgccccccagcaccagggagacggtgggcttggacatggaggcgatcagctcggcgatacccaggcccgcctcgatgtcgccccccacggtgttgagcagcaccaacaggccgtccacctcgtcgctctcctcaatggccgccagcaggggcatgacgtgctcatatttggtggtcttggccgaggagggcagaacctggtggccctcgatctgtcctacaatggtcagggtgtggatggtcccccgctccgtccggatggtggaggagcccatatccacgatctgctgctggcgctggtcgccgccctcctcgcttccggtctccgcagtctgcttcgtctcatccatgcccataccctcccaaaatgtcgtttggattcagtatgagccggcgggggcaattttatgcaaccgccgcagcgcgccttactccggaagccggtccagccagcaccccggcccagcggtgccgtcctggttcatcggcagatagcgctggccgatcgcgatacctgttacctccctcggatcgatagctctcgggaaataccatacgatatcctcaccccagcggcccttgtttccaggagcgtaataggtcagggtgtcctcctccgtgaaaaagactgtcctgcggtcgcagtttccgttatatgggatcaccatggtactgccgtccgtcaaatagacggtaagtggaaacccattgcaggtggggtagtccggatcttcaaattgagcgtgtgtcttcaggctggtagccgtcagggtgatctcccgtatcacctgcctgtttagcttctcctccagctcaatcgtgcgctcctgcagcagctccagcgggaagctcagggtccactccccctcaatgggctgccccatggtcagctcgccccatatgtggtcaatgcggaactggccgaaatgctccgccgtcagcgtacggaaccggatatcgtagtacgatattccttcccactggaatgtggtgtggatctccccaatggcgcccacctcccactccacctgcggcatacccgtctgcaggtagccgtattccccgccgacgccgtccgccagccggagttgaatgtgaaaggccccgtcctggtcaaaccccatggaggacaggctgcacagctccgtgcccaattccgccggcgtctggccggggaccagcactgttctggtttcctcccgtctctctcccgatatgtacttctctgtcgctacggtcagggtatccagccgctctccagtcagaagttcccacggaagaggtgcgaaaaatggctccactgcggggagaacgcgggagaattctactgtatacacatcccccgtctgcatctggcacggagcgatatcgtccagcgcgagggcaaacagtaccgtatcggcttccgcgtcgtaggcaatacagggatcgcggtaggattccagggcagcactttcgtgcagccgctcccccaccagatcctccgcctccaggtatgcagtgcccccattcttatccgccaaaacccgcactacccgcagctcgatgccctggtccgtagccgacaccccctctacctcctgagcgtagggttcaaagctgccgaggaattggatcagcgtttcccgtagagggggtgagactgcgacggcggtcacggccagagcggcgcagatagccgccgccataaggccggtacgcagcggacggcggcggttttctctctccgtcatgcgccccgccgcggccaaaattgcctcccaccgctccgtactcaggtgaagctccgagagcgccgtctccagctcggcgtgcatgctctgcttattcctgctcatagtaccaccccttcagacgttctctcagcagtccacgggcccgtgagagccgtaccgtcacggtggagaccggaacgtgcagcctctgggcgatctcccaggccttccactcctggtaatagtaaaggatgatcacttcccggtattttggcgggagggcctgtatggcccgtaccagggtgtcgtccggcggttccggtccctccatacgcaggctgtccaggctctcctgcggtgcccgcagaagcctccacgggctcctgagctggcgcttacacacattgatagcgatacgcaccagccacgtctccacggcacagtctcctcgaaaccccggccaagccctcagcgcacgaaggaaggtgtcctgcaccgcgtcctccgcttggctccggtctcccagatagagcgtgcacagccgcaggaggtggtcgccgtgttcctccaacaggccggccagatccatggattccctgcgcaccgaggtcaaaggcttttccatatccccgccccccttcttctttcctgtctattagaccatgttcctccctcctttgctacaaaaacttttcctactcttcatccgtactagaaccggacggcaacaggctggcatgcaggattgcgagcagttgcgccgtacacggcttttgggagagttcccggcgggccagatcctccaaaagcggccggtttgaattccaaatcacacggcccacagtgcggatattccgttccactgccttccagttcgttccgtattgctttgctacgtccgggtagagccattttgtcaccagcagcagacgttccggctcctctgcacagagctggagcgcccgtaccagataagaaaagccggtatagttggccgttgcgcccagccgatgcagcagatgatatgcgtcctccgaatgaattttcatactgtccctcccccatcaggcgtgtggcgatgcctctccatcgcagagcgcccgcgattcttcccgagatttctgtcctccttcggagagctgcagaagtgtggagagctccattcccagtatggccgccacccgatccagggcgcgaagcgtagggtttgcacggccgtgctcgatcctgcgcagataagtcacgctcatctccgcctccaacgccagtttttcctgtgtcagcccctttctttcgcgcattacaacaacagttctaccgatttctacaaagttcaacataaaatccctcctgtttccatagcataggagagatcaccagatttgaccagattatatagtatcggtttctctttttttagttttaactttctttttgccgtaaagcaagcgcacctgcggccatcccgcaggtgcgcttgcttcctatgcaaatttacttctcgtagaatgccttgattcccttgtaggtcatatagcagtccagcttacccactgtctcgaagggggcgtgcatgctcagcacgggcacacctgcgtcgatggtgtcgatgtcgcgctcggccatatagcaggccacagtgccgccgccgccggcgtccaccttgcccagctcggccatctgccacaccacgccggcctcgtccagcaccctgcggatataggccaccacctcggcagaggcatcggaggcacccgacttaccgcgggaaccggtgtacttgcacaggccgatgccgtagttcacccgggcgctgttgcgcttctcatagacctcggcgaagttggggtcgtaggccgcggtcacgtcggtggacaggcagaaggacttctcgtagcaggtcttcagcggcacccgttgggcgtcgcacaggtcgctgacaaaggtatcaaaggctgcggatttcatgccgctgacgccggccgagccgatctcctccttgtccgccagcatgcagatggcggtcttaccaggggtgcccagggtcaggagggccgccagacatgcaaagccgcacacccggtcgtcgtggccgtaggcgccgatcagggagcggtcgaagccgatgtcggcggccttgaaggcgggcaccacctccagctcggcggagatgaaatcctcctccacgatgtggtacttctggttcaggtagtccatgacggccagctttacccggtcggagccctcgtcgtccttaaaggggcggctgccgataagcaggttcaggctttcgccggggatggcctcgcccaggggcttcttggactgctccacgcccaggtggggtagcaggtcatcaatggtgaactgggggtcctccggcgcgccgccgatggacacggccacggtggagccgtccttcagggccaccacgccccggagctccagggggatggtcacccactggtatttgcggatgccgccgtaatagtgggtcttgaaaaaggccagctccgcgtcctcatagagagggttgggcttgagatctagccggggggagtcgatatgggccgcgccgatgttgacgccctcgctgaggggtctggtgcccaccacggccagcatcaaggccttgccccggttgatccggtacagcttgtcgccaggattgaccgccatgccgcgggtaaagggcttgaagcccttagcctccgccaggcgcaccgcctcggtcacgcactcccgctccgtcttgcctgcgtccaaaaacttcttgtagtcctcacaataggacttcatatccgcctcatcctgggcgctcaggcggtcgtagccgttcttgggctggtagagcagcgcctcgcgccgcagctctcccgccgtcttctgcttctcttccatttgaattcctccttcgtctagttccgattgctcagtatctgctcaaacagttgcttggcacgggcctgaaaggcctccggcgtgtcatccgcccggttttccaggagataatcgcagtgggtgcggaaaaagccgtccccctgctgggactccacccgcttccgggcgtagtcctccgaaatcccctcccgggccatgatccgccggatgcgcagttccctgggggccagtatgcccactatcgcgccacaggtctcccccaggccgctctcaatgagggcgatggcgtcgatggccacggcgctccgcccctgctcctccgccccggcggcctgccggtcgatctcggccaggatgaagcggtgggtgatggcgttcagatcggccagggccgccggatcgccgaataccaccccgcccagggccttgcggttgacacggccctccccgtccagaatggaagggccaaaccgggcggtcagctccgcccgcagaggggcgctggactccagcaaggcgtggtacaccgcgtccgcgtcgatgatatgggcgtccagctccgccagggcctggagcgcggtggtcttccccgccccggtggggccggtgatgccgatgcgtttcatggatggcctcgcctccgtggttcagtatagcatatctcgttccgggtttgttatgtatttgtaaatttccaccgcaggagaggcttcactccgcccgcacgatgtggaagccggcggccttgttcagccggttggccaccgccaggccgatgccggcggcggcggggcactgggcccagatgcgggacacgccggtgccgtcgaaccagcgcagggcctcaaagacccggcgggcctgctccggcacgtcggtgctgggccccagctgctccagcgggtggccggcaaacagcccggcgtattcgtcgaagcagattaccccgtcgccgggggccatgtgtgcctggatgtagcgggccgccgccgccggggccccctgcaccacggtcaccggggccttgggggcgtagtggcggtacttcatgccgggagcccggggctgctcccccgcgcccatgagccgggtcaccgcaggatcaaccgccacctcacccagcgcgtcccggagctgttccagggtgacgccgccggggcgcagaagccgtgggggcattaccgtcagatccacgatggtggactccacccccaccgcgcagggtcccccgtccacgatgccgtcaatttttccgtccatatcctccagcatgtccgccatgttggtggggctgggccggccggaggtattgcccgacggggcggccaccggcacgtcggcggccgccagaatggcccggcaaaccgggtgggccggacagcgcatccccacggtgtccagcccggcggtcaccacgtcgggcaccacgcgtttccgccggagcaccatggtcagcggccccggccagaagcgctccgccagggcgtaggccgtgtccggaatgtccccgcagtagcgttccagccagtccgccgaggggatgtgcagaatcagcgggttgtcctggggccgccccttggccgcgaagatgcggcccacggcgtctggattcaggccgttggcccccaggccgtacaccgtctccgtggggatgcccagcaggccgccccggcggagaatctccgccgcctcggccgtgtcccgcggctgtagtctttgtgtgtgcaatgtgctcaccttcccgatggttcagcttctcccgatggaactgccgatgtgcttttccttccgccactggggcgggggcccatcgtccgcccagtactcatctaagcgggtgatcctgccccccgcgaaacggaaaaaagacaccgcatgaaaacgggcgctcctgtccttcggccacaccgctgcgaccgaaacacaaccgtcctccgtccattccgcacgctccaccgcgccctcccagtcccctgggtactcacagttggcccgaatgtattcctccgccgtgaagcgctcgtccgtgcagtgccaatacacctctgcttccggcgcgaaccactcccgcagggctgcggcatcctgccgcgccacgtccgcccaaaagcgggacagacgctcccacagcgcggcatcttccctgctcaaaaacgaactccccttccatgccgaacccgggcactccgtcgtgcgcttccctccacgatggtcagcacgcccgcggccagcagggccgcgccagagacaatctgtaaaatgccgatggcttttttcataaaaataccctcccctgcttattcgtagatgcccaccggcgtcccggccagctcgatggtggtgtccggggcgaaccgggccttttgcagataacccttcacggtgagaataccgtacttggggttcaccttctcgtcctccagctccagctccagatagtccgcccctgagccggtcagccagccgtcgtcctccagcagctccgccaggtcggacttcaccatatccagggtcagcttctccggcagggcggtaaagtgaatgatcaattccacgctttcttactccttttctcagccttgtgcgctgttttttggccgtccccgccttagccgtcctgctcccgagccctcagccgctccgcctggtcggcggtcaccagcgcgtcgataatctcatccagatcgccgtccatgacgctctccagccggtacagggtcagcccgatacggtggtcggtcagccgcccctgggggaagttgtaggtgcggatacgctcgttgcgcatgccggtgcccacctggctgcggcgctccgccgtcaccgcctcctcctgctcccgcaccttctcctcgtacagacgggagcgcaggatctgcatggcccggtcccggttctggaactggctgcgctcctgctggcactccaccaccgtgccggtgggcttgtggatgagccgcacagcggaggaggtcttgttgatgtgctggccgcccgcaccggaggagcggaaaacctgcatctcgatgtccgccgggttgagctcgaagtccacctcgtccacctcgggcagcaccgccacggtggcggtggatgtgtggatacgcccacccgactcggtctcaggtacccgctgcacccggtggacgccgctctcgaatttcagacgggaccaggctccgtctccctcaattgtaaagcagatttccttcacgccacccagttccgtctcgttgaccgagtccacctccacgcgccagcggcgggcatcggcgtacatggagtacatgcggaacagggagtgggcgaacagagccgcctcctccccgcccactccggcgcggatctccacgatgacattcttgtcgtcgttggggtcccggggcaggagcagcaccttgatctcctcctccagccgggccagctcctccctggcctgctggtactcctcctgggccagctccttcatatccgggtcgcccatcagggcctcggcatcctccagatcctgccggcggcgctggtaggcccggtaggccatgaccaccggctccagctcccgctgctccttgttgagcctggccaccagcgcggggtcttcataggtctccggcgcgctcaggcgggcctccacatcggcatagtggagatccagggcgcgcagcttttccatcatttccaagtcatatcacctgtcaaacaaaaaggactttaccagtgcaaagggttcccgaatatacatcttcagccgggacggcacatgggtgcagggggccgccagggtggacagctctcccgctccgccggaggcgcgctcccacagcatacgcgcccgggtgaggtggaagccgctggacaccagcaccacgccggcactcgtgtccgcccccttctcctccagcagcgccagggtataccggacattctgccaggtgttgtgggactggtcctcctgccagatgcgttccggctccacgccgtattccaccagatagtcgtacatggcctgcgcctcggtagtgggttcgtcggggccctggccgccggagaccaccacctggacgtccgggtgctcctccaggtaatccagcgccttgtccagccggtcctggagcagaatggacggcccccagggcttcacctggcagcccaggatgaccatgagcctgggctcgccctgtatgtggtcataggcaccatacatcaccgcgccgaatagggcgccgaaagccagcgcccccgccagcagcagggccagcacggccttccgccacaggggccaccgcttcccctcatagggacggtagcagctcttccttctccggttcaccctcgggcctcctccaactcggccgccagcgtctcccacttcgtgtaaagcgcggcgatctcctcctccagggccttctgctcgtcatagaccttctgcagctccagatagttggaggccacctcctcggccttgagggtcagctcgtattgccgctcctccgccttggccaccgcccgctccgccgcggccacctgcttctccagctctttggtgccgccgggacggcggggcttttcctttttcggcttctccggttccgccttgacgaggaccgcggcctggagccgtttccgctcctgggcggcccggtactcctcaaaggtcccccggaaatcaatgatctgtccgttctccagcatccagatacgggtggcaaagcggttgatgaagtagcggtcgtgggagacaaagagcagattgccctcgtagctctccaccgcctcctcaatccactcccggctggccacgtccaagtggttggtgggctcgtccaggatcagcagattgatcttctcgtccatgagcatacacaggcgcaggcggctctgctccccgccggagagggcggacacgggcttgaacacgtcctccccccggaagttgaaggccgccagccgattgcgggccgtctgggtggagcagtcctggtcgtagatcatggtgtccaccagattgcgctccgggtgggagaagcggatgatctgaggcaggtaccccacctttacagtcggtcccatgcgcagctttccggagtccggctcctcttcccccagcaaaatcttcagcagggtggacttgccggtgccgttgtcgcccagcagggcaatgcgctcgccgccgatgacctccaggttcacgtggtcaaagagagtgcgcccgtcaaaggacttcttcagctccttgatggtgagcacctcgtccccccggaactcgctctccccgaattttatgtctaagcgccgctccttggtgggcttgtcggtggtgcggatgcgctccatgcgcttttcgatggaaaaggcccgcttgtgcagcttgtcgttgcccataaaagcccacaggtgcagcttgtccgccgcctcttggagctgctcaagcttggcctgctccttctcgtactgcttgagcttctcctcgtagcgccgctccttctcctccacataaaagctgtagttgcccgcgtaaaactccgccttgccatcgtggatctcgatgacccggcgtaccacccggtccaggaaccagcggtcgtgggagatggccagcacggtgcccttgtaacggtccagatactcctccagccattcggtggcccggagatccaggtggttggtgggctcgtccagcaggaggatgtcggtatcctccagaatcaggcgggccaggttgacccgggtcttctccccgccggagagggaggaaaaaagctgcccccgcatatcctgggaaatctccaggccattgcacaccttattcagctccgtttgggtatcgtagccgccccccgcctcaaaagcggcggtgagggcgtcgtaccgcctgagcagggcggggtctgtgtcggcgcccatctgctcggcgaggcgggccatctcggcctccatggcgtgaagccggtcaaaggccgtctgaagcacatcctccacggtgtaggcgggcgggtaaaccgggatctgtgagatgaggcccacccctttgccgggggccacatgcacttcgccctcatcccagtccagctccccagtgaggactttgaacagtgtggtcttgccggcgccgtttttgcccagcaggcccacccgctccccctggtctacctgaaaggtcaggccgtccagtatctttttgcctacctcgaactccttggacaggttcgagatggagatatcaatcatttgtttactcctgttgtccgttgtgatatagtgaaagacgaaatcaaggaatggaggttttccctatggacgccatccgatgggaaggaaataccctttacctgctcgaccagaccaagctccccgtgaccgaagtgtggctcccctataccgattaccggccagtggccgatgccatccgcaccatggtggtgcggggcgcccccgccatcggtgtggccgccgcctatgcctactgcctggccgccctggccggtgaggggctggacgaggccaaggagacactggccgccagccggcccacagcggtcaacctgttctgggccctggagcgcatggaacgcaaggcaaaggagtgcggcggcgcggcagaaccgctgatcgccgaggccaaggccatccacgccgaggacgtggccatgtgccgggccatgggggcccacggggcggcggtggtgccggagcacgcccgcatcctcacccactgcaacgccggggccctggccaccggcggctacggcacggcactgggtgtcatccgcgcggcccatgaagctggtaaagtaaatatggtttactgtgatgagacccgaccgctcctccagggagcccgcctgacggcctacgagctggtatccgaccacatccccgccaccctgatcgcggacaacatggccgccagcctgatggccaaggggaagattgacctggctgtagtggggtgtgaccgcatggccgccaacggcgactttgccaacaagatcggaacctactccgtggcggtcaacgcccattaccacggcattcctttttatgtggccctcccctgctccaccatcgacctgtctctggccgacgggagcggcatccccatcgaggagcgggacagggacgaggtgcgcaccctgtacggcacccgcaccgccccggagtcggtggaggtctgcaaccccgctttcgacgtgaccccccacagtctggtcaccggcatcatcaccgagaagggggtcatctacccgccctttcaggagaatctgcaaaagctgtttggataaagacgggccgatgggaacaccggcccctgctggccgccgggcggacacccggcggcccttttatgcctcccctgtgatggtgagcagataatccaccagctcctccagcgccatgccgcgggaggccttgaccagaatggtggcatggggccgcaccacgccgtccagcaccggcctggcctccgcctttgtggggcagtaatagcactccggcacgccggcggcctgggctgcgtcatggatgtgccttgccagctcgcccaccgccaccaggcagtcgatgcccgccttgcccaggtagtcgcccacgccggcgtggagggcgggggccaggggccccagctcgaacatgtcgcccagtacggctaccttatacgctccccgggcactggagagcacttccaccgccgcccgcatggactgggggttggcgttgtaggtgtcgtttaggatggtgatgtcatcgccccggtggagcaggttcatacgcattttggtgggggcaaagtggagcacgccgtcggcaatctgcgtctgcgtcaggccaaagtgctcccccaccgccgccgccatcagcgtggggtagatcatgtggtcgcccagggcgggaatctccacccggaaagagttgtgaggtgttttcacttcacaggtcatatggctcttgccgtcgctgaccagcccctccgcccgatagtccagcccctctccggcgcccacgcgggtgaacgcataggggagcttccccggcagggtgttcagcaggggatcgtccccattgatgaccacgaaggcgccggacttgacatggtggaagatctcgctcttggcctccaggatcttttcccgggagccgaagtgctcgatgtgggagtcgccgatgttggtcatcagcaccacgtcgggctccaccagggcggagaggtagtcgatctccccggcgtggttcatgcccagctccagcacggcaatttcgtgctccccgctgaggcgcagcagggtcatgggcacgccgatctcgttgttcaggttgccctcggtcttgagcacccggtacttctcccccagcaccgccgccaccatgtccttggtggtggtcttacccaccgagcccgtcagggccaccacgggtatggggaactttttcttgtaatacttggccagatcccgcagggcccgctgggtggagtccaccttgatatagaacttgcccggcagatagctctcccgctcccgctgggtaaagcagcccgcagcgcccccctccagggcggcgttgatgtaggcgtggccgtcgaatcgctcccctaccaggggcacaaagagggacccggcgtggatggtgcggctgtccgtctccacccgtcccaccatccggttgatatccccaaactctcccagcagcttaccgccgaccgcgtccatgatttcacgtatggtcatcggctccataatccgtttccgctccttatcttccctgttttcgggcctccagagaggcgtgcacaatgcgctggcacagctcgttgtagtcaatgcccgccgccgcggcctcctggggcagcaggctggtgggtgtcatgccgggcagggtgttgatctccaggaaccagggctccccgtcctccgtgaggatgaagtccgcgcgggagtacaccgacagccccagtgtctcgtacacccgcagggccgcggcccgcacacgcgcctcctcctccggagtaatctccgccgggcagacctccagagcggcgccgggctggtacttgttggcatagtcgtaaaagccctgcttggggatgatctcaatggagggcagggctttatcctccaggatgcccacctggatctcccggcccctgatgtactcctccagcaccgtgcggccgcccagagacaggccttcggtgagggaccggcgcagctcctccgccgtgtaggcgatggatacaccgatggaggagccgctggccaccggcttgaccaccaggggcaagcgggcagtctctaccagtcggtcgatatctgcggcggtgtaggtgacggtcttccagccgggggtggacaccacgtcggccaccatccgcttggtcagatccttgtccatggcgatggcgctgcccagatagcccgcgccggtgtagggaattcccatcagatcaaaggcggcctgcacccgcccgtcctcgccgcaggtgccgtggagggccaggaataccatgtcggccatccggcacaactccagcaccccggggccgaacatgctggggctgtcccccttccggccgcgccgcacctgatccagatccggagcctcgcggctgattttcttgtaggcctcggacacaggcgcgtcaaaaaacgcctcgtccgccccgcccgtctccaggccaaaatataagtcgatcaggcccgcccggtggcccagcgcccgcagcgcctcggtcaccatggttccagtggagagggacacattccgctccggagacagtccccctgccagcacaacaattttcatagcacacctcgttcgagagtttgatacaatatgatacgcactagtggtatattatagcacggttccggcctattctcaaccttctttcgaaccttccccgtccaattcttgcaaaagcacctcctctgtggtagagtagagcggagattggggggtgcgctgtgaaaatcgcgtggtatgagccgctgtttttcctcttctttggggcgtttcatctgcaccgtgtctgggggctggcggaccgggagagctacgccgccttctggctgggggttctgacacaaaagggtcccctctacttcggcctgatgggccttctggccgtgctgtgcctggcgggcgtcgccaccttctttcggaattggggccgcaatccctggtggcggtggatctacctcttcggcggcagctatgtcctgttcgatctccttgccattgccgccggcctgtccttttggcactccctgctggcctggatgtttgatgtgacctccccctgctggaattttctctggggctttttcgtcctgctgggcggcgcctcggccgccctgggtctctcgcttctggtgcgccgcacataggcaatgggccggttccctacggaaccggcccattctctctgttcagagttcagaaccagccgccatcccggctgtcctgcaactccagcgcgccgcacagcagctcggccgcctcacccctggtaaggggggcgctcaggcctccgtccagcgacagtacgccgcaggtggcaagattggcggcagactgagccgcccaggtgggaatcccctcctccgccagcgtatcggcggacacgtcagtcacctgaagggcccggtccaggagcaccgccgcctctgccgcggtgatgggctcctccgcctggaacactacctgcccatcgctggagcggctgccctgcaccagtcccgccttcagcgcggaggagacatagggcttggcccaggtgggaatcgacacatcgtcggcaaagccggtgcgctctacgtcctccagggcttccataccggcggcgttcatggccatagccacgaattccccgcgggtcacagcggcgtcgggctggaagaaataggccccacccatgcactcgcccacgaagatcccctcctctgccagtcggatggcagccttatgggccgggtcgccgtccatgtcggcgtaggtgaccttggtattcggcttttcaatcttgatcttaacggtagcggggtcggaggagttgcccaccgcatccaccgccacataggtgaaggagtccttgccagtcttgttttcatagggagtgtagacaaattcgctgctgccgtcctccggcatggtcaccgccccgcgggcgggcttgttgaggatatgatacgtgagcagatccccctcggggtctacggcggaaaactgggccgtcaccgccacatttttgtaggtggtgagctccagattttccgccaccggcgcgccgtttgcctcggccatcaggtagagttcaacagtgacggcatcgccgctccgcccgtcggaaaagaccggggtgaactggaactgagcctccaggccggccggtgcggccagaggggtgaagcgcagtccgtccaccgcctccatagcaatcacgtcgcccacctggatgccctgagcgcccagggtgagacagccgaccgcggcatccggcagagtggcgatcacaatgctgtctagcttgccggagccttccacaacgaagtcctcctcggaaaaggagatgggttccgccgccgggccatttttggtcatggccgccacggttgggaccgcctcatccttttggaagaaaaaggcagatgcaggccagccagcggagtacaggaccgccgccagcactgccagcggcagagcgcggcgcagaaggacgcggtgtttcaagacaattacctccttgtttggaaatcatccgtagtctttgccaaatcaaggagaatatacggctgaggccatccaaatcggacagcccccgtccactggttcaaatacggctccgatcccgcagccagctcggaagggagcgcattttgatactggagataatgcccatggccgcaaacatggtgacgatggaggtgccgccatagctgatgaacggcagggtcagccccacaacggggaacacatagagacacattcccacgttgactccaacctgggccaacagcatccctgcgtaccccatggcgatgaaagcgctttgaggcgagcaggcccgccgcgccacccaaatgcagcgggcaataatcgctcccagcaggagcagcagaacaatacacccgatcaggccgaactcctctccgcagaccgcaaagatctcgtcggtgtgccgggcgggcagggcagactcagagaggctctgggtctgaatccccttgagataccccatgccgaacaaccccccgctgccgatagccaggatgctgcgggtctgctgaaagccctgtccctgagtctgttcgctgatggtctccgtattgcccataatatgatcaatgaccacggtgatacgccgggcgaagtacttgtcgctgatgtggggccaaatgagcacggcccctatgacacaaaccacaatggccagcaggaaccaccgctttttcaccccgcccgcccaagccatgatgacaaagataaaggcataggtcagcgccataccgaaatcgccggaggtcgccacaatcaacccgatcatgaccagggtgtggcccgccaactggaatacggaggaggggcggctgagtccccgctcccgctgccggttcatctgccaggccagcagcagtacgaaggtcagcttggccagctccgccggctgcagattgaccggaaagccgggaatgctcagccaactgttgttgcctgtctcatccgcgccgatccccagtggggtcaggagcagcaaattgataaacagtccaaacagaaagagccatttccaggatttttccgtaaacagctcaatatcaaccgaggacatggcgatatagacgaacacccccagaacgatacccaccgcctggatcagcatgcagcgcaaccccgccgagtggttcatataacgggtggcgctgtaaatcagcaccattccgaagccgctggccagcaggcagagcgtcagcaacagccggtcgccccggtgtataaattcgcggatcgaatcggtcagccagttcaaccacatccctcccttccaaaaccgtgcttaaaatcaatttagtttaccatcttttttgcgtttggtaaacgggtgtggtataatatttaagcgaattttcacattcgaggtgttatatggaatatatatccaactccccagcagagaccgaggcgctgggcgaggcgctggccgcccggctgacggcggggacggtggtcgcctttaccggagatctcggggcgggaaagaccgctttcacacggggactggcccggggattgggcgttcccgaccgggtcaccagccccacctttaccattgtcaacgaatatgaggggggccgtctgcccttgttccactttgacatgtaccggctgggctcctccgatgagctgttcgacatcgggtgggaagactatctggcccggggcggcgtgtgcgccgtggagtggagcgagattgtcagcgacgcgctggaggacggcgtgctccgggtggacatacggcggggagccggtgaaggagagcgcattattaccatcacgggagggacggacgcatgaaaatattggccctggagtcctccgccaccgcctgctcggtggcgctgtgtgaggatgaggctctgattgcccagtccttccagaacaatggcctgacccactcccgcaccctcatgcccatggccgtatccctgctggacaactgcggaaccgccttggacgcggtggagctcatcgccgtggcggccgggcccggctccttcaccggcctgcgcatcggcgtcgccgccgccaaggggctggcctggccggggaacaagccctgcgcggcctgctctaccctggagtccatggcctggtgtctggcccacctggacggggagatctgtgcagtcatggatgcccgccggaaccaggtctacaacgcccgcttccgtgcggcaggcggccgcttggagcgcctgtgccccgaccgggccgtgggcctggacgccctggccgacgagttaaaaaagagcgggaatccgcaatttctggttggagacggcgcacttttatgctatactaccctcaaggaactggggttggacatccggctggcgcctccccacctgcggcatcagagtgcctggggggttgcccggtgtgcactggagctgaccagagcgggcaggctgaccgacgcggccggactgacgcccaattaccaccggctctcccaagcggaacgggagcggctggaaaaagaacaacacaaaggggaatcgtgccatggacatggaaaaagtacacattttggaccaccctctgctgcagcacaagctgtccatcctgcgggatgagaacaccggagttaaggacttccgtgaggtggtctcagagatcgccacgctgatgtgctatgaggccacccgcgacctgcccctggaggaggtggagatcaaaactcccatcaccaccgccaaattcaaaaccatcgcaggcaaaaagctggccattgtccccgttctgcgggctggcctgggtatggtggacggcatcctgacccttattccctccgccaaggtgggccatatcggcctgtaccgggaccccgacaccctggagccggtggagtactactgcaagatgcccaacgacatcgccgagagggaggtcatcattctggaccccatgctggcaaccggcggctctgcctctgcggccatccagtttatcaaaaattatgaggtcaaaaatatcaagcttatgaacatcatcgccgctcccgagggcattcagcgggtccaccacgaccaccctgatgtggatatctactgtgccgctctggacgagaagctcaacgaccatggctacatcgtccccggcctgggcgacgccggtgaccgtatcttcggcaccaagtaaaaaatccataagcatgcggcgcgggcatctgcccgcgccgctccagtatcaagagggccaccccatcggggcggccctcttcagcctgtctgtttacttgctgtgcttctcctgaaggtactggtgcatggactcggcggccttcttgccggcgcccatggccaggatgacggtggccgcgccggtgacggcgtcgccgccggcatagacgccggggcggctggtggccatggtctcctcgtccacctggaggcagcccttccggttggtctccaggccgggggtggtggagcggatcagggggttggggctggtgcccaggctcatgaccacggtgtccacctccagggtgaagttggagccctccaccaccttgggggcgcgtcgtccgctctcgtcgggggcggtgaggcgcatcttcacgcactccaggccgcccacccggcctgtgccgtcgtccagcaccttcaccgggttggtgaggagcatgaactcgatgccctcctccttggcgtggtggacctcctccttccgggcgggcatctcctcctcatcccggcggtagagcacgtagacgtgctcggcccccatgcgcttggcgcagcgggcggcgtccatggccacgttgccgccgccgatgatggcggcggagccggagattttcaggggggtgtcgtacccctcccggtaggccttcatcaggttgatgcgggtcaggtactcgttggcggagtacacccccgccagggtctcgccctcgatgcccataaacatgggcaggcccgcgccggaaccgatgaacacggcctcatagccctcctcaaacatttcgtcaatgtcgaaggtctttccgatgaccatatcggtctccagatccacgcccagggcggtgagcttgtccacctcgttctgcacgatggccttgggcaggcggaactcggggatgccgtacaccagcacgccgccggcggtgtggaaggcctcgaagatggtaacctcgtagccgtgcttggccagatcgctggcgcaggtcaggctggcggggccggagcccaccaccgccaccttgatgccattggtctggggcttctggggcatggcgttgacgttctcccggtaccaatcggccacaaagcgctccagccggccgatggccaccggctcgcccttgatggcccggacgcaccgggcctcacactggctctcctgggggcagacacgaccgctgacgctgggcagggcgttggtgtcggagatgatatcataagcggcctggaagtcgccctcggccactttggcgataaactcggggatgcggatgttgaccgggcagccgcccacgcagggcttgtgcttgcagttgaggcagcgggccgcctcttccatagccatctccttggtgtagcccagggagacctcctggaagttgtggttgcggacattgggctcctgttccggcatgggaaccttcttcaaactcatattcggcatggtattcggctcccttcctcagtgatccatcagctcatgggccaactggtccatgcggcaggcgtggcgctccttctcttcggcctcctgggcgcggtagacggagttgcggttcatcagctcgtcaaagtccacctcatggccatcaaagtcggggccgtccacgcaggcgaacttcatcttgccgcccacggtgacgcggcagccgccgcacatgccggtaccgtcgatcatgatgggattcaggctgacgatggtcttgatgccatagggctcggtggtcttggagacaaacttcatcatggggatagggccgatggcgatgacggcgtcatagtggatgccgtcatcgatcagctccttgagcttcacggtgacaaagccctgctcgccgtaactgccgtcatcggtcatgatgtagaggtggtcgcaggcggacttgaattcgtcctccagaatcacaatgtccttagagcggaagccggcgatcacgtccacctccagcccctcagcatggcaggtcttggcctggggataggcgatggcgcagcccacgcctccgcccaccacgcagacacgctttgccccctcgggcagctctgtgggcagccccagcggaccgacaaagtcccggatggagtcgccttcgttcagctcggccagcagctcggtggtcagccccaccctctggaaaataatagtgaccgtccccttctcgcggtcatagtccgcgatggtcagcggaatgcgctcgccctgctcgtccaggcgcaggatgatgaactgccccgccttcgccttcttcgcgatcagaggcgcctccacctccagcagggtaacgctggggttgagtacttttttatgtacgatttttaccatgtgacttcaacctcttcttctctacggtctgatctaacttactaaatggaaagtgacgccatacatcaaaataagactggccggtttagaaattccttactgccgcaaggctttccggttcctcagtcttaacgcgataacgatatcagttttcttttactttgtcaagacagaataaacgccgccgcataatttatacggcagcgttcagccttgttacctccgctcaaccggccagcggagggtgatggcaaacatatccccctccagagcggcctccgcccggcagtccatctgcccggccagcgctttgacaatggccaggcccaagccggtgttccggccggtgcgcatcttgtcggaggtaaagaagcggtcgaacacgtggggcacgtcctccgcagtcagggcgtgggtttcgttggaaaaccggctgaccacctgcccgccctcctggtacagacggatttccatgcgcccctctccatgctccagagcgttgcggatcagattggtgaaaatccgcagcaccgccccggcgtccgcccacacctggggcagcccctcggccaactccacctccatgtcgaagcccctgtcggtgaaatcgttgtaaaaggccgccagcagaccggacagagaggcgtagaggtccaccttctcccgctggagcaggtactctcccccctctagccgtgagagatcataaaagctggtaatcaggctctggagcgtcctggcccgccccgcaatcaccgccaggtattcccgccgctccccctccgtcagtccggggtcctccagaagctggagatagcccaggatggaggtcaggggggtgcggaggtcgtgggagacattggcgatctgctggcgcagggcgcgctccctcgcctggtaagcggccctgtccgcctggcgcagctccagcaggcggttcacctcgtccagcagctcctccgccgcgctgttgggtacggccagccgtacgcgggcggtactccccgtatcctccagcgcccggagccggtacgcggcctcccgcagggagcgccgctgggcccacacccaaaaagccagccccgcacagagcagggccagcagtatacacacgatcagcacgcggaaacctcctccctagcgaacgtctctccggccaaacagaaacagccccagccccgtgctggccgccatccatcccaggccgatggcccagcaccagagctggtactgggcggtgagccagccatccagcagtgcgggcatcagcagcgaatagggcagcacaaccgcagtgaacagggtgaacggcgcagacgcctcgtacacgccgaacaacagaatcgccagaaacaccagcaccggctgtcccatgaaaaacatcaggtaatacccggcggtccaggcggccggactgcgcaccgccagggccaacatatggcacagggcaaacatgccgcaccagataggcagggccccggccaggcagaatcccaccagagccagcccctccagggcctcctccggctccccccggggcaggaacagccacccgccggccaggctccctcccaccagcaccaggcagaaggccagccccaacagcagggcggcgcacagctttccccaatagaccgtcccccgccgcaggccgaaggagagctcatttttcaaggtatccgccgtgccgccatccacaagttgcaccagcaggggcgcggccagcatgcccaccaccatggtgaccgaaatccccttcgccaggcttgaaaagccgccgtagctgtagagcatgaaaaacagggccgtacacagaagcaacagggccagcaggacatagacgccgcgccggtggaggaccttccacagctccgccttaatatagttgagcatggactcccaccttccccatttatcggatgtcccggcgggcgaataacgccagccctgccgctgcggcccccagggtccacagcagtcctacgccccaggtccagcccagccaggccgggctccagagagggacctccatcacgtccatgggcgcggtgagcagcaggtgatagagcatctccgctccgcgggccagccagtccaccccggtgcgcattaccatgcgcaggacagaactcaggccacccaggcaccccagcaccaccaccatcatggggatggtatgggcgagattgaacatggcggccaccgtcagggagagggcccccatccagaggggcagggcacccagcaggcggaagaggaaggtctggatctgaacccagtctcccaccgctccagggagcagtacccggcagagcacagcatagaccagcagggtcaggaaagccagcacaagaccaatccctgcggcggtgaccagcttgcccagatagatgcgcctgcggggcaggccgaacgagacttcattcttcagggtatcattcttatattgatcggaaaagacctcgtccgccacgaccaccgccagatagaggcccaccgtgaaaaagggggtcagcagggacaggctatctccgaagctgccctgaaacatgtcgccgaggccgaaccgccacaggaggggcagcccggcggccagggccagcaggaccagcaggaatgcccggaaataagggcgggccaccgccctgccccattccgcggtcaggtagtgcttcatgcgctcccctccctaccggatctctttccggcggaaggccagcaggcccactgccgtggctgccgccagccacgccagcccggcggcccagcacaggcccacgtagttccactgaaaggccatgtttttcaaattctccagcatgatcccaggcataaactgccgcagcacctcaaatgccgggtggaacaggattccaaacgcctgtagaatggcgggcaataccgctagcagtcctgcggccgtgaacgcggctatattcgtgccccgcaccaggaaatagcaggtattcaccatggcctgggcggccagccacaggggaaacgcccccgccaggcagtagccgatgagctgccaggccatgccgtccagctccgtatgggggaacagcacccaacacagccccagatagaagcccatcatgaccactgcggcaagcaccgcgatgcccgtagacacgagcagcttgcccaggtagatacgcccgcgggacaggccgtaggacacctcattttttaatgtattgtttttatattgctcggagaatacgatatctccggtcacaatcgtggcgtacaggccaatgctcagcatgaaaggcaccatgatggccgtggaatagaagtccacgttggaattgccccacttccaggtcgtccagtaaccccacagcagcaccgcctccaggcccaggcagacggccaggatgatatagaaatattttctgcggaaggtcttgtagcactcggcggccagatagttacgcatggcggacacccccgatcatggacaggaagtagtcctccagattggcaccccggctctcgatgctttggagcgccacgcccccttccaccagggcctgagcgacccggtggggcgcgtccagactgctgtagatacgcagcagatggccaggcagcacctcgtagtcgcggatgcccaggctctgttccagcaccagggccgcgcgggaggcgtcgtccaccctggcctcaatacaggcgcggcacttttcctccagcgcccgggcggaaatctgctccagcatcatgccgttgtccaggaagccgtagcaggtggccagattggccagctccgacaggatgtggctggagatcagaatggtggtctgccgctcctggttgagcctgagcagcaggtttcggaactccacgatgccctccgggtccagtccgttgatcggctcgtccagcagcaggaggtccggccggttcatcagcgccagggccagccccagccgctgcttcatgcccagggagaagttcttgaaggtcttcttccccgtgcccgccagatccacctcctccagcacctcgtctaccacccgccggccgggaatgccccgctggatgcggtagtactccaggttctgccgggcggtcaggtagggatagaagctgggcgtctccaccatggccccggtgcgggcccgcattttggacagctcccgttccccggaggcgccaaacagggaaacctccccctccgtcggtaccgtctgggccgtcaccatccgaatgatcgtggtcttgcccgcgccgttgcggcccaccagcccataaatctgccccttctggatggacagctccacatggtccaccgccagatgattgccatagcgcttggtcagcccgcgggtcaccaatatctcatttgccatttggcatccgcctttctcatagatcttgatgccagtataatggaaaggccataatctgcctttaagcaaaggtgaagaatttcttaaccggagcgaccgtggggccgcatcacagatcgctcattttaaagccgatgccccacaccgtcttgatatactcggcggggctggccttggccagcttagcgcgcaggttagagatgtgaacgttcaccgtattgtcgtcccccatgtactccccgccccacacctgctcgtagagctgctcccgggtaaacaccttcttggggtgctccatcagcagggtcaggatatcaaattcccgcgcggtgacggtgacgggcttgcccgcggctgtgacggtgacgctctcccggtccagggtcaggtctccatgggtgagcacggcgctcccgcccccgccggagaactgcttgtagcgcctgagctgggcttccacccgggccagcacctccgcgttgtcaaagggcttggggatgaagtcgtccgcccccagccggagcacgttgacccggtcctccaggcccgccttggcggagaggacgatgatgggcatggtcttcttttggcgcatctgggcgatgaattcctcccctgtcaggccagggagcatcagatccagcagcaccagatcgtactcgtattgtccggcccacagggcggcctcgctgcccgaaaaggccgggcggcaggcatagcccgccccctccaggatgcggcagagcagcttgttgatatcggggtcatcctcgaccaccagaatgttgcagatatccattctatttcaccctcagttgtttggccagctccgggtccgggtccactacggcggtctggtaggtcgtgtagaccaccatgcccggccgggcgccggccggcttcttgacgtactttaccggcgtatagtccaccggcacccggcttccctctcccgcctgggagaaagtggccgccagaatggccgcctcggtaagactctgggcgtcggcctcgcccccctccagccagaggatcacgtgggaaccgtggatcttctgggtgtggagccagatatcgctcttgtaggccagcttggtggtgagctgatcgttctggctgttgttcttgcccaccgagatgcgcagtccggcagaggagcggaactccatgggctttccgctcacccttttctgccgcttcgccgccgtcttgccccggcggaggtagccggtctccaccagctcctggcggatctcctggagatcccgctccccctccgccagggacaggttttccaggacgctgttcaggtactccagctcccgcgtccccttttccagttggatggtgagcatctgttccgccgtcttggccttgttgtagtccttatagtacttcgccgcgttctgctggggcgccagaagggggtccagccggatctccacctcccggccctccgggtcgtagaagtccaccgcccgcaatacctccatcccccgctccatggcgtggaggttggaggtgaggatgtcccccagctcccgcaggcgctcccgatccctggtagcctccagctcccgggtctggttggccagcttgcgggccgtgcggtcccgggcgctggtcaccgccttgaccaggtcctgcccccgctggcgcacccggtcggccgcctcccggcgctcgtaaaactcgtccagcatttgggagaaggaagcctggggccggctttccgtctccgggccatactggaggatgggcagaacggtgaaatccaccagcttgccctcccgcaccagcaggtaaggtgtaaggccattttcgtttacattgtttttgagtttctccagctccgccgccagccgctcccggtcgccgccggcgcggaaggccagctcccgcgccaccagaggcgacaggccggtgaagctgtccagcaacagcttgtcccactccttgcctagggggttctccagcaccaggcgcagctcctccggctctatcgtaaagggattcagcttgtcgggcgccggcggctggcgataaaacaggccgggcagaagctgccgctgaccccggccaaggtcaccgtccacccggcggatgcagtcgatgatgcgcccctccccgtccagcagcaggaggttggcgctgcggcccatggcctccagcaccaggcggcgctccacccggtcgcccagctcgtccagggtctccagccggaattccagaatccgctccagaggcggctggttcagctccagaatccgcgccccctggaggtgtttgcgcaggagcatgcagaacatgggaggctgctccgggttctcccggtttagggtggtcaggttggcccggggatggccggggttggcggagaggagcaggcgcacgttctccccctgcccccgtacataaagcaccacctcgtcccgggtgggctggtagagcttgtcaatcttgcctccggccacggcggcacggagctccgcggccaccgccgtgaggcacagtgcgtctaacggcattcctcttcctccatgatcacagcaaacagttggttgagccgctctgtgcggccctgaagccacagccagccgaacagggcctccagcccggtggcggcctggtaatccgcccggctggcgttctggggcacgctgtgggggctggtattgcggccccggcggaacacgtccccctcctccccggtgagcagggggagaatccgctccaccgcccgggcctgggccggggcggccacatagcggacggtggcccggtggaggcccttggaggtggccttgccgtggaggcacagccaggagcgcaccatcagctcaaacacgccgtcccccaggtgggccagccccaggctgctgatggcccgtacggtgtcgggcgcggcattcagatggaaataatcggtcataggtatgttcctcatttatctctcgaataataggatagtataacgcaaatccccacagaaaacaacaaggaaaggacgacccgccatggatatgcactatccctaccaacttcccccgctgccctatgcctacgaggctctctctcccaacatcagcggcgacacgctccactttcaccatgacaagcactttcagacctatgtggacaacctgaacaccgccctggccgactgtcccgagtgtcagtccaagccgctggatgagctgctcaaaaatctggaccggctgcccgaccccaaacgcaccgctatccgcaacaatggcggcggggtatacaaccatctgctctacttcgacggcatgtgcgcctgtcacagctcccgcccctccggcgggctggccatggccatggagcgggacttcggctcttttgagggttggaaggaacagatgaaggccgccgctctgggccagttcggctccggctacgcctggctggtgagcgagacctcgggaaagctgtccgttatgaagctgcccaaccaggactgccccctgtccatgggactgtggccggtgctctgtctggacgtgtgggagcatgcctactatctggactaccagaaccgccgggccgaatatgtggaccgctggtttgagcgggtcaactggcccttcgcccaagagcggtatgaggggtgcaggcaataaacaaggagcgccgccctattggacggcgctcctcgtttacgtgcgcatcagacgggtcagcacctgtctgcaaggccggaacagcaccagcgccatggcgaagtttccggcgcagtggagcagatcgaaggggatgccgcttacccaccaggacagggcgaaggcccatcctccggtgacccagtacactagggcgcacagcgccccgaagctgagcccgaaggccccggagagcactgcccagccaaggggagactccatcttccggaacagcattgccaacaccaccagcaccagccacacataggtatagcagaggttccaaaagccaagcccccagatgaggatctccatcatcacatagacatagacgggggccagggctttccagcccagtaccgcagtatagactaggacaagcagagaaaccggctcgatattgggcagccaggccagggccagcttggtcaccagcagcagcgcgcccaacagggccaggagcaccagctcccgcgcccccatgggcctgtgcttacccgaggccgtcatagcccacagtaaaggtcaattcaaagtggtctccgtcggcaatgggggtgctgtcagcgctgctgttgaccatttctccgcccttggtcagcttccaccactcctgtgccccctcgtccacggtctcgccgtccacggtcagcatatagaggccgtaggggccctggttgtcctccaccacgccctcagccgtcaggaccgcgcccagataggcctccccggtctccagggtgaacacccgttcctccccgcccttatgcaaaacctgaacggtgatggtcttttcccctgcctcccccttgggcgtgacggctcgccataccagcaacaggacggcagcgatcaccaccagggcggccaccgccaggatggtctttttcttgctctgcaatgctactcctcctttggtcaagtagcgccagtttaccacatttttcaaccagtttcaactttaaaaagagccaggccggtaaacggcctggctccgtggattggctttactgggggcgctggttgctgaaacgggtataggcagtgccgatctggctggccggggcctgctccacctgataccagcccttctgctgcgcggtctggaagagcttggtctgggtctggtggccctggttgagcagcttgagaaattcgtctcgaagctgcacgttgacacactccgaggcgaaggtgtcatagttggcgctcatcttcttttcggtcagaatcaggtcggtgatccgctcctggtcgttcatggtcattccctcctttttatttcaggtagccaagcagacaatcatagttctgccggtgctgatcggcatactgctgaaagcagggcttcagatcttcctcggtgcactcctgagctgcctcctgatacttgcaatagagggtcttttcaaaattgagctggtcggacagggcggtcagctccttggtggttaggttcgccatggcgcgtctcctcctttgtttggtttgccccaatagtttgccccgcctgcgccggcttatgcggcagccggggacagccgccggaccaaaagggaaacaccgcataaaattccccattcatccgttccacgcgggcaaagcaaaacagaggcgtcagcggaaacgcccgcgtctccgcatagggaaacgccagggaaaacccctccggttccggccggtacagcgcccgccccccgccagccgcccgggccagcaggggttcccccattcgccgggccggcgcctcctcccagtgccagccctccggggaatgcggaccgccgggcgagcccgcggaaaaggccagctccgcccgggcgcctgttggcggccaggccccctgccgccgcagctcgtccagagagagggtgcgcctcagcttcagtcggccgtcctccggcaggaaggtgcccagcagggcccggcctcccgtcccgcagaggtaacctttatagagcccctttccgtcctcgggcagctctgccgcgcaccgcgcccggccgccgctctcctcgacggtcagccagccctgtccgccggccagtgaaaaccgctccacacaagcgccccccttctccgccctttccttctattctatgcggagcagggggtgaaatgcgctgtaaaacggttgacaggagcgcggacgcctgctatactgtgtgcgacttgaaaacgattggagctgggaagatgcgcaaataaccctttctttgtttggagtccgaccggcggcccgcgggccgtctctttgttgtgctccggcagaagggttatgctgtgcacttccccttatggtacccatttttcgggacatgggcgcggaaggcgaatccttctgcgcccatattttgtatttgaggtgatctatcatggctctgatcgacatccgggatctgacctttgcttatcccggcagctacgacaacgtctttgagcacctgagcctgcaactggatacccgctggcggctgggtctggtggggcgcaacggccggggcaagaccaccctgctgcggctgctccagaggcaatacgaatacgacggcgcgatttccgtgccggtaccccttgattgcttcccctccccggtgtccgcgccggagcgggacaccctgaccattctggaggagcaggagcccggactggaactctggcgtatatacaaggagctggacacgctggaggtggatgccggggtcctgttccgcccctactcctccctctccggcggcgagcaggtcaaggtgctcctggccgccctctttctccgtgagggggccttccttctgctggacgagcccaccaaccatctggatctggagggccgccgggtggtgagccgctatctctcccgcaaaagcggcttcctgctggtctcccatgaccgggcatttctggacggctgtgtggaccacatcatggtcatcaacaagcgggacatcgaggtgcggcagggcagcttctcggcctggtggcgggacaagcaggcccgggacgactgggagcgggcagagaatgcccggctgaagcgggagatcggacggctggaggatgccgcacgccgcactgcttcctggtccgaccgggtggaggccgccaaaaagggctgccgcaactccggacttcgccccgaccgcggctatctcggccacaaggcgcaaaagatgatgaggcgctccaaggccgtggaggcccgccggacggaggcggcggaggccaaggccgggcttctgaagaacatcgaactggccgaggcgctgaagctccgccccctggagcaccccaagcgctgtctgctggaggccagggagttggcacccgactacggggcggggcccgtgtgccgtcctgtctccttcactgtggagcggggggaacgggtggctctggtggggcggaacggctctggaaagtccagcctgctccggctggcgctgggtgaggagatcccccacacgggacttttctcccttgcctcgggtctggtcgtctcctacgtgccccaggacgcctccttcctgcgcggcagcctgagccaattcgcgcggcgctctgaactggacgagacacagttcaagaccattctccgcaagctggacttcgcgcgggtacagtttgaaaaggatctgtccgattacagcgccgggcaaaaaaagaaggtgcttcttgcccgcagcctgtgccaaagcgcccacctgtatgtgtgggacgagccgctgaactatattgatgtcttctcccggatgcagcttgaggagctcctgcgggtctgccgtcccgccatgcttctcgtggagcatgaccaagccttcctggagggactggccgataagcgcgtcgaactagttcccgcctgaacgacagacgaaccgcaaactgcggttcgtctgttttttgttcccgacccttgacaacgccattctattgcggtagaatccaattgtattctattgcaatagaacagcatagaaaggagcttaccgatggaacttaagctgtttgactcggagcgcaaggtcatggaggtcctctgggatcacggcgacctcagcgccaaggagctggccgaccgcctgaaggagctggtgggctggagcaaaactaccacctataccgtgatcaaaaagtgcattgacaaaaaggcggtctcccgcagtgagcccggctttgtctgccaccccctggtcagccgggaggaggtgcgggaacaggagacggacgccctgatcgaccggatgtacggcggctccgccgacctgctggtggccaatctgctgggcagccgcaggctctccccggaggaactggcccgcctcaagcggcgcattgaagaattggagtgattgtcatgctgtctctgctggaactgagtctcaccggcggcgtgttcatcctcgccgtggttgtggtacgggcgctggccatgaaccggctgccccggcaggcctttcttctgctctgggccgtggccctggcccgcctgcttctccccttctccattccctcccccactagcctctactccgccgccggacatctgggcgagggcttccgccgggcgggcatcgtcaccgccggaggcacagatgcggcgggggccgcagcgcaggaggcggtcatcccctggatggccctgctctgggccgcgggcgctctggcctgtgccctgtgcttcctgctcccccacctgcggggccgcagggagtggaatgcctctctgccggtggaggacccctttgtcaccgcctggctggacggccatcccatccgccggagggtacgggtgcgctgctccgaccgggtggacagccccctcacttacggtctgctccgccccgtcatcctcctgcccaaaacgctggaccggagcgacgtgtcccggctggccttcgtgctcacccacgagatggcccacatacgccggtttgacgccctctccaagctcctgctggcggccgccgcctgtctgcactggttcaatcccctggtgtgggtgatgctggtcctggccaaccgggatctggagctctcctgcgacgcggccgtggtgcgcctctacggcgcggaggcccgtgccccctatgcccgcaccctgctggagctggaggccaggcggtcccgcttcctccccctgtgctccgctttcaacaaaaacgccctggaggagcgcatcggcgccatcatgcgctcccgcaaaacctccgccgcggcgctggccgtggccctggtgctggtggtggccctcaccgccgtgctcgccaccaacgccccccgggaaaggccgatcgcctccgcctccggcctgaccatccgggacaatggagtggtgacggcctaccaggagggcgtctgggactcctccggggagctcaaacccgacccgcagaccggccactattacacgaaggagcagtatgaacaggttgccgcgctgaaaactgagggatacgagtccctgtccatcgccgaattcaaccgcacgctctacgctgcgctgaacgagagcgaggcgctgttcgaggcctttgagcgggtgctgatggacctccccgaaaccgaccccctggcccccttcctggtcaacaccgtccagccctccctcaacgagtacaacgcccggctgaatgaggtgtattcgggccgggcagaggacccctccttctccggccagctcacccgcaccgagaccgccaacgtatacggcgacacggtggaggtgggttggaccgaggcaggctactccttcacctaccggattctggaccaggatgggctgaccgttgccgaacgcgacgccttcctccagtccattctcaagggtatgcaggactgcctggacggcctctccacagaatcgctgcgcgacgagggcaagctcaagcagaccctgcaggccgagctggaccggctgggcacggccgccgctacggggcagatcgcgtataccggcggcgccgtggagggctgctggtccgaggcggcctatgacggctcgggtacgcttgtcacccacgatctggtcatggagggcatggcatgaggaaccggctggtcattaccctctgcgccgtggtatccctgctggccggcgccggcctgctcaccttctggctggtccgctccctggcccccgccgctgcgctgaattacacaccctggcccctctcccccgaaccctatacccaggcggatctggacgaggccctggccctgcgcaccgagggatatgaggcccagtccgtcgcagcgttcgaccgcgctctggcggattggaccaatgaggccgccttccacgcccgggaggaacgcattcgccgcctgctctgctcctatgaggaggacggacccgaggccgaatttgtcctcggcaccctggccgccgccatgggggcctgctccgcccggcactacggcggctactgcacacagattaccccggcctatgcagacgctgccgcctatacccggtccgaggacgtattcggcgactcctacgtggtctatgaggcctccgcctcctacaccatccgctaccagatgccggacgagagcaggctcaccgtgggggagcgggaccggattctgacccgctaccgggacgcagtgcaggcctttctggacggcaagacggaggacgagctgtcgaaggaggaggccatgacccgtgccctgaagcgggagctgaaacggctggaccagtccctgtccacccagtggatggcgctggagggcacccggctcaacgactacttcgcctatggcccggaggggggcgagacaccgtgaggctgtccgccctctccctcaagctcatcgccattgccgctatggtggtcgaccacgtcgccttcacctttgtcccctatgggacacccctgtggaccgtcatggacgccgtcggcaagctcaccggccccatcatgttctatatggctgtcgagggctttcaccacaccaggagcatccggcgctatctggccaggctggcggtctttgccggcgtcagttacttccccttcctctatttctgcgccatgggtcagccggagcagatggaccccctgcggctgaatgtcatctacaccatctccctgggggtactggccgtctgggtgcgccgccgcccctggcccgcccccctccggaccgtcctgctcctcctgctggcctgcctgagcatccccggcgactggggtatctggggcttcagcatcatcgtcgtgctggacttctattacggcgacttccgcaatcaggccttcggctacacactggtcgtcctgtttgccgtcaataccgtcagcctgctcaccggtccggcctatgacctgctctatctgggaggcctgtccagtccggcggactacctgctgggggtggaaaacctgggcatgttcctccccctgctcctcctccggtattatgacggtacccgcggcaccaaccggccctggggcaagtggctgttctacctcttttaccccgcccaccttctgctgctcggcctgctggcccatattctcctttagaaaggaagttttccccttgtcccaccggaacacacgcatcttgtccggctgcgccgccctgctgctctgcgccgggctctccggctgccggtctgtgccggcctcccggccctccgcctcccctgaccctgcggcccaccttctgggcctgaccgctgaacagcggatggaggattacgagtacctctggtctaccctgcgggacagctatccctgctggggtattctggagcgcgagggcgttgaggtggagcgcatctacaccacctaccgggagatggtggcggaaagcgacagcgacgcagacttttacagcgccatttacagcgccctctaccttctgggcaccaacggacatctgagcataatcgagccggaggcctatttctccgattacctccctgccgccggccagtaccgccgggagggaaaaacgcactgggcggaagtgctggacagcacggacactcagaccaggtaccggaagctcctggccctggagcaggccgccaatgggacggacgcggagtcctccatccccggctccggcagtgatacacccaacctgaccacgcttctccttccgggcgggacgactggataccttaaaatcgaccgcttccccgccgactatacttccgatgccgcggcactggaggcgttctacctccagtgcgccggttgtaccgacctgattctggatctgaccgacaacagcggcggcagtgagctctactgggagcagcttctggtggccccccacattgaccaccccctgtccagccggcacttggccctggtgcggcggagcgccaacaacaacccttatctggacgaggccttctccccctccgccttccgccccctctccactctgccggagctgcccgggctggatgccgcggaccgtgccctggccaccgatgtgtttaccgtctcccataccgtggaaccggcggcaaagccgagtccctttcgcggacgcatctgggtgctggtagatgaatcggtctactccgcctctgaatccttcgtcctgttctgccaacagaccggctttgccaccctggtaggccgcacaaccggcggcgacgggattggcgctatggatccggtctaccttcagctcccgaacagcggtatcctgattcaatataccgtcccatttgggctaaaccctgacggcagcagcaatgaggaaatgggaaccacccccgatctggtctccccggcggaggaaccgccgctcattaccgccttccgggccattggggaggcataataacaaaagaacgggcggcacaattccgtgccgcccgagcagccagtcgaaaagtcttttcgactggctgccggactttttgaaccttctaaaaaagttcaaaaagtcgtttgatcccacgcgaaagggaaccctgacgtttccctttcacactatccctccctccgaagccttcaagcaggaggagctattgaccatttcagtgggcggcacaatctgtgccgcccactcttctgtttattgaatgctgtaggtcccccggaccaggagggtcacggcggtggaagccttgacgccccggccctcaatggtggccagatacagatggttggccgtcagggccccgccgccggccagcgtcgttccggcggtcatgtccaccaggccgggggaggtgtccgaaacgcaggtagccgtgccgctgcgcaggaggaattcacacgccgcgccgccggtgatggtttgcccggcggagaggttgactacctgataggatgcgccgccggagggctggacggagcttcccccgcctgaggatgccagcttgtcctccacctccttgacatagccttcgaccacggcggagagctgcttcttcagctccgtctcccgggccgtgagcttgctgtccacctgggacagaatggatggggtggctttctgagtcagatagctcagcgtcaccagcgggtcgctctggctcccctgctggcctgcggcaaaggcaacgcccaccagggtcagggtcaccaggcacccggctaccagacgggcgggccaatgtgttttcttcatatgtacgtcctccgtttgggaagcggggccgcccgccggggcggtcccgtgcttccatttttaaaccatggtgtccgtatgcaggccgaagctgaccgcgatggcgttgtccacccgctgcatctgcgcttcgtccagccggcccatatgctctctcagccgccttttgtccagcgtccggatctgttccagcagcaccaccgactccttgggcagtccgtaggtgttggctgagagctcaatgtgggtgggcagacgggcctttccggtctgagaggtgatggcggcggcgatcacggtgggactgtggcggttgccggtgtcgttctgtacgatcagcaccggacgcacgcccccctgctcactgcccaccaccgggctcagatcggcataaaagatgtctcctcgttttacgctgttgtccacaaaagctcacactccgccggaatatagtcaccagcgtcaccaagcacagggcttatgtaacgcggtcactatgattctcccacggggcggcggaatttatacacagggtttcaaaaaacaggaagtccccgtctctctccgccgctgcgccggcatccctccccgaaccattgtatgcccggcggggccgccgtgtgagcggacgctcaattcaagtactcccggggcacccggggagacacggcgcagagcaattcgtattggatggtgcccgccagagcggcggcgtcctccaccggcaggtgttcgccgaagagctccacctcgtcgccgggggcagcccccagcccggtggcatccgccatgcacatgtccatgcagacacggcccacaataggcgcccgctgtccgcggatgagcacctccagccggtcggagcacagccggggcaggccgtcggcatagccgacggtcagggcggccagctcggcgtcccgctccagcacatgagtacagccatagcttaccggcgtcccggcggggacggccttgaccgaggccacccgggtcttaagcgccattaccggccgcaggccaacgccgtccaacccctcgcaggaggggtcgggatagtggccgtacagggccaccccggggcgcaccatatccagatgagtacagggatactttaacacagcagcgctggcggcgcaatggcggattgggaacgtgattccccgcccctccagctcggacagcagctccagaaagcgggtgaactggcccatggtgtacgcctcgtccccgtcggcattggcgaagtgggtatagatgccctccgcctccaggccgggcagggcgcacaccgcggcaatggcgtcggccgcctccgtccggtgtccctcattacacagccagcccagacgggacataccggtgtccgccttcacgtggatgcgcagccgcctccctgccgcctgggcggcggcggaaaaggccctggcactctccagatcgtagaccgtctgggtcaacccatagcgcagcaactcctccgcgcagtcggttggcgtgtagcccaagagcaggatcggggtgagcaccccggcctcccgcagctccctggcctccgccaggcaggccaccgccaggtactccgcccccagctcctccagcttccgggccacggggaccgccccgtggccataggcgtcggccttcaccacgcccagaaatcggcacccctcgggcagcagcgcccggagtgcgcggtagttgtgctccaaattgggcagggagatctccgcccaggttcgtctctcctgttgcttcatgctttcgcctctctgatatgggatcatccgctccattatactacgggccgggccgcggcacaagccccgtccgcccggcgttttcatccatttttaatgtactgttcatagaaatcaaaagacaaacagcgaattttggtctatactaagggcagaaaccagggccgggaccggcccgccttccaattcaaataaggaggattccgaattatgtgggaagactttggcaaagcattgacaaatgtggccttcgctggtgtgggactggccgcgctggccgccgaacaggtggtcaaggccggaaaggtactggcggaaaagggcgaaatctacgtggagcagggcaaacggtatggcgaggagctccagcagaagctccaggaggacgcccagcgccgccgggaggagcagttggagcagcgcatctccgccatggacgctcaggagcgcgaggccctgcgccgccggctggcggagctggacgagctggagcggcaggcccgtgaggccgctgcccaggcggaggaggccgcgcccggcgagggcggtgccgagatcaccgagatccacggcggcccccaggagcacgacagcgaggaatcatgaggcaaacggccaggcggggcagcgccccgcctggccgtttgctatgtgttctctccaaccgtgaactgaaactccgtaaagacacactggatcacggtaaagccgtcctgagacagctccccccgcagaagggcgtgggtggacgggtcaaaccagagggagcactcccgcccctcgcccgcggcggactccggctcccggcagaccacacgcagcacctcgctctccccctgggcctccataccacattcggcgatgaagccctcctgcacatagtccatcagcaccggaaccgcgtccaccggactcatgccgctgtcatccagcggcccggtctccacctgcatgccgtcgtactccagagcggtctccccctccagaatacgggcggtgaccccggcgatattctccggcgcggtgatggtcaggacggtctccccctccctggcatagttcaggccgattccataggtatacacccgctggccgtagtcggccgtcagctccagggaggcggtacagccccccatctccagatactctccccgtatgtccagggccagttgctcagcgcggtttccgccctctgctccgccgcaggcggacagggacaggccgagtatcatcattagtacgcacatcccggtccgatggcgcacagcgctccctcctagctcacgtgttcctcaatgacggccggcagggcggcaatcacgtcggttggggtcattccatactctccaatggcgcgggcacagacctcccccgcctctccgtggagccacaccgccatgggcaccgcctgccgggcgggcaggccctggcccagcagagagaggatcagccctgccagcacgtcgccgctcccccccttggccatacccggattgccgttggtgttgatgtaggccgagccgtcggggaaggcggtgatggtgcggtgtcccttgagcaccaggcagcaggcgtgctccactgcaaaggcgcgcgccgccccaaggcggtcgcccgacgacagctcgccccccagcctgacaaactccccgtcgtggggagtgagcaccgtgtgcagtccccggcggctgtccaagacatctatatgtccctccagcgcatttatgccgtcggcgtccagcaccacgggcaggtggatttccccgagcaggtggcgcaccactgcggccacgccgtttccgcggcccaggccggggccgatcaggcagacgccgcagccggccagccgggtcattgcggcttcccccgcctccagggagagctgcccctccttgcccgcaggcagagggtggggcatggcctcatccagcttggccgccgcgatgggccacaccggggccggcactcccaccgtcaccaggcccgcgccggagcgcaccgctgcctgagccgcgaacaccggcgcgccggtatagcccacgctgccgcccaggagatagacctttccaaagtcccccttgtgggcgtcccggggccggacgggcagacggacatccgccccctccaccgtctgtaccggatagtcctccccgtccaccaagtcccggggtatgccgatgtccgccacggtcagcacgccggtgcacaggccgcctttgcccacataatggcccgcctttggaagcgtgaaagtgaccgtccgcgccgcgcgcaccgcctcccccagcacccggccggtgtcggcctctaccccactggggatgtcggcggacaccaccgggatgtcacaggtgttcatcatgtgaacggcggtgagggcgtccccccgcacctcggtgttcaggccgataccgaagatggcgtccaccatcacgtccgccttcaggcaccaggccgcgaagtccgggtcgtccggggtaaagggctccagtaccccgccggccgccgccagccgggcctccatggccctggtgtcgcaggtcagcttctcccgctgccccaccaggatgcagcgcacctcgaagcccgcctccagcagcaggcgggcgcaggccacgccgtcgccgccattgttgcccggcccgcagaaacaaaccgcccgccccggcgcgttggccgccgtgtcgatggcggcctccgccagcgcatttgccgcccgctccatcaactccagcgagggaatgccccgctcctctatggccctccggtccaatgttcgcatctgctccgccgttgcgattctcatgtgttccacgctcccatttctctctaagtcggtctcattatatgccgtgcggcaggactcgtcaatttccttcttgcgcttttctcgattttgtgatataaataagggcacatgcgatgaagggaaaaagagcagcccccggcccggcagagagcgtccgtcaccggctgaaagcggatgtggggctggcctgttcggttcgtcctggagcggccctggagacagggacggttttgccccacgttaccggggccaaagtgcctgcgccgccggcgcgggaattgcgggtggtaccgcggaaggtttgcctttcgtcccaattagttgggaggaagggcttttttattgcccaaaccggaaagaggagctggacaatgaagtcgttggaagagcgagaccgcgccttgatcgaggccgccagtgcagcgattcgccggaactatgacggcgaaaacttccatcacaccgtaggcgcggccgtgcggtgcggcagcggcgcagtttataccggcgtgaatgtgtactccattcacggcgcatgcgcagagcaggtggccatcggctccgccatcaccaatggcgagcgggttttggaagcaatcgccgccgtccgcggcaaagacggctcggaactgctgcccccgtgcggcaactgccggcagctcctggcggactacgcgccggagtgtgaagtaatcctccccgtgaacggggttgcacaaaaggttccggcaaaggatctgctgcccttcgcctaccatgcggaagcctaatcgtatccactaccattcatcaagaaggagttttccatatgaaagaacagttagcaaccatccgctcggaggctctggccgcgtttgcgcaggccggatcttccgcagaactggacgccctgcgggtcaagtatctgggcaagaagggcgagctcactgccgtactcaagcagatgggcaagctctccgccgaggagcggcccgccatggggcagctggccaacgaggtgcgcgccgctctggaggccgagctggaggccaagggcagggagctggaggccaaggcgctggaggcccgactggaggccgaggcgctggatgtcaccgtccccggcaagcccgtgacgatgggccaccggcaccccatgtatatcgccctggacgaactcaaggacatcttcatcggcatgggcttcaccgtactggacggccccgaggtggagctggccgagctgaacttcgaccggctcaacgccggcgaggggcaccccagccgcgactggtcggacaccttctattttgacgagggcagccgggtgatgctccgcagccagacctcccccatgcaggtgcgggccatggactccatgcctctgcccatccgcatcatcgcccccggccgggtctaccgcaaggacgaggtggacgccacccactcccccatgttccaccaggtggagggcatggtcatcgacaagggcgtcaccatggccgatctgaagggcaccctcaacaccgtggtggagcagctctacggcaagggcaccaagacccgcttccgcccccaccacttccccttcaccgagccgtcctgcgagatggacgtgcagtgccacaagtgcggcggcgtgggctgccccacctgcaagggtgagggctggatcgagctgctgggcgcgggcatgatccacccccgggtgctggagatggcgggcatcgaccccagcgtctactccggctgggccttcggcatcggcctggagcgcaccgccatgcggcgcttcaagatcgccgatctgcggctgatttttgaaaacgacgtccggttcctggagcagttctgaggcgcagtctcagaaccgtaggggcggctatcagccgcccgcccgtttccaaatttgagcctggcgggcggataatatccgcccctacacccggaatccgtccgaggtaaaacaagaataacaagggagttttcatatatgaacttatctcgcaaatggctggaggaattcgtccatgtggacgcctccgacaaggagttcgccgaggccatgaccctttccggctccaaggtggagctgacccacgatctgggagaggagatctccaacgtggtggtgggcaaggtgctgtctatggagcgtcaccccgattccgaccacatgtggatctgccaggtggacgccggccgggagcagccggtgcagatcgtcaccggcgcctggaacgtccatgtgggcgatctggttcccgtagccctgcacaagtccaccctgcccggcggcaagaagatcgagaggggcaagctgcgcggcgtgctgtccgacggcatgctttgcggtctggccgagctgggcctggacgagcgggacttcccctatgccgccatcacccccgccgccattctgggggactacaagcccctggacaaggacaagccctccatctccgccgacattcagcccggcgacaagatctacggccccgtggtgtgcgccaaggtgctggagtgtgagacccagccggacggctccttccacacctgcgcagacatcggaaccggcacggtctgcccggacaccgcctgccccaacctgcacgcaggcgaccttgcggcctacaacaccaagaccggcagctactgtaccctggacgaccttcacgcccagcaggcggaattcccccactgcatcccagacggcatcttcatcctccgcgaggactgcaagcccggcgacgatctcaagcccgtcatcaacgccgacgaccacgtagtggagtttgagatcacccccaaccggcccgactgcctgtccgtcatcggcctggcccgggaggtggccgccacctacgacgcccctctcaccctccacgagccggtggtgaagggcggcggccccggcgtgctcaccgagctgctggacgtggagaccccggcggccgacctggtgccccggtacaccgcccggatggtacgcaacgtgaagatcgccccctcccccaagtggatgcgggagcggctgcgctccatgggcgtgcgtcccatcaacaacatcgtggatatcaccaactacgtcatgctggagtacggccagcccatgcacgccttcgactaccgctatatgaagggcggcagaatcatcgtccgccgggcggaggagggcgaggagctgaccaccctggacggccaggtgcgcaagctcaacgccaaccacctggtcatcgccgacgagacccgggccgtgggccttgcgggcatcatgggcggcgagaacagcgagatcgtctccgacaccgccgacgtggtgttcgagtccgcctgcttcgacggcacctgcatccgcaagggtgccctggccctgggcatgcgcaccgaggccagcgccaagttcgaaaagggcctggatcccatgaacaccctccccgccgtccagcgggcctgcgagctggtggagctgctgggggccggcgaggtggtggacggcgtcatcgacatcctcaactatgtgccccagccccgcaccatccgcatggacccggagcgggtgaatgccctgctgggcaccgacatccccgccgcggagcagtacaaatacctggagcgggtggagatccacaccgagcagcacgacttccccgacgcccccgccaacgtggtcatcccctcctggcgcgccgacgtggagggcatcgccgatctggccgaggaggtggcccggttctacgggtacaacaacatccccgtcaccctcatgcggggccagaccaccctgggcggctactccgccgagcagaagctggaaaaccggctgggcgcgctctgccgtgccttcgggtatgacgagatcatcacctactccttcatctcccccgcctgctacgacaaaatccgctggccccgcgactactccgcccgcaagagcttccagatcctcaaccctctgggggaggacacctccatcatgcgcaccaccaccctgccctccatgctggatatcctgacccgcaactacaactaccgcaacaagtccgccaggctctatgagctggcccgggtctatctgcccggcggggaggacggcctggccaacgagtccaaggtgctcaccctgggcgcctacggcggggacatggacttctacgccatgaaaggggccgtcgaggccattctcaaggacatccgggccacagatatccattttgagggccccaccggcgcaccctccgacgcctcctaccaccccggccgctgcgccaccgtgtggagcggcagcaactgcatcggcatcttcggccagatccaccccctggctgcccagaactacggcgtagacgccgagctctactgcgccgagctctcctttgacgagcttctgaacgccaagggccccgatcccgagtacgtccccctgcccaggttccccgccgtcacccgggatatcgccgtggtgtgcggtgagaaggtcaccgtgggcgctctggaggactgcatccgccggggagccaagggcctgctcaaggaggttgccctgttcgacatctaccggggcaagggcgtggacgagggcaagaagagcgtagcctttaacctgactctgcgtgccgacgaccgctccctcaccagcgaggaggctgatgccgacgtgaaggcagttttggagctgctggagcaggagctgggtgctgttttgcggtgagccccttccgcgtccggtcgaaatcttaaagaatcataaattttaagtcatcccctttacagcgcgtcctttttccgctacaatggggaacagaatgatacacggggaggtgtaccgatatggagatggactacacccgcaaattcagcatccaaaacgacaaggacccagagatcaagaagatcctctcttccgtctaccagtccttgcaggaaaagggttacaatcccatcaaccagatcgtggggtacatcctctcggaggaccccacctatatcaccaactacaacaacgcccgcgccctgatccgcaagctggaccgggacgagctgctacaggagctggtgaagcagtatctgcgcgattgattgtgttccatccaacgtgcgctgtcggtgacagcgcacgttttttcttttttattgcacctgcaacatacaacggcccgtccctttgttagaataggcccagaaaccgacgaaggaggcgttttcccatgaaacgcagaatcattcatatcgaggaatccaggtgcaacggctgcggcctgtgcgccgccgcctgccacgagggcgccattgagatggtcaacggcaaggcccgtctcacccgggaggactactgcgacgggctgggggactgcctgcccgcctgccccaccggggccatcacctttgaggagcgtgaggcccccgcctacgaccatgcggcggtcttggccgccaaggcggccagggccgcggacacgcccctgccctgcggctgtcccggcagccagagccgggccatccgccggccggaagccgcccccaccgctggagatatccccagtgaactgcgccagtggccggttcagatcaagctcgctccggttaacgcgccctactttgacggctgtgatcttctcattgctgccgactgcaccgcctacgcctacggcgcctttcaccgggactttatccggggccgggtgacccttatcggctgccccaagctggacgaaggggactatagtgaaaagctcaccgccattctggctcaaaacgacatccgcagcgtcaccgttgtacggatggcggtcccctgctgtgggggcattcagcgggccgccgagcgggccgtgtccgccagcggtaaaccgctctccctccatacggtcattgtgggcaccgacggcacgctgctccgccaggcttgacacacactttacaattgtgtcttctgtttttccggcgaaacttgtataagcatacgaatttccgccccctcccttgcaaagcccccgggaattcgatatattatactcattctgggacagggaggtagagccatgacgccggtgcacgaactgcgctctggggtttggatcatcaatggttcccgcctgtccaattttcggcggtaataagtgcagggtatctgtgtaagcagataccctgatttattttatcgtttcctaaaaatttatttggcgctacaggagggttttatgagcaaaaaagttgccgtcatcatgggttccgactcagatctggacaccatgcgcccctgcatccagcggctcaagtcctttggcatccccacagaggtccacatcatctccgcccaccgtacccccgccgccgccgagcgcttcgcctctcaggcaagggagaacggcttcggtgcgattatcgccgcagcgggcaaagccgcccatctggccggtgtgctggccgcctataccaccctgcccgtcatcggcgtgcccatcaagacctctatgatgggcgggctggactcccttctgtccatggtgcagatgcccaagggaattcccgtggcctgcgtggcggtggacggcgcggacaacgccgccattctggccgcccagatgctggccctttccgacgaggccctgagcgaccggctggtgcagttcaaggccggcatggccgccgaggtggaagcaaaggatcataaaatccaaatggaggagttttaatatgtcttacgagaaactggagcagctctatgagggcaaggccaagaaggtcttcgccaccagcgaccccaatgttgtgatcgtgtcctacaaggacgacgccaccgccttcaacggcctgaagaagggcaccatcaccggcaagggggccatcaacaaccgcatgaccaacaacctgatgcgccgcctggaggagaagggcgtgcctacccactatgtggaggagctcagcgaccgggagaccgccgtgaaaaaggtgtccatcgtccccctggaggtcatcatccgcaacatctccgccggctccttcgccaagcgcttcggcgtggaggagggcatcgtgttcgacgcgcccaccatcgagttctcctacaagaatgacgacctgggcgatcccctcatgaacagctatcacgccctggctctcaagctggccacccaggaggagatcgacctgatcaagaagtatgcctttgcggtcaacgacctgctgcggggcttcatgaagaagatcggcattgatctggtggacttcaagctggagttcggcaaaacatctgacggcaccattgtgctggccgacgagatctcccccgacacctgccgcctgtgggacgaacagacccacgagaagctggacaaggaccgtttccgccgggacatgggcggggccgaggaggcctacgaggaggtcatgcgccgcctgatgggggatcagtaatccatgggcggtttcttcggcgcgattaccaagcaggactgcgtgctggacgtgttcttcggtaccgactaccactcccacctgggcaccaagcggggcggcatggcggtctacgaccggaaggatggctttcagcggcagatccacaacattgaaaacacccccttccgcaccaagttcgacaaggatctggcggaatttcacggctgctccggcatcggctgtatcagcgacaccgatccccagcccctgctggtgcgctcccacctgggcctgtacgccatcaccaccgtgggcatcatcaacaatgccgacgcgctggtggagcgctacttctccgaccacggccaccagttcatggccatgagctcgggtaaagtcaacgccaccgagctggtggccgccctcatcaaccagaaggacgatctgatctccggcatccgccacgcccaggacgagatcgacggttcagccaccattcttattctggatgccgacggcatcctcgccgcccgtgacaagctgggccgcctgcccgtgctcatcggccagggcgaaaacggctgctgcgtctccttcgagtccttcgcctaccataagctgggctaccatgacgcttacgagctgggcccccgggagatcgtacgggtcacggccggcggctggaagaccctctcccccgccggagagcagatgaagatttgcgccttcctttggacctactacggctaccccaactccaactacgaggggatgaatgtggaggtcatgcgctaccgcaacggggagatcatggcccgggacgaggtacaccggggccaactgcccaaggtggactatgtggccggcgtgcccgactcaggcgtgccccatgccatcggctttgccaaccgcagcggcaagccctttgcccgccccttcgtcaaatacacccctacctggccccgctccttcatgcccaccagccaggaggcccgcaaccaggtggccaagatgaagcagattcccgtgcccgagctcattgagggcaagaagctgctctttgtggacgactccatcgtccggggcacccagctccgggagaccgtggaattcctctacgagtccggcgctgaggaggtccacatgcgctcggcctgtccgcccgtcatgtacggctgcaagtacctgaatttctcccgcagcaactccgacatggaactgctggcccggcgaaccatccaggagctggagggggacgaggggcagcagcatatcgaggaatacgccgacgcctccacggagcgcggcagatgcatgctccgcgccatctgcgagaagctgggcttcgactctctgggctaccagtccctggacggcctgctggaggccatcggcatcgactgggacaagatctgcacttactgctggacggggaaggagtaaaaacgctccaagggggacgctgtcccccctggatacccccccccgcgccgcccccggcggcacagcgggtttgatccccctcacccgcgcacggcgcaggtggtcgcccgccgatggcggagcaagcagcggcgtactccggcgaactgaattcgcctgcggacctcttttgcaattcttttacccgcaaagcgggtaaaactctgcaaggctttttcctctaccccagcgccccatttcctcattgttatctggaggttttgacatgaagaactcccattccgaatcctacgccgccgccggcgtggacgtcaccgccggctacgaggcggtcaaccgcatcaagcccctggtggagtccacctacattcccggtgtcatgggctctctgggcggcttcggcggcctgttcgcccccaatgtggcgggcatgaagaagcccgtcctggtctccggtaccgacggcgtgggcaccaagctgaaaatcgcctttctcatggataagcacgacaccgttggcatcgactgcgtggccatgtgcgtcaacgacattatctgctccggtgcctctcccctgtttttcctggactacgtggctgtgggaaagaatgtgcccagccgcatcgaggccatcgtctccggcgtcaccgagggctgccgccaggccggctgcgccctcatcggcggcgagaccgccgagatgcccggcttctaccccgaggacgagtatgatctggccggcttctccgtgggtctggtggacgagtccgacatgatcgacggctccaccctctgcgaaggggatctgctcatcggcctgtgctccaacggcgtccactccaacggcttctccctggtgcgcaaggtgctgctggacaaccccaaggctctggatatctatgtctccgagctgggccgcaccatcggcgaggagctgctgcgccccacccatatctacgtaaaatccatccaatgcctgcgccagcacggcgtaactgtcaaggccatcagccacatcaccggcggcggcctgtatgagaatgtgccccgcatgatgaaagagggcctcaccgcccgcatccgcaccgcctcctaccccgtgcccgccatcttcgagctcattcagaagtcgggtgacatccccgtgcgggacatgtataacaccttcaacatgggcatcggcctggtcatcgccatccccaaggatcaagtgggccacgcgctggacgtgctggcccgggcgggcgagcagtcctatgtcatcggcgacgtgatcaagggcgacgccggcgtggagctggtctgagggcagggcgcatggtacgaattgccgtcttggtttccggcgggggcaccaacctccaggcactgatcgacgcccagagccggggtgagctgaaaaacggccgcatcgccgccgtgctctcctcccggcccgacgcctacgccctggagcgggccgcccgggccggcatccccggctatgtggtggcccggaaagacttcgcatccaaccgggagatgaccatagccctggtggacaagctccgtgagctgaatatcgggctggtggtactggccggcttcctgcacatccttaccggggagatggtggccgccttccccaacgccatcctcaacgtccaccccgccctgatcccctccttctgcggcgctggctactacggcctccacgtccacgaggccgccctggcctacggcgtgaagctcacgggcgctaccgtccacttcgtcaatgaagagcccgacggcggccccatcgtccttcagaaggcggtggagatcctggagggggacacccccgaggtactccagcgccgggtgatggagcaggcggagtggcatatcctcccccaggccgtctccctgttctgtgaggggcggctccgggtggagggaaggatcgtccatattttataatttcataggaggtatggagacatgagcgatctgcgtcttctggcacttgtcctcagcggcggtttcctgttctttggtggaatctggcttggcggagactacgggctcgctctgttgctgcttggcttggtcgttctgctggttcctgttgttctggcgtgtatttccctgatccgctggctggtacctcctagccaaagctctcatgagtagtccaggtaggagatgtcttcatatgaaacgaaccgcagtcattgtaatcctatctttgcttgcagcattcgtattttctgcctgcgcgcccgcagcccccagcggtcaaacgcctgaatttttgaatgacatcgggaaaacactcatcgaattaaaaaatgagcatccagaaggcgaaataattgaaagcttagattcatccccagattgtgccgctatatgctttggggagccggaggcggaatatgcttattactttttcggaacgcagagcggcgattctgaaaaggccatgagcgaatgtgaggaacagctgaaatgtgcgggctttgtcaccaccgcaaacatacttttcccagacatggaagatgacatgtcctttgaagattttttctccttgatcggtgtggacgattatgagtatttcggggaagatacgcttgcagcaggttggttaagattcatgtatcaagatatggaagtaatggtgaatacaaacgaaatgactcctggccgcggattacattttaattttacaggagcagaaatcgtgaagcgtgatgctccggtgtcgattgcagacccagaaatattaaataccaatagtgacctagcgggtgcagttatgttcgatgaaactattttgtgagaacatattgctgcaactggtatgtgcatttctttcccgagggattgtcgaaataatacatccccctgtctgtagacttatttcaagaattcctcacaagtgttacattcagcaaggcaataacaatatgatatcgtagaatggagattatcatgaaaaacctggatcttaccgcgctgctgcgcggcaacccctatcccggacgcggcatcgtgctgggcagctcccccgacggggagaagtccgtcattgcctattttatcatgggacgcagcgagaactcccgcaaccgggtcttcgtggagacccctgacggcatccgcacccaggcctttgacccctccaaaatgaccgacccctcccttattatctacgcccctgtgcgggtgttcggcacctccaccatcgtcaccaacggcgaccagaccgacaccatccgcgaggggctggccgcgggcaagacctttgcccaggccctccacacccgaacctttgagcccgacgcccccaactacaccccccgtatctccgggctggtaaaaaagaacggcgactacaccctctccatcctcaagagcgcggacggcgatcccgcctcctgccgccggtatttcttcgcctatgaggccccccgcgccgggcagggccatttcatccacacctacatgggcgacggcacccccctgccctcctttgtgggggaaccggagcaggtggaaatcccctgcggcacccccgcggagcttgccgatctgttgtgggacagcctcaacgcggagaacaaggtctctctctttgtgcgctacatcgaccggaaaaccggagattgggagactgtgatcaaaaacaagcatgcatcagcctgacggacggccgcaggccgccccagatacacacagtccgagggcggcccgcggccgccgctcacttgacggaggtttatcgcaatgacagaactggaactgaaatacggctgcaaccccaaccagaagccggcccgcatctttatggaggagggcgagctgcctatccaggtgctcaacggaaagccgggctacatcaactttctggacgccttcaactcctggcagttggtgaaagaactaaaggaggccaccggcctgcccgccgccgcatccttcaagcacgtctcccccgctggcgccgccgtgggtacccccctcaccgacgtggagcggaaaatctactttgccgaggatatggagctctcccccatcgcctgcgcctatgtccgcgcccggggcgctgaccggctgtgctcctacggcgactgggccgccctctccgatgtgtgcgacgccgacaccgcccgctacctggccctggaggtatccgacggcgtgatcgcccctggctacaccgacgaggccctggccatcctcaaaaccaagcgcaagggcggctataatgtggtgcagatcgacccagactatgcccccaaggccgtggagcacaaggacgtcttcggtatcaccttcgagcagggccgcaacagcttcgccatcagcgaggccctgctggacaacatcgtcactgacaacaaggagctgcccgagtccgccaagcgggacatgctcatcgccctcatcaccctgaagtacacccagtccaactccgtctgctatgtgaaggacggccaggccatcggcgtgggcgcgggccagcagagccgcatccactgtacccgtctggcggggaacaaagcggacaactggctcctgcggcagcatcccaaggtgctgggcctctccttcgtggacggcatccgccgtcccgaccgggacaacgccatcgacgtctacctctccgacgagtacgaggacgtgctggccgacggcgtgtggcagaacacctttgaaatccggcccgaggtgctcacggcggaggagaaaaaggagtggatcgcccgccagtcgggcgtgaccgtgggctccgacgccttcttccccttcggcgacaatgtggagcgtgcccgcaagagcggcgtacagtacatcgtccagcccggcggctccatccgggacgaccatgtcatcgccacctgcaacaagtacggcatcgtcatggcctttaccggtatgcggctgttccaccactaatggaggcacaccgctacggtctgagcgccgccgctctcaaatatctggccgcgctgtttatgctggtggatcatatcgggatggtctttcccaccatgctgaccgagctgggcctgcccacctgggcggatgggctgccccggctcatcgggcggctggcctttcccattttcgcctacttcgtggccgagggctgccgccgcacccgcttcttccaccgctatctcatccggctgggagcgtgtgcccttctctcccaggcgcccttcaccctggccaccggcgtctggggcggaagtgtgctcctcaccttcttcctcagcgccggagccatctatggctatgagcgtctgtccaaagcagagcacggcccagccgtgtcggccattcccctgttcgcggcctgtgcgctggcactcctgctcaacgtggactacggcttccccgccgtgctcctgatcttcgccctttacctctgcggtgataatcgccgccgaaagctgctctgtctgggagtcggtctggctctcctctatctgctctaccagcccctgatagggctgctctccctcccactgttccggccggactggatggcgggctatctgctccatgccctccctgtgtttgctctctacgcattgtgcgccgaggcatccctccttctgttggcctggtaccgtgggcaattgggtgtgcagagcaagtggttcttttatgtgttctatcccgcgcatctgctgggcctatgggccctggggctggcgctgaattgaggtgtaagcaatgaatgttttgattgtcggcggcggcgggcgggagcacgccatcgcctgggcactgtctaaaagtgagcaagtggaacagctttactgcgcccccggcaacggcggtatcgccgccctggcccagtgtgtccccctctccgccaccgacgtggatggagtggtggcctgggcccagacccattccattgattttgtggtggtggcgccggacgatcccctcgccctgggcatggtggatgccctggaggatgcgggcattcccgccttcggcccccgggcggacgccgccatcatcgaggccagcaaaatcttttccaagaatctgatggccaagtaccacattccaaccgcaaagtatcaaacctttacagagctcgcccctgctctggcctacattgaggccgagggcgcgcccatcgtggtgaaggctgacggcctggccctgggcaagggcgttatcgtggcccagacggtagccgaagcccaggaggccgcccgttccatgatggacggccgcaagttcggccaggccggcgccagggtggtcatcgaggagtgtatgaccggcccggaggtcaccgtgttggctttctgcgacggggagcatctggttcccatgccctcctcccaggatcacaagcgggcctttgacggcaaccagggccccaacaccggcggcatgggcgccatctccccctctcccaactacacgcccgaggtggcccgccgctgtatggaggagatcttcctgcccacggtggccgccctcaaggcggagggccgccccttccagggagtgctctactttggcctgatgctcacccccgacggccccaaggtggtggagtacaatgcccgcttcggcgatcccgaatgccaggcggtgctctccctgctggagaccgatctgctggacatcttcctggcctgccgtaacggcactttggaccatctgaacatccggtggaaggacggggcggcctgttgtctggtgctggcctccggcggctaccccggctcctacgccaagggtctgcccatcaccggcctggaggatgccggacagcaggccgtggttttccatgcgggcaccaaactgggagacgacggcacggtgttcaccaacggcggccgggtgctgggcgtcaccgccaccgggccggatctgaacgccgcgatcgacagcgcctacgccgccgcggggcacatccacttccaggacatgcacttccgcaccgacattggccgggtttgaagcccttgcgccccaaggggtgctactgctggttgtcaaattggatgctccggttggttgcgtctatccgggccgttctgctaagatgagcccaaggaaaaaggaggttcatcaccatggaatttcgtgaacggctctaccagctccgcaaagggcggggcatctcccaggaggagctggcccacaccgtaggggtctcccggcaggcggtacagaagtgggaggcgggggccgccaccccggatctcggcaacctgtccgccttggccgactattttgtcgtcagtttggactatctggtgcggggaatcgagcccgaaaagcccgcagccccttcccctcagcaggctgtcatccaaaactactatacaggctggagctatgagttccgcagccgccgcaccctcctcggcctgccgctggtgcatatcaacctacgggatcgtgggctctgccgggccaagggaatcattgccatcggcaacgtggccaccggttttctggccattggcggtttttccgccggcctgctgtccatcggcggcctgggtgtcggactactgaccctgggcggactgtccgtggggatcgccgccgcgggcggactggccgccggtctcctgcttgccctgggcggcggtgcgttcagcctggggctggcacttggcggctgcgccgtcagccagtctgtcgccatcggcggggcggcggtgggacagtacgccgccggaggcgccgcactcggctccacccttgccatcggccaggacgcccaatcctcctccggcgggctggccctcaccctggaccagcttcacggctactcccccgaggtcctgttccagatgatccacgcccagctccccgaggcccctgagtgggtcgtccgcctgcttctctgcgtttgcccctgaaaaagagcccttgcgcggccgcgcaagggctcttcccttatctgtcttctctgtaagctgaactgtgtccacccgtcccggtgcccctatcatcaccgttgagaaatctccatgtatagaaggggatacggcgctccctgttcatcgcagtctgttcttttatatacacagaatcccatgtgctcataaaaaccctttgcctctgggttctgttcattgaccgtcacgctcttaaccccacaatgcttcatcccatattcaacgagcagccttcccaagccgtttgtccggaacgagaaacagcatttcaaggcggccgccatctactcccataaatccgaccggagctccgctttcctctctggcgatgacaagccttggaaccaaattcagcgccccgggaacgtattccttgatctgttctatttcacggctggataaaaagtggtgcgttgccctcacggactgctcccaaattttcagaagctgctggagcaatacaggctgccgttccttcacttccgctatttccgtatcctcaccccatttgattgtatttccaacatcagcctgccacacaaatgctgcaacttcggtcagccggcttgcttatttctcatccagtgggagtgggtccggtgcacggtgggtcagctcggcacagcaggacttggtcagcttgtccagtccctcatcctggcgggccagctccccggagatctgctccagcgtctgccgcacctggtccagctctccacaggccctggaaaccgccgcgtccatatcagcgcgcaggcggccgtaattcccctgtacccggttcagccactgctccacctcggcccgtgtcttgcggatgcgctcctccgcctccgcctgaaccgcctgggcgcggcagtgggcctccagctcgataccggcggtgcggtccttcaccttttcataggccgccgccgccggcccagccttggccagcttttcctcgctctccttcagccgggcctcggtatcgcccaaccgctgcttcgccttctccagctcttcctccagcagggagatctccagcttgcgctcctccgcctccttgtgggcggcggccagctccccccgcagggcctggagctccttctccttggcctccgtctgggcctgggccgcggcgatctcctccgcctgggccgccttggccgcctcggcttccgccagctcccgccggacagcctccagcttctcccggtgctcctggttcgacgtctcaatataattcagcacatcctgcttctgaaacccgccaaaggtggacgtgcggaactgaagttcggtgtcgctcatacggcacaccccttttctacagaatcagagttattttatcacaattcccgctataacacaagcgccactcagaccatagctatctgcacaattctttcttctccctacttgcggttttgcgcaaaatcaactataattatagttaatattacggcaaaatgtccggtctatcgggctgatccggcggtattctacgttcagaagcatttgagaacggaggtagttttcccatgacctatctggcccacattgccggcgacggccggaaacagacggcggcggagcacctcaacgggacggcggagcgttgcgctctctttgccgctcccttcggcgcggaggagctggggcggctggccggcctgagccacgacctcggaaaatactccatggaatttcagcgccgccttgccggcggccccaaggtggatcacgccaccgccggcgcctttgcctgctggcgtatggggcagcctctggccgcctttgcggcggcgggacaccacggcggcctcccggacggaggcactcagggagattccccggatgccggaacctttttgggacggatgaagcgcgcggaacggggcgggctgcccgactgctccccctggacggaagagatcaccctcccctcccccgctcctcccccctgcggcgcggagccgctgtccctgatgttctttacccggatgctgttttcctgtctgacggacgcggatttcctggacacggaggcctttatggacggctccccccggccggagcaccccgcccctctggatgacctttgggagcggctccagcgccatatctccggctggtttccccctcagggagagctgaactcccgccgctgcgccgttctgaagcagtgtatccggatgggcaaaacccagccccccggcctgtttaccctcaccgtccccaccgggggcggaaagacggtggcctctctggccttcgccctggcccaggctagggccaggggactgaggcggatcatctatgtgatcccctacacctccatcatcgagcagaccgcccaggagttccgaaccatcctgggggcggagaacgtgctggagcaccactccaacgccgcctatgaaatcgacgccgaggccactccaaaaacggtccgcctggcccaggccgcggagaactgggacatgcccgtggtggtgaccacggcggtgcagttctttgaatccctctatgccaaccgcccctcccagtgccgcaagctccacaacctggccggaagcgtcattctcttcgacgaggcccagctgctcccccttccctgcctgcggccatgcgtccacgccatcgcccagctggttcagcattatggcgcatccgccgtcctctgtaccgccacccagcccgcactggggccgctctttgcggagtttctgcccggccgtccggcagtggagctctgtccgccggagctgtgtcccccggaacccttccgccgggtgtgcttccgccaggcgggccggctggactgggacacactgtccggacagctccagcagcacgagcaggtgctctgcgttgtcaacagccgcaagagcgcccaggagatctttacgcggctctccggcgaggggaactttcacctctctaccctcatgtatcccgcccaccggcgcgccaagctggaggagatccgccgccggctcaaggaggggctcccctgccgggtgatctccacctccctgatcgaggccggggtggatgtagactttccagccgtgttccgggaagaggcgggcctggactccatcctccaggccgccggccggtgcaaccgggaggggaagcgccccgtctcggagagcatcgtcacccttttccggggggaagccgtcccgccgcctctgtttcagaccgctatcggcgcgggccgcatggtgctggagcagtatgacgacatcgcctctcaggaggcgatccaggcctacttccatacgctcctggagctgaagggggcggaagcgcaggacatatatggtattctgcccaagattcgcacggagctgttccccttccagtccgtggcggagcgcttccacatgatcgacagccccacccggacggtctacatcccattgggcgcgggcgcggagctggtcggacggcttcgggccggagagcggagccggacgctgttccgccagctcggccaatacggcgtatctatctacgaagagcacttcgccgccctggatcaggccggggatctggagcggctggaggatggctcctctatccttgccaccctgtccctctattcggaggaaaccggactgtctctggaggccgactgtggaaagggactgtttatctaaaagaaggtggggaagcttaacgcttccccaccaccccggcgaaatcttttctaaatcaatatttcaatccacgcatttcagcgacatattttagtataacacaaaagcaactatgtttgcaaatcactttttaatttttattgatttagaaaagattatgttgatctatggacagtaacgtgttatattgtgtctagagcagaatgaaaatcagaaaggagtgaacgcctatgtctattcagctggaggtgtggggagactatgccctcttttctcgtatagagttcaaaaccgaacgagtcagctacgatgtcatgaccccctccgccgcccgggggctggtggaggcaatctactggcatcctgggctgaggtggatcatcgaccgcatccatgtgtgcgctcccatccgcttcaccaatctgcggcgcaacgaggtcaagtccactctctccgcccgctcggcccggacggtgatggagcggggcaagggagagctgtatctgtgcacatccgacgacattcagcagcgggccgccctgctgctgcgggatgtgcggtatgtcattgaggcccattttgacatgaccagtcaggccgcccccggagataatccgggcaagtttcaggacattgtcaagcgccgcatcaaaaaggggcagttctaccaccagccctgctttggctgccgtgagtttcccgcccatttccactggtgtgaggagctacccccctgcccgaaggagctgctgggagagcgcgatctgggctggatcctgtgggatatggactatacaaatccggaggatatccgccccctgttcttccgcggcaccctgcgggacggggtgctggaggtgcccgcccgggacagcggggaggtgcggggatgattttgcaggcgttgacccagtattacgaaactctggtgcaggcaggcgtgcttgccggccccggctgggggccggtcaaggcctcctatgcactctctatcgccgcagacgggacgctggagcaggttacgtccattcagacggagcagctccgagggaaaaagactgtgctcgccccccaggtgctcacgctccctgctccggtcaaacgcacagtagggatcgccgccaattttctgtgcgataactccggctacattttgggcgcagacaataagggcaaccctcagcgctcccttgcgtgctttgccgcctgcaaggcgcttcatacctctgttttggggggtgtcgcttccccctccgctcaggccctgctggccttcttccgcacctggatcccggagtatacactggagcatcccgctctggcagagtatcgggaggacatactgtccggggccaatctgctcttccgttataatggaagctatatccacgaagatcccgagattcggcgtgcctgggagcgccgctatcgcgccgataccgacagcccaagaggtatctgcctcgtcaccggcgaggaagggccggtggagtccgttcacccggccatcaggaatgtgtccggcgcccaatccagcggcgcagctctggtctctttcaacgcaccggcgttctgttcctacggcaaggagcagaacctcaacgcccctaccggcaaatacgccgccttcgcctacacggccgcccttaattacctgctggccgaccgggagcacgtctaccggctcggggacgccaccgtcgtctgctgggccaaaggcggcggcgacgcctaccaggcctttttcggcggggctctgctgggggcgccgacgccgtacagcgccgcggatctccgcggcatgaccgcacagctgtgccagggaatccccgtggactttcaggaggacaagctcgaccccaacatggatttctatatcctaggcctctcccccaacgccgcccggctgtcagtgcgctttttcctccacaataccttccggggattcctggaacacatccagtcccactaccggcggctggagatcattcgcccctcctatgacaagtttgagaccctgcccatctggaagctgctggacgaaacggtaaaccagaacgcccgggacaagtcccccgcccccgatctggccggcgaggttctgcgggcggtgctgaacgacacccgatatccggccacgctgctcaacggcgtcgccctccgcatccgggcggaacgggaggtcacccggggccgggccgccattctgaaagcctattacacaaagctggccgagagtaccggccgcgaacatcctgatataccggaggaggtcttacaagtgtctctcaatcctgacgccaccaatgtcccctatctcctggggcggctgttctccgtgctggaggccgtccaggccgctgccaaccccggcatcaacgccaccatccgcgacaagtatttcagcggagcgtcggctacccctgccgcggtattccccgtcctggtcaatctggctcagaagcatctgaaaaagctgaacgccgccaaccgcggtctctccatcgcctatgagaagcagatgaccgagctgctctccaagctgggtacggaataccccgcccacctgaatctcccccagcagggttcgttccagctgggttactatttccagactcaggcccgctatcagaagaaggaggagaagtaatatgtccgagcctatcaaaaaccgctatgaatttgtcatcctgttcgacgtggagaacggcaatcccaacggggatccggacgcgggcaatatgccccgggtggatccggagaccggcctgggcattgtcaccgacgtgtgcctgaagcggaagatccgcaactatgtggagacggtgaaggaggacgccaccggctaccgcatctatgtcaaggacggcgtgcctctcaaccgcagcgacgccgaggcctacgccgccctggacgtggacgaaaaaaccgtcaaggaaaagaaaaaggccgatcccgacctggatcggaaagtccgggactggatgtgcgccaacttctacgatgtgcgcaccttcggcgcggtgatgaccacctttgtgaaggccgctctcaactgcggccaggtgcgggggccggtgcagctgggctttgcccgcagcgtggaacccgtcattcctcaggaggtcaccatcacccgcgtggccatcaccaccgaggccgacgcggagaaaaagggcactgagatggggagaaagtatgttatcccctatggtctctatcgctgcgagggctacgtctccgccaacctggcccgcaagaccaccggcttctccgaggaggatctgtccctgctgtgggaggcaatcctcaatatgttcgagcacgaccactccgccgcacggggcaagatggccgtgcgggagctgattgtcttccagcacgacagcgagctgggctgcgccccggcctggaagctctttgaagcggtacatgtcacccggagggatcccggtgatcccgcccctgcccgttcctatcaggattactccgtcacggtggacgaggccgccctccccgccggaatcacctgccggcggatggggtgaacttccgtgaggaggagtttctccccctctccggccttcagcactttgccttctgccgccgccagtgggcgctgatccatctggaacagcagtggcaggaaaatctgcgcaccatagagggccagctcttccatgaccgcgcccacgacgcctcccttcgggagcggcggggcgatactctggttctccgcagtctggcggtggcctcccctaccctgggactgtccggccagtgcgacgtggtcgaatttcgcgccgcgccggagggcgtccccctcgcgggcgaggagggccgctggctgcccttccccgtggagtacaagcgcggccgtccaaagcctcaccaggcggacgagcttcaactgtgcgcccaagccatgtgtctggaggaaatgctgtgctgccccgtcccggagggctcgctctactacggcgaaacccgccggcgcactccggtgcgcttctctccggagctgcgccgtcaggttcagtccgccgcagaggagatgcatcagctcttccggcggggccacacccccaaagccaggccgggcaagttctgcggcgcctgttctctgaaggagctgtgcctgccgcagctgatccggcgggagtccgtatccgattatctgaaccgggccatggaggaaacgccatgagacaactgttgaacaccctcttcgtgacctcggaggacatctatctgtccctggacggcgaaaatgtggtcgccagccgggaacatcaggaggccgcccgctacccgctccataccttgagcggcattgtctccttctcctaccccggggcctctcccgccctgatgggcgcctgcgccgagcgcggtatctctctggccttctgcacgccgcgcgggcggtttctggcccggatcgccgggagtacctcgggaaacgtcctgctccggcgtgcccagtaccgcacggcggacgagctctccgccagttgccgcattgcccgcagtatgatcttcggcaaggtctataacgcccgctggagcatcgagcgcacccgaagagatcacgggctccggctggattccgccagcctgacagcctccgcgtctcatctgaaagagcttctcccccaaatcgccgcggccgcctctctcgagcatctgcgcggcctggagggcgccggagcaaccctctatttcgggcagttcgaccagctgatcttgggtgaaaagcccctcttttcctaccaaagccgcagccgccgtccgccgcgggatcctgtcaacgccctgctctcctttgtctacagtctgctgtcgcacgactgcgcctccgcactggagagcgtggggctggattcctacgtgggctttctccaccgggatcgccccggccgggcctctctggccctggatctgatggaggagctgcgcccctgtatggccgaccggttcgttttaaccctgataaacaaccgaatagtggggcggcaggactttgactttctggagaatggggcggtctttttgagtgactccggccgcagagccgttctgaagcgctggcaggagcggaaaaaggagtctctaacccacccctatctccaggaaaagctctcttggggactggttccctatctccaggcgctgcttctggcccgctgcctccgcggcgacctagatgcctatccgccctttttgtggaagtgaggccattatgctggttttgattacctacgacgtcaatacggcggatgccgccgggcgcaagcgcctgcggcagatcgccaagcagtgcgtcaactacggccagcgggtccagaattccgtctttgagtgcaagctggacccggcccagtacaaactccttcaggccaagctgtgcgcaatcatggaccccgaacgggacagtctccgcttttattccttgggaaatcgctatgagcagaagatcgaacactttggctgtaagcagacctaccttccagacgaacctttgattttgtagcgtgcgaagtccaagatgacacgccttctccggccggttcgcacccaaaaagcataaaggaaagcttaatggagcataggcgcgtttgtttttgtatgctcagccttcttccccttgtgcaaataagcgaattgagccaagcaaactctctgctctttggtaaagtttgctgtcgcacccctcgcggggtgcgtggattgaaattgatgggaaaggagcatccggtggaagcagcggcggtcgcacccctcgcggggtgcgtggattgaaatcggttccggcctgggaggcagctcccggggcgtcgtcgcacccctcgcggggtgcgtggattgaaataagaccttcatgtcccgccgggaatacaagatcgtcgcacccctcgcggggtgcgtggattgaaataccccgccatcatcgaccaggaaacctatgacaaggtcgcacccctcgcggggtgcgtggattgaaattttaatgtatttgctgcggtatttgttgaggttccgcggtcgcacccctcgcggggtgcgtggattgaaatcaacctccacggcacccgggcggaggtgctggtgcggtcgcacccctcgcggggtgcgtggattgaaatcttccaatccgggactggtggtgggtcagatgcggtcgcacccctcgcggggtgcgtggattgaaattctgtacgccatctcgtccatgcggtagtcgtgctcaagtcgcacccctcgcggggtgcgtggattgaaataacaccgctctggctggtatgcaaagtgctccatggtcgcacccctcgcggggtgcgtggattgaaattattaggccgcagtttcggcatctgacgtaatccgtcgcacccctcgcggggtgcgtggattgaaataacgtagtctgagtaaatcatgttgagagctgccgtcgcacccctcgcggggtgcgtggattgaaatcgggagctgacctcggatctgtctgccacggcggaggtcgcacccctcgcggggtgcgtggattgaaataggtccggcaagatgtcgtaccccagccccgcaggtcgcacccctcgcggggtgcgtggattgaaatccaaatgggctgacggtttgccagtggtgccccgtcgcacccctcgcggggtgcgtggattgaaattatgaactcgtcggcatatgtactttgccctgacgtcgcacccctcgcggggtgcgtggattgaaatacggcggaggaggtctcccggtttaccggcatcccgtcgcacccctcgcggggtgcgtggattgaaataatgctctgggcgctcagttggcctcctgctgctgtcgcacccctcgcggggtgcgtggattgaaatgctgagcatgctccgctctataaagagatcgccatggagtcgcacccctcgcggggtgcgtggattgaaattgagaaaacaggcggttgttaagcgcccaccgaagtcgcacccctcgcggggtgcgtggattgaaatacaactggatttgcgtgtatctcaagcaggcggggtcgcacccctcgcggggtgcgtggattgaaattagcaaactcaagcaaaatcaagcaaagtctagcagtcgcacccctcgcggggtgcgtggattgaaatcaccatattgcccagctcattccatgtcagcgccgtcgcacccctcgcggggtgcgtggattgaaatttatggccgtggctccagctatgcaaaccgtggcgtcgcacccctcgcggggtgcgtggattgaaatccgccgtcttggtatgtgtatctctccatgctcagtcgcacccctcgcggggtgcgtggattgaaatacctccacccgaatacatcccccgtcccaaagccgtcgtacccctcgcggggtgcgtggattgaaatcagaagggacataagcaaccggccacactccgcttctgtcgcacccctcgcggggtgcgtggattgaaattcaatccagcgggcaatctgccgctgctccggtgtgtcgcacccctcgcggggtgcgtggattgaaattctgcggccggggacgccacggcggaggcggtcaagtcgcacccctcgcggggtgcgtggattgaaattgttatgcggcggcggcctcctctccggccagccgcgtcgcacccctcgcggggtgcgtggattgaaatttcgtcgccaggaattgctggcccagtccgccggggtcgcacccctcgcggggtgcgtggattgaaatcagccgatatcctcggcgacggcctcggcggcctgtcgcacccctcgcggggtgcgtggattgaaataatgcatcataggaacgttgtattttggtgcggacgtcgcacccctcgcggggtgcgtggattgaaatggttatgacgaagtgcagattgaaccgggtgagaggtcgcacccctcgcggggtgcgtggattgaaattgtccctcaggtaacggccccggccggcggttgggtcgcacccctcgcggggtgcgtggattgaaatgacgtagagcaacccgaagttatggccgagattaaaggtcgcacccctcgcggggtgcgtggattgaaatggcattgagacgggggccaacagcttcggctacctgtcgcacccctcacggggtgcggggattgaaatagtgagaaatacgacatcaccaagcatccccggtataagtcgcacccctcacggggtgcgtgggttgaaatcagcggctggaccgcggccacatggagtatgtctgtcgcccccctcacggggtgcgtggattaacccgtcttacagaggcgcctgagccgtttacaggagccaccgcataggggcgcgggttgattcagatttttcaccccgcgcctctattgtttgcgcttcttttcgttgactggtctagtagggaatgatataataggatgattatgacaaaaactatggtgggaagatcgtattatgtggatttcaactgactggaaggactatgaactgctggactgcggcggcggcgagcggctggagcgctggggcaagtatctgttggtgcggcccgatcctcaggccatctggcgtccggaggggcggcatcccggatggcggaggcacgacgcccggtaccagcgctcctccaccggagggggccagtgggtcaagaaggaactgccccagcgctggacattgggttacaaggggctgaccctcaacatcaagcctatgaacttcaagcacaccggcgtctttccggagcaggcggccaactgggatttcgccatggagcgcatccgttccgccgggcggcccatccgggtgctcaacctctttgcctacaccggcgcggcctcggtggcctgcgcggcggcgggagccgccgtgtgccacgtggacgcggccaagggcatggtgagctgggcgcgggagaacgcggcctcctccggcctgtccgacgcgcccatccgctggatcgtggacgactgcgccaagttcgtggagcgggagatccgccggggccgccggtacgatgcagtcatcatggaccccccctcctacggccggggtccctccggcgagatctggaagctggaggagaacctcttcccttttgtggaactggtagccggggtgctctcggacgaacccctgtttttcctcattaactcctatactacggggctagccccctcggtactgacctacctgctggagactctggtagcccgccggtacggcggccgcaccgagagccaggagctgggcctgcccgtcaccgccaccggcctggccctcccctgcggggcttcgggccgctggaccgccgaataaggagtgatgtgctatatgaaccatgcaatcattcaaacagaggggctccgcttcgcctatgcggaggagggggcggtcaacccctttgtgctggacggggtaagcctggacatcgaggagggctccttcgtggctgtgctggggcacaacggctccggcaagtccaccctggccaagcacctgaacgccatcctgctgccctccggcggcaaagtctacgtggacggcatcgacaccgccgacgaggataaactgctggacatccgccgcaccgtgggcatggtattccagaacccggacaaccagatcgttgccaacgtggtggaggaggacgtggccttcgcccctgagaatctgggggtgcccccggcggagatccgccggagggtggacgacgccctcaaggccgtgggcatgtacgagtaccgggagcacgccccccacctgctctccggcggacagaaacagcgggtggccattgccggtgtcatcgctatggcgccccgctgcattgtgctggacgagcccaccgccatgctggaccccatcggccgggcggaggtcatgaagaccatccgtgagctcaaccgctcctccggcgtgacggtagtgctcatcacccaccatatggacgaggccgcccaggccgaccggctggtggtcatggccaagggccgggtggtggccgacggcaccccccggaaggtctttcagcgggtggaggagttgaaggccgtgggcctcactgtccccgagaccaccgagctgctgtggcagctccggcaggcgggggtggacgttcctctggacgcactgagcgacgaggaatgtgcccaggcgctctttgatctgctgcaaacacgggcgtgacctgcgggcatgcaccaaatgataaaggaatgaagccattggaaccgatcattcagacggagcgcctgagccacatctattccgccggcaccccctttgaacacggggccctggtggacgtggactttaccgcctaccgcggggagtacctgggcatcatcggccacaccggctcgggcaaatccaccctcatccagcacctcaacgggctgctcaaacctacctccggccgcgtcctcttcgagggccgggatatctgggagagcaaggagcgcacccgccaaacccgcttccaggtgggactggtgtttcagtacccggagtaccagctctttgaggagaccatctataaggatatcgccttcggccctaaaaacatggggctggacgagagggaggtcgaccgccgggtgcgcgaggccgcccagtttgttgggttgcgggaggacatgctggaaaaatcccccttcgagctgtccggcggacaaaagcgccgggtcgccatcgccggcgttattgccatggagccctccgtgctcatactggacgagcccaccgccggcctggacccagttggcgtggcgtccatcctgggcaacatccacgactatcacacggccaaaaacgccactatcatcatcgtttcccactccatggaggaagtggcccggacggtggaccggctggtggtgatcaacgacggccggattcccttctccggcgcgccccgggaggtctttgcccacggggacgagctggaggccatgggcttgggcgtgcccgccatgacccgggtgttccaccgcctgcgggccatgggcgtggacatcgacccgtcggtctacaccacggagcaggccagagacgccgtcctggccaagctggcccgtgccggtcagcagaagcagtctgcttccggcgaaaggggggcggtgtaagtggcattgaaggacattaccctgggccagtacttcccaggcaacaccctgcttcaccggctggacccccgcaccaagctgctctttaccgtggcctatatcgtggctctgtttctggccaagcatgtggtgggctatgcggttctcttcgtcctgctggcggtgctgatcgccgtgtccaaggtgggcatcaagagcatcctacgggggatgaagcctattttgatcatcgtcattatcaccggcctgctcaacctgttctacacccggggcgagggagcgccgctggtctccttctggatctttaccatctatccggagggcatctgggcggcggtgtttatggtgctacgcatcgccatgctcatcacctgcaccttcctgctgacctataccacctcccccatcctgctcaccgacggcctggaaaaactgatgggaccgctgaaaaccctccatgtgccggtgcatgagctgtccatgatgatgtccatcgccttgcgcttcatccctaccctcatcgaggagacggataagatcatgtccgctcagaaggcccgcggcgccgacttcgataccggcaacctgctccagaaggccaaagccctggtgcccctgctggtacccctgttcatttctgccttccgccgggccgacgagcttgccattgccatggagtgccgctgctaccacggcggagagggccgcacccgcctgcgccagctcaagctaaagggcatcgacatcgccgctctggtcttcgcggtgcttctgtgtgtcggcatcggcgtgctgcggcactttggactttaagaaaaaaataatgggattttaaagctttatgagaaatattgcgctacgcttgatgtatgtggggacggcctatcacggctggcaggttcaaaagaacgccgtcaccgtggcggagacgctggaacactccctggcctcggtggtgggccacccggtcaaatgtaccggcgcgggccgcactgacgccggcgtgcacgcggagacctatatcgccaatttccgcacctcctcccgtatcccctgcgaccggattcccctggcggtgaacacccggctgcccgatgacatcgtggtgataaaggctaccgaggtgcccggcggcttcaacgccatcggctcctgcctgaaaaaggagtacacttaccgcatctacaattcccacatacggaacgcattttacgtcaaccgcgcctggttctatcccaaacacctggacgagactgtgatgcagcgtgcggcctcccactttgtgggtacccacgacttcgcggctgttcggagcgtcggcaccgaaacccgcaccaccgtgcgcacggttcactactttaatatctcccgcagcggagaactgatcgagtgccgggtgtgcgccgacggctttctctacaacatggtgcgcgccatggtgggcacttgtgtctacgccgccgacggcaaattctcccccgatgacgtgcccgccattctggaaggccgcaaccgcaccgccgccgggcctactgtacccgccggggggctctatatgaccaaactgtggtatcaggaggacgtcctatagctcactctcctgcccttatgtgaactctggaggtatttctatgcctgctgcactgtggttcgccatcggcgccgccatcctctgcgccataacgtcagtctatttgggaacgaaaaaataattctattgcagggcctgcacaagcgccccttttatctgtgccgcttatgcctctgccgcatgaaatccatgaaggagcatagaatggaagatatcaacggcagccgtcccaacgccgcccccaaacccaaaaagcgccccaaccgttttgtccggttcctggcctttctggtgacactggccctgatggtgggcgcggtcgccctggtggccaactatgacaagctgaattttgacttcatcaagcgctggttctcctaccgcaccttggcgcgcaacgacagcggacaggcggagtcctttcattttgttggggactcctccaacgcctttgccgtcgtggacggagatcttctggtctgctcccccaacaccatccggctgtattcgggcagcggtcaggcctttgtggatcaggccgtttccatgacaaatcctgtggtcagcaccgcaggcggcaccgctctggtctatgatgccggcggccgggagctctttgtctactccggtcgggaggaggtcttttccctcacccaagaggacggccaggccctcctgtccgccgatgtgaaccagaacggctggctggccgtcaccagccaggagagcgggcacaagggctcagtgacggtctacgacaacagctacagtcctctggtgcgcttcagcctgtccaaccgttttgtgatggacgccgccgttgccccggacaacaaatcggtggctctgctcaccatcggccttacggacggtaattttgagagccgggtggacctctatcgcctggaccgcacggaggaggaaacggagccggactggacctgcccggtgggcaacaacgcgattcttgatctgcgctggaccagcagcggcatttgggccctgggtgagtccggactctatattgtctccggggacggcgcgctctccggctcctacgactacggggggcgctacctaaaggccttttccctggacggggacggcaccgcctccctcctgctggggaaataccgggcgggcagtacggcggagctgctcaccataaacgcttcaggtgagctggccgctgccctccccgtagaggagcaggtactctctctctccgctgccgggcggtatgtcggcgtactcaccgccgaccggctggatatctacagccaggatctggagctctataacaccctgaacggcacacagaacgcacaaaaggttttacagcgctccgacggcagcgccatgctcattgacagcaccaccgcccgcctctatgtccctcaataaattcggaggaaaaccctatggcttatctgattgctgacggcctgattctggccgtgctgctgctcttcgccctggtgggcgcccaccgggggttcatcctgtccctgtgcggtctgctggccgtgctggtggcttttgtgggcgccagcttcgccgcccgcaccctctcccccatggtggcggatgccttagagcccaaattcgcctcggccatcgaggaacagctcaacgcctccatccagcagcaagtggcggaggagggctccgctgccctgtcccccgacgacgtgcctctggacggggtactgaacgccctgcgggagatgggcttttatgaaaccctgatcaacaccgtggacaaggccgtggagaacggaatgacctccgtggccgcgagcgcggccgccgcagttgcggctgccatcgcccagtccgccgcctacctgatcctctttctgctgggtttcgccctcattctcatcgcctggaagctgatcagccatgccctggatctggtggcgcggctgcccggcctccacttcctgaacaaaacctgcggcgccctgtttggtctggtacaggcctgtgtccttctgtttgtggcggcctggctgctgcaattcttcgggcacgtactgcctgagtccctggtaaaccaaacccacctgctgaaattcttcatgactaccaatcccctctccctgctcagcggcctgtaatcccgccctaaaccaaagaaaatcaggtgaagctcctatgtccatcccaaaccttctctccctcctccggctagtactggtgccggtctttgccgtcgtcttctttcagcccgctccagacgctcatcgctgggcggtgctgatctatttaaccgccttcctcaccgacgtagctgacggctggatcgcccggcacttcaaccagatcaccaagctggggcggattctggaccctctggcggacaagctgatgacctttacggtcattatctgcatcaccgccgacggcatcatccctctgtgggcggtcgtcgtctttttcctaaaggagctgaccatggccatcggcggctatctcatgtaccagaaactgggtgatgtgatctcctccaactggctgggcaagacctctaccggcgtcttttttgtggtctgcgccgcgctggtgctcttccctgccatcccacgcccctgggccaccggactgatctccttcgccctggccctcactctggccgccctgtgcagttatatcttccagtaccggaaggctttaaagaaaagaaaacaggcgtgattcatacgcagttcataatttcgaattagaatcatttctctgaggggactattctcccctccaaaggagctgaatacaaatgcaacccacactttgttccagatgccataaaaatgtggccgtgatctttatccagaagatggagggcgggaccaccaaaagcgagggcctctgcctcaagtgcgcgaaggaaatgggcatcaagcccgtggaagatatgatgcagaagatgggcatcagtgacgaggatctggagggcctgaccaatgagatgatgtccgccttcggcggcgccgagggcatggagggcctgatgtccgcggaggaggccgacgaagacgaggaggacgagggcaaaaccgccaccttccccttcctcaacaagctctttggctcggctcaaagcccccaggcccagccccctgagcgggagcagccccgcgccgagcgcggagacaaggacaagaagggcgaaaagcagcccaagcgcaagtttttggagaattactgcatctccctgactcagaaggccgctgacggcaagctggaccgcatcatcggccgggacgaggagatccagcgcaccatccagatcctcaaccgccgccagaagaacaacccctgtctgatcggcgagcccggcgtgggcaagaccgccattgcggaggggctggcccagaagatctaccagcgggacgtaccctacaagctgctggacaaggaggtctacctgctggatctcaccgccctggtggcgggcacccagttccgcggccaatttgagagccgcatgaagggcctcatcgaggagatcaagaagctgggcaacatcatcctggtcatcgacgaggtgcacaacatcgtgggcgccggcgacgccgagggctccatgaacgccgccaacattctcaagcccgccctgagccggggcgagattcaggtcattggcgccaccactctcaccgagtaccgcaagtacattgagaaggactccgccctggagcggcgtttccagcctgtcatggtggaggagccctccatcgacgactccatcaggatcatccagggtatcgccccttactacgagaagtaccactttgtctccatttcccccgagatgtgccgcctggccgtgaccatgagtgagcggtacatcaccgaccgtttcctgcccgacaaggccatcgacctcattgacgaggcctgctccgacgtcaacctccacaacaagaccttggcccgggaggtggaggtgaaaaaggagctggaggccctggaaaaagagcgtgaaaacctgatggtggaggccaacgaccgggactacaagcggcagaccaccctcaagaacaatgagcagcggcagaccgagatccgccgggagctgaacaagctgaccgccgagcacgactccctcatgggcaaccccgccaccaccgaagccctggcggccaacgagcagcgtcagtccaacttccgcagggagctggaaaacctggccggagagcgggagaagctcctctccgacgagggcagcagccgtgactatgagcggctggcctccatcaagagccgggagatccagcttcaggacgagctgaacaagctggaggcccagagcgccccccctctgacggtagagcatctggcccgtgtgatcgagctttggaccaagatccccgccagccagatccaggaggccgagtatgagcgcctggccaagctggaagaccggctgaaggagcacctcatcggtcaggacgaggcggttcacgccgtggccgccgctgtccgccgtggccgggtgggcatcgcctccaagcgcaagcccgtgtccttcatctttgtgggctccaccggcgtgggcaagaccgagctggtcaagcggctggccatggacatgttccactcccccgaatccctcatccgactggacatgagcgagttcatggagaagttcgccgtcagccgcatcatcggctctcccccaggctatgtgggctacgacgaggcgggccagctcaccgaaaaggtgcgccgcaagccttactgcgtcattctgtttgacgagattgagaaggcccaccccgacgtgctcaacattctgcttcagattctggatgacggccacatcaccgatgcccagggccgaaacgtgaacttcgaaaacacggttattgtcatgacctccaacgcgggcagcgatgcccgtacctccgccggttccgtaggcttcggccgcaccgccgaccagcagggcagggagcgggccatgaaggccctggaatccttcctgcggcccgagttcatcaaccgcgtggacgagatcgtctacttcaacaagctcaccgaggacaacttcaaggccattgccgccattatgctccgtgagctccaggacgcgctgaaggagaagggcatcaccttcacctgggacgacgcgctgctggactacctggtgaagaagtcctactccatgacctacggcgcccgcaatctgcgccgccagattcagaaggatctggaggacgacatcgccaccaagctcatcgacagctacctccatcccatccagagcatccatgcctccgccgacggagagcacccggtgctcaccgccgaataaatccaaaaaagcgccccggccgcagccggggcgcttttttgattatgcgttgaccttggtgatagaggccagcagcaggcgggtgccgtgctggagaaactcctcccgggacagaccgatggtcttctgaatatatccctcccggatatcggcggtatgcaccatgccggacagggcggaccagaacagcagaaccgtctccatagggggaagctgagagcgcaccgcgccctccgccgcaccgcgtaccaggaaggccgccagctcctcgtcgatctcactgctcacgcgcaggatatccgcaactcccttctgagtctcgtccgcctcctgcaccagaggcatcgtgcccgtagcggcatcataagcggtgggattttcatcgtagaaccggacgatggagcggcataccgcgtcgtaggcctgataccagtcgctgtggctctcaatggcctcgtgaatcttctttttcaacagaaccataccgctgaggagaatggcattgatgatctcctccttgctctgaaagtacacatagagggtggccttgctgtactccgcctcccgcgcaatgtcatccatcgtcgtcttttcggtacccttctcggcaaatagccgctcggcggccgctagaatagagccccggtgaaactccgtcagcgcctgcttcttactcatcacgtcattccagcctttccaattcaacaatcaaacttctggtttaggaaatgatatcatgattttcgttctattgcaagcagattttcaaattttcagttagaagaaagaaaaaatcaccgagataattatatcgaactatgccgaaaatgcaacccttaatttttgcctctcctctgtaaaattctcttgccaaaccgggaaagatatgctatacttttttagtcgactgaattgcagggttagtacatcggtagtgcatcggcttcccaagccgagaaggcgggttcgactcccgtaccctgctccacatcggagcaagctttgtatcgcttgctccgatttttttataagtcagagcaagctcacaccgctgtgcggcggtttcattaaggggaaatatcaattttaaccgccccttccaaaaaagaaggacatctgtaagatgtccttctttttgcgtctcggccgcacgaagcgtccaccggtcttttgcccaaacgaagcagcctccgccctcccttgcagtaacttttttcctcagaaaagagcaggccgggtgtctgcttccaacacccggccgccctcataggaaagaagaggatacaatgaaaaagactctgtctcttgcaaggagtagaatacccgtttcatgttacaaaagcatgcaaaaatcgttacgggagtattaaatcttgacggagcctccccaaaagcgtatcatagctgcataaggacaatggaggaatttggtatggcaaaaaaagttctgccagctgtgctggcgctcattctgctcctctccgcatgcgggagcaggcttccctcccccaccggcaccccggcacaccaggagccctctcccactgtggcccccacaccggagtccaccccctacgacggaccggtcagccccttaagcggcctgcctatgggcaaagaatgggtcaaccgccgcccggtggccatcatgctcaacaatctgaaagaggcccttccccagcttggtcagtcccaagctgacgtgatctacgaagtaccggccgagggcggcatcacccgcatgctggccgtctaccagtccttggacggtgttgggaaaatcggctccatccgctccgcccgcccctactatctggagctggccctgggacacgatgccatctacattcacgccggcggcagcgaggatgcctacgccaaaatccgccagtggggcgtcaccgccctcgacggagtcaatggcccctacatgagcaacagcgagaacggaaatctgatgtggcgggacccggagcggcgtaagagctacagtctggagcacaccgtcgtcaccaccgggacctccatcatcgagcgtctgcccacctacggcctccgtctggagcacgaggaggactaccgctgtcagatgaactttgtggaggatggcaccccggccggcggcgctgaggccccgcggatcaccgtccctgtctcccactataaaaccggtgtatttacctacgatcccgacagccggctctaccgggtggaggagtatggagagccctatgtagacggcgacagcggtgaacaggtggccgtcaccaatgtgatagtcctcaagaccgcctgccgttataccggcgacagtctgggccacatcactgtggacctgtccagcggcgggacgggctacttcgcctgcggcggcaaggtcattgacctcacgtggagcaaggacttccccgacggccagctccaatactatgacctgagcggctcccccatctccttcggtgtggggcgcacctatgttgtcatcgtccccctggattgcgcggtctcctttgaataaagtcagagggcccgctgaggcggtcaacaagccctcctgctaaagcgttcggagggaaggatagtatgaaagggaaccgccagggttccctttcatgtttgatcaaacgactttttgaaacgctttcagagtttcaaaaagtccagcagcccgtcggaaaggactttccgacaggctgcgcgggccctctggaacattccagagggcccgcttttgttcagccgcagcagcccttcagctcccggcaggtttccgggatgggcgcggggctgttgggcgggaagaactcgttgaccgggaacttcacgtggcggaagatctcgcagggatcgtcctcgcagccgccgcaggtgcactccttctccggcatacagtagtcatataccggcatcaggagctgggagtcccgctccagacggatgatcgagaactggcccagggtaacatagatccgctttccgtcattgccgaagcacaggtcgcaaccgaagcaggcgcaaatgcacggcgggatttcggtcagttcacagtcgcaggggcggcactcgcagacgtccaccagcttcatattgagcacgatggggtctaccgcctccaccacggcggtgggcaggttggttttgccgatgttctgctcatccatcccctcaaacgccacctcggaggagaacaccttggcggtgccctcgctgccgaagagaatcacccgcttgtcaaagacacacaggccgcagacctccacaggccgggccgcgccgatgaacgcgtccgcagtcacgcggtagtagtagcggacatccacagtgtagaagccccggttaaagccgatgggttccacatcaatgtacacgtacagcagctccgccttgcccgccttgatgctgatggcgcggtcgatcaccgcctggcagttctgggtggggtaaaagcgcaaatcctcgatacaatccttgtctttgcaagaatcatagatcttcttcgtgtgtatgcacacggcctcgcggatacaggcagtatcctgcaccggaccgggcatgaccttctcaggcattgcaatacctcctagcagagtattcaaaaggcccttccttccccgctctattctatgaaccaccacccatttggtgcgggggcggagcggcgggccggaatgaaaaagggacccaggccattctatggcccgggtcccaaagccgtgacactcagcgcggcaacactgtcttcttcgttcttctgtgggcagacagcagatcccctgcaatcagcgctccgcaggcagacagcagtaccgccccgatcaggagggcgcagttgaggaaaaagcgctccggcatgatcagaatgatttcatccgtggcaggattaaacagccagttgtctttgccgggaaaaaagaccgcatgaaagacggtaaaggcccggctgaagtccagcgcggccagagcgcccaccgctagtaccagaccggcggccagcacccccgcccaaaaccccggtcctcggcccgctgggcggtaaaactccagccggtgcagccgcctcaggaggaggagcaacgccgcagacacagccgtaacgcccaaaactaaaaagtccgcccgaaagagcacccggacatctgcaaagtggctccgccccgactccgaccaggacagctctccggtcccaaagggcgttccgagaacgcagaagtccagcacctcgtcgtaggcctcccgtatgacctcctccggccatccggtacgctcaggcaggcggagggcatcgatctgtatatagtaaaagggccggaacaggatcggcaccgcaatggatgcgctgagcaccagcagggccagaatgaccgtcaaagccgctgtggccagtttggaggaacgcatttacagtcacttctttctcacagaaagggttatcagcacctgagagggcaggtaaaagagccacatgcccacctgggcaaaggaaaagagcggtccggtatcgaccaccggcaggaaggccgccagattgtgcaggcccacgcagaggtcacagcccacaaagagcagcagccccagcccgaagcaccgcccccgtcgccccagacgcagggcggacaccgtgttgcaggccagctccgcgaaataacaaagggtcacagccgtcagcggctccagcgccctcaggagcgccgcaaccgccagggccgcaaccgtcagccccacgcgcagcggccacagcaggccagcgccccagcggtgcaggcgcagcaggtaaatcgcctgtaccacacagaagcaggccacccccgccaggtagaaggaatcaaggatcaggagaaaccaatccgctgccagcgtaaaggccagcgcggcgcacaccaggcgcccgtcctccgttccggcccggtccaaggccgccaagaagcacagagccaccgccccgtatttcagcaggagggcccagccgctccccggccggagcagatccagcgccagaaatccgagataaagcgccgcttccaccccgaggaagcatccggcctttatgcgccccgccaaatcccgtcccccctcccatatgaaaaacattatacaacggcgggccgcgcttgacaagaagcacggcccgccgtccggtgtatttaccgcttgaaccgctccagaagcgcggcctcccaacggtctccatatttcaggcagacggcgaagacggccactccggcggctcccagcagaagcatcgcccacacgggaattgtgagcaccgagccgcccaacgcacaggccaccagaaggccccagggccgtgtgagcagtacgatcaggaaaaagcggtgcagcgggatgtcggtcagccccgccagaatgcagatcaggtcgtccgggaaaaagggaaagagaaagacaaggatcaaaaagatatcccgcttcctgcgtataacctccaggtacttgtccgccacccgttggttgaccagccgctccacaaaccgctgccccagtacacgggccagccagaacacaaggacggaaccgcccgccactgccaaccaggtcatcaggaatgagggccacattccaaagagcaccgccccagccagcgccgtcacgttgctgggaatgggtgcgatcaccaccgagagcagttgaatcaggaaaaagaacaggtgggaatagggcgcaaagcgttctatataatttcgcatctcctccaacgagccaacggaggaaaaaaagcccgtctgccaaagcaggaacgccccgccgcccaacaggaacacagccaggagcagggtcagcagccatttatgtcgtttcatgtcggtctgtcgcctcaccaatcgaattgtctataggctaccacgttttggctctctatgccagaggaaattccttaagatttctttataaaaacaaaaaacccacacccataggtgtggtttctgcctcaggcccctttaccgctcgctgtaaatcacctggtcgtcgctgccaaagatgaggtcatccacgtcggaagcgccgatgctgttgtaccataccatactgtaccagcctcctttctttgattgataattttagtatatacgctcttgggggaaaatgcaagccgtcaattataaactttacacaaaattcacatattaattttggctgatccgtcagtctcctccgccaaatggccgacgcgatagagtatggagttttcgccggcgggtacgcccccccaatatcagcgccaaagatttgcgggaataaaaaatcccgaagtctttaccggtaaagacttcgggatttggcgcagaaggagggatttgaaccctcgcgacggtttcccgccctactcccttagcaggggagccccttcggccacttgggtacttctgcatgccaaatacaggatacatttggaaaaaatgtggcggagagagtgggattcgaacccacggatgcttccacatcgccggttttcaagaccggttccttcaaccactcggacatctctccacgtccggtctccggccaaatgcaaaaaagatgataccacacttttcgcacattgtcaactgccgcctgcaatatttttctgctttttttccaaactcagccttgacttggagcggagtccaggtgataaaatcgaacaaacagcgggagccagcccgccggaaggagcagatgaccttatgaccattgccgaagtcagccgtaaatacaacctctcagccgataccctgcggtattacgagcgcatcggcctgattcccaccgttcaccgcagcaagagcggcatccgggattataccgtggaggactgcgcctgggtggagtttgccaagtgtatgcggggagccggtatccaggtggaggctctgatcgagtatgtttccctgtttcagcagggggaggataccaccgaggcccgcaaacagatcctcattgagcagagggagctgctgctggagcggatggaggagatgcggcagacgctggagcgccttaactccaaaattgaccgctacgagcagacggtcgctgtcgccgaacagaaactgcgccgcgagtaagggaggcacaccgctcccttctttttatccgctgcacggggagcagaaacgtaaagccccggtaaaggttagggaaagctttggaaaggtgccttgtagcttggcgcggcgggtgctatactgccccctggttccatggaaccaaaaccaaactgcaaaggaagtaggaaagcatgcagaaacgcaacaaggtcctggccggcgtcctcaccggcgcgctggtcctgagcgccggccccatggccctggccgccacggccaattataacgacagcagcgtcaccggcggctctgccgcctggcaggactgggtcaaggagtgggagaccgtagccaccgactacaccaaggtatccctcacccccggcgcagacgagacccagctcaacttcgcctggtacaacaagacggagagcggcaaggccgccacgccggtggttcactttggcaccgacaaggaccacctgaccgccttcaccggcaaggctgcccaggtggacgacagcctgaccgacggcgtggcctacgactataaccatgtcaccgttaccggtctggaggccaacaccacctattactataccgtggagaagaacggcgtacagagcgaggtgcaggagtacaagaccggcagcttcgactccgtaaagatgctctatgtaggcgacccccagatcggcgcctccaaggggcagccccagagcggcgaggccctgacggccggctccggcgcggccaacaccgccgcccgcaacgacgccttcgcctggaaccgcaccctggagatcgccactgcccagaaccccggcgtcaacttcatcatctccgccggcgaccaggtaaataagaccggccaggccaaggaggaggagtacgcgggttacctctcccccgccgtgctggccgggctgcccgtggccaccaccatcggcaaccacgactccctgaatcccgactacacctaccacttcaacaaccccaacgccaccgagaacggcaagacccaggccggcggcgactactactactcttacggcgccggtctgtttatcgtgctcaacaccaacaattacaatgtagccgagcacgagaagaccatccaggaggccatcgcctctgctcccgacgccgcctggcgcgtggtcaccatccaccaggatatctacggcaccggtctggatcactccgacaccgacggcatgatcctccgcacacagctcacccccatctttgacaagtacgacatcgatgtggtgctccagggccacgaccacacctacagccgctccaagctcctttacggtgacggccagacccacggcacctatgagttccgtctgaatgcggacggcagcgactacgactgggacaacgccttcaacacccagaccgacgagaaaatccccctgtaccccgaggagggcgacaccgccagcacggccctccacgacgccttccaggcggacaacggctgctacaccatcgaggacaccaccggaaacaccgtggtcaatcccaagggcaccctttacatgaccgccaactcggcctccggctccaaattctacgagctgatccccacccagcaggactatatcgccgagcgcagccagaactggctgcccagctactcagtcatcgacatggacagcgacagcttctccatcaccacctaccagatcactgccgaaggcaaggtggaggcgattgacgacaccttcaccatccagaagaccgacggcgccgccaccctgactgagggcggcgagacttactaccgcctgcgcgatgtggccgccgcggtctccggccaggacaaccagttcaatgtgagctgggacaacggcgtggtaatcaccaccggcacggcctacgccgacgccgtacccgccggcacccctgccagcggcagcgccgtaaccctcaccctgaccgtggacggcaagagcgtcaccacccccgccgttctggccaacgggaactactacctgcccgcctccttctatggcactctgggcgtgactccggccgcctgagcggccccatccggcaccgatactgcgaggctcccggcggcatagctgccgggagcctccattctgagagaaaggctgactgctgttgaacatcaaatcctgctttctgcgctggggcattccgctgttgctgctggctgcatttctggccgctgttttcgccctcaaccgggtggacaaggtggccctggtcaaccgggaaggacagaccttcgagaagggcgtggtcgtggacattctccaggacaacctcatgcccgacggctcccgggtgggcgaacagcgggtactggtacgcatgactaccggcgtccgggccggtcaggagctggagaccaccagcgcctccggcttcctcctcggcgcgggctgtaccgtgggcatgaaggtggtggtcatgcagagcgtggcgggagactccaccatcaccagcatctattcccaggatcgggagtgggtgatctacgccttcgccgcagcctatctgctggtgctctgtctggtgggcggaaagcagggcctcaagggcgcccttggcctggtgttcaccttcttctgcattctatttgtctatctgcccctggtctaccgtggctggtcgcccttctgggtggcggtgctcatctgtatcgtcaccacgctggtcacgatgtacctcatcggcggccccacccggaaaaccgtggtggccgccggcggcacggtggcgggcgtggtgattgccggactggcggccaccctgttcagcctggccaccggcatcacgggctggaacgtgtcggacatcgagagcctgctcaccctggccagcaccagcgggattcaggtgggcggcctgctcttctccggcctgctgatctccagcctgggcgcggtgatggatgtggccatgtccatcgccagcgccatcgccgaaattcacgttcagaaccccgccctctcccgccgggcgctgttccgggccgggatgcacgtggggcgggacatgatgggtaccgactccaacaccctgattctcgcctttgccggcggaagcatctccatgctggtgctggattacgcctataacctcccctaccggcagatcatcaactccaacaacatcggcatcgccatcatgcagggcctgtccggcagcttcggcatcgtcctggccgtccccgtcaccgtggccttggccgttctgctctatacctggcgcaaagctgcgcccgcggcataaagcgaccggatgcgacacgctccccgccctatactgggccggggagcgtgatttttatgcagtcctttttccggcggctggcggcctgcgccgccctgttctgtgccaatccgctggcctttctccgggggctgtccgatcccgacagccccgtgcgccgcctgctgcggcgcaaatagcagggagggcgcgccgcagcgcgccctccctgtattaccgctcataggtcagccatgtctctccctcgccgctcttgcggtaggtgtgggagaccgccgcctcccggatctcatcgcaggcccagtggctcttctccacgtcggtgaagggcagggccgcggcccgctcccccgcccggcggtctagggcgtggttgaggatcttgaccgcctccgcccggctcaccggcgcgtcgggccggaaggtgccgtccggatagcccgacacccagccctcctccgccgcaaaggagaccacctccgccgcccagtggccgcccggcacatcggggaacgggggcgtaccgccctccaccgtaaaataggaggcaatcagcttgaccagctcggcccggctcaccggctgctccggccggaaggtgccgtcgagatagccatttgcgatgccgtagcgcttggcaaaggccacatagggggcgtaccagtccccccgcttcacatcggaaaagccgccggtaccaggcactccactgtaaagcagattcccttgctcgtctacactgaggcgggccagcatagccaccgcctcggcccggctcagggagtcctccgggcggaaccggccgtcatttccctggatgtaggcgtcgtgctccctggtgttcagataggccggctccgccggctcctgcgcctcctccccataggcctccgcatagagcgccagcagctccgggttctccgccatcagctggtagcggaagtgcgcctcccccgcgacctggggcagggtgtcgttgagggccagttgtcgctcgatggctgtcgtgccgtaccaggggctcttgggatcgctgttgccggccagatagtcggccattcctatgtaaagggaaacacctgtaccctttaccgtatccgcccaccagcgggccaccgtggcgtagtccatgctcttgtggccgatgtaccagtagatctgggggcagatgtagtcgatccacccctccttgacccatttccggctgtcggcgtaggaggcgtagtagctctcatagccgccggtggtattggagccctggggcaggctgctcttatccgcccacacgccggaggggctgatgccgtaggacagccccggatcaatggcgtggatgcgctcccccagtgtcttgaccagctggttgacattgtcccggcgccagtcgccgatgttggaaaagcccttgccgtacctggcataggcggccccgtcggcaaagccgctgccggggtagaagtagtcgtccaggtgaatgccgtcgatgtcatacttgcgggccagctcctccgccccccgcacgatgtactcccgcacctcgggcaggccggggttgaagtagtagtcgccctcgtactccaccacccagtcggggtggagctttgcggggtggtcggcggtcagggcctggaactccgcggcgccccccttggtgatgcggaagggattgatccaggcgtggagctccagccccagggcgtgggcccgctccacccagtaggccagcggatcaaatccgtttttcggggcggttccctgtgcgccggtgaggtatttgctccacgggtacagctcggagggatagagggcgtcggcggagggccgcacctggagaatcacagcgttcatgcccatgtccacgcacccctgtaaaatcgcgtcggcgtcccgcttgaggaccgccggatctgtagtggcctgactggggtagtccaggcggtacaccgtggccacccaaacagcccggaactcgtccgcccgctccgcttgggccgccgccgcgggagactgcgccgccagccccagccccgtcaggaccagcgcgcagatgagtgcgattgccaacaggggtttccagaattttgtcatgaggtcgctcctttgaatttggtctcgtaaatctgctctcggaatggcgggcgcgccctgcgccccctactgattggaaatctgctccgccagatcgttgaggtagatccagcgctccattttctcctccagggccgcctccagctcagcctgccgctcctggatggactggagggccacatagtcggtggccttctcctcctgctcggcctgcacctgggccagctcggcctccagggcggcgatgtcggcgtcaatggtctcaaattcccgctgctccttgtagctgaatttcagctttttggccccctgggggcgcgctgccttgggttcggcgggcttgggggatctggccggctgtccggcggcccgccgggcctccagatactctgtatacccgccgggatagccccggacgcttccgtccccctccacggcgaacacccgccgcaccacccggtccaggaaatagcggtcgtgggataccgccaccaccgcgccggggaaggagtccagatagtcctccagcacactgagggtctgaatatccagatcgttggtcggctcgtccagcagcagcacgttgggggcggcggccaggacggacagcaggaagagccgccgcttctcgccgccggacagcttgcggatggggctccactgcgcctctgccggaaagaggaactgctccagcaactgggaggcggtgagcattccctcccccgtctcgatgcggctgccgatctccttcacatagtcgatcacccgggtatccccgtccatatcgggcacctcctggcggaagtagccgatgcggacggtctcccccgtctcgaccgccccggcgtcgggggccagctccccggccagcaggttgaggagggtagacttgccgctgccgttggcccccacgatgccgatgcggtcgtcccgcaggagcatgcagtcgaagtcccgcaccacggtgcgtccgccgaagcccttggtcacgcctgtgcactcgatggtcttcttacctagacggctggcccgcgcgtttagttccaaggtacttttttccgccgggccgctctgggccttcagggcctcgtagcgctccagccgctccctgctcttggttccccgggcggtgggcccctgcatcacccactggtactcccgccgcaggatggcctgccgcttgcgctcgctggcccgctcgctctccagccgggcggccttgcgctccagatacttgtcgtagttgccctcgtaggtgaacaggcggccgtcctccacctccgccatgcggcccacgatgcgctccaggaaataccggtcgtgggtcaccatgaccagcgcccccttccaggcgcgcagatagtcctccagccagagcaccatgtcgttgtccaggtggttggttggctcgtccagaatcagcacgtcgcaggggcgggccagcaccgccgccagggccacccggcggcgctccccgccggagaggttccccacgctctgctcgaagcgggatactcccagacggttgaggatggttctggcctcatactccgccagggagcggtcggcgtcgttcagccccagcagcacctgctccagcacggtgcgctccccctgaaacaccgggttctgtggcaggtactccatccgcacgccgggatccaggcgtaccgtccccccgtccggctcctccgcccccgccagcaggcggaggagggtggacttgccggcgccgttgacgccgatgatccccaccttgtccccccgctccagataaaaggacaccccgtccagcaggacacggtcgccgtagctcttggtcacttgttccacagaaagcagcatgaacgtccctcgcttttgtcaagttatctcccagtatagcggaatctgtgaaaaaaagaaagccccctccggccggggcctgtttccgaattgcttccgaaatgtcccgcggggattgccaaccgctcggggatgccgtatactgggggcacaactgaatcgagatgtcttcagggcagggtgaaattcccgattggcggtacagtccgcgcgcgtgatacgcatgatttggtgcaattccaaaaccaacagtgacagtctggatgaaagaagataccatcggtttccgcaggacggccccgccgttctgcgaccgattcctctttttcgcaccggaaaggcatccccttttcggtgtgattttttaggagggaacggaagtatgaatgtcaaagcaaagaggattaccaccatcgccatgctgtgcgcgctcgcctatgtggtcatggccgtcggccgcgtgccggtcgtgctctttttgaagtacgacccgaaggatgtggtcatcaccctcggcggcctgatctgggggccgatgaccgcctgccttgtctcggttctcgtctccgttctggagatgttcactgtcagcgacacgggcattctgggctgtatcatgaacattctgtccacctgcgcctttgcctgtaccgcctccgccatctaccggaaaaagcgcacgctggccggggctgtcgccgggttggccgccggatgcgcggtgatggtcagcgccatgctgctgtggaattacctcattacgcccctctacatgggatacccccgggaggcggttgcggagctgctgctccccgcctttctccccttcaatctgctcaagagcggactcaatgcgggcatcaccttcctgctctacaagccagtggtctcctctctgcggaaaagcggactgattgacgcgccgtccggaccggcggcgcgcaggcccgtcgggctattgcttctggccgccgttctggtggccacctgcgtcctcattctcctggccagaaacggacttctctgaggcggcccatggacaaggcaaacggggacgcccccttcatccccctgtacggaaccgccgtgcccggcgccgggctgggacggctggcggggctgcccgccgcgggcctgcgcctgcaccggggacaggcggcgccggaacccggcgtctacgccgcggagatccttctgggcggtcgccgcctctgcgggctggcgcatatcgcgcccggcggcggcgcgccctccattgagcttctcttctttcacggtggggaagcgccctgcggggaggcggtggagctgcgcctccgccaaaggctccgccgctgtcagccctttgacaacctgcccctgctgtcggcacagctccggctggattgcctctccgcccagtccttttgggggatttcccccggctccccccggctgtccatggagcccgcaggacgacgggcggtggtagggatgcaggcaatccccctgtctgaaaaggagtttggtgtcctctacctgctctatacccacccggacgttccgatcacaaaagagcagatctatgaggccgtttggtgcgcgccgtccaaccactgcctccacgccgtggagaacaccgtgtttcagatccggaggcggctccgcccccatgcgggcgggcacgactttatccgcaccgttgccgggctcggctatcagttcaatcccggctgagccgcctctctgtgcagccgctgggacaaaagctcttggcaaatgggaaaaaatatggtatcctaaggcgctatctcattttgaaggagcctttatgaaacagcgcacattcccgatcctcgccgtccttctcctggccgccgccctgtccggctgccaaagcacagccgccggagacagcgccggactgtccatccacttcatcgacccggggcagaccagctccgccctgctcctgtgcggcggacaggccatgctcattgacggcggcagcgccgagcggggcagccaggtggccggttacctgagccagcaggggatcacctacctcgactatgtggtgtgtacgtctgcggatgagacccatatgggcggcctttccggccccctttacacctgcgccgtggggcaggtactctccccggtggaggatgccggcagcccggtatttgcggatttccggcgctataccgaggcccagggcctctcccccgccgtcccggaggccggtacggtatttcccctgggggacgcccaggtgacggtagtggagaccgacgacgccgcacagacgctctccctccaggtggactacggcgacacctccctccagttcaccagcgatctggaagatgcggtggcggcggtggccagtgaggccgaaggggagctccccctgggcgctctggtggccggaagcgacggcacccagtttttcctcctcgacccagtacagaccgcgccttaacccagagcgcctccgcccatcgggcggaggcgctctcttttggccacagccggtgccctcatccaagaggatgtcgtccacaccagccacgacagaaaacagagtgggcaccgcggcccggcgtattccgcccgcggtattgctttttcgtctgccacagcggaagccccggcagaagacgcagttccatcttgacttacatccgtattacttgtataatacagttataaactgtattagttctataatacagtatacaaaaaggggggtgtccggccatgctttccttctccggcttccgcctggaggacggaagccccatctaccagcagatcatccgctatctagagcagggcatcgcggccggaaccatccgggacggagacgggcttccctcccgacgggtgctctccgcccaactgggggtcaaccccaacaccgtgcagaaggcctgccgtatgctggaggaggcggggctcatcacctcccgctcgggggccaagagcgaatttaccctggacgaggcggctgtggccgccgtccgcacccgcctgatggagcgggaggccgccgccctggtccgctccctgcggcagatgggcctcacccgaccagaggcggaggcgctcatcgaccggctgtgggacagcccggaactggaggaggagaagccatgaagcgtatcgcatccctgctcatgctggccgcgcggagcaccctctggaaagctgcggggattactctggcctcctgtctgacggaggcggggctcttcctggctgccctgtccggctggcaggacaccgtccgcaccgcttactacgaatactccaaccccatgggcctggagggcctgctgatgcaatatcccctgtcctggtgcttccgtatcgggctggtgctggtgtgcgccgtgctggcctttctggggtgggagggttcctcccgggtgagctataccctgcggcgactgtcagtggggcacagggccctcaccctgctgtgggccggctacggctttttctgcctgttgttcttctgggcggcccacctgggcaccctgctggctctctgcgccgccgccctcccccgtctggcaccggagttctccggcccccaggctctgttcctggcctgctaccgcgacccctatctccacagcctgctgcccctggacgactgtctcctctgggtgcgcaacctgtccatgtgcgccgccctggggacggcggcggccagcttctccttccagcggcgcatgggccgccgggccttcgccattctgcccctggcggcgctctccgccctctgctttcccctgcccatgggctcctttgaattcggcgggccggcggagttcctccgcccctatctctacgacggcattttctactccgcggacggtctgccctctgtcctggggcccgtcctgctctttgtcagcctgtgcgccctggccgcctccctctgccagattttgaggagggatccctatgaagaatgagtcctggtttcccctcggcatcccctggaagcaggagcggtttctgctttggacgggccttctcctgtccgccggtgccggactggtgctcttcctgtgccagtacctcccggcccgccgggccctctacggctacaacggcaccatggggccggacggcgcgatggtgcgggtgctcctgcccggcaccctggtgcccccctttcccagcctgctctatgggccgctgctctgttttctggcgctggccctctccctggccggggtggccgtctaccattttctctgccactaccagggcggccggagcatctaccggatgcggctgctcccccagttcggagagctgtggcggcgctgcctgtccgcccccgccctggccctgctgctgggcgcggcactgacggccgccgtcatcctgctgtgcgcactgtgctattaccacctgacacctgcgggccacctgcccccggagccctggggaggcctgccgctgggctggattggaggcaaccatgcttgaagtgagccatgtatccaaaaagtaccggggctgtcagcaggccctggaggatgtgagcctgtctgtggggcccggggagatcgtgggtatcttcggccccaacggcgcgggcaagaccaccctgctcaagtgcattctgggcctgctccggtacgggttcgggtcggttactctggacgggcagcccatcacccccaaaaacatcgcccgcctctccttcgccacctgtgagcattccttcttccccggcctcactgccgccgggcaccgggacttctgcgccgaacacttccccgccttccgggccggccgcttccagatgctgatggacttcttccgcctgccggaaaagcgggccctgcgcggcttctccaccggacagaagaaccagtttgaggtgattctggccctgtgccagggggcggactacattcttatggacgagccctttgccggcaacgacgtgttcaaccgcgaggatttctacaaggtgctgctgggcatcctggagcccaccgagaccatcctcctgtccacccatctgctggaggaggtgcagcacttcatcagccgggcggtgctcctccggtcggggcggattgccggggacgtgaccaccgccgcgctggaggagcggagccagagcctgatggactatgtccggtcggcctgcggctatgagcccggccgggtgctccaggcgctggagcggatggacggcagaggggaggaatagccatgcggaaatctctgctgctctttctcctcctggtcgctctgtccgccggcctgctggcgggggcctgcgccgccgtgcagggccgccgagagacggtatcctaccggacggagccactggccggagatcccacggccgccgacggtgtggagctcacctgggtgtccacctgcggctatcacctgttctggcacagcacctttcccgccgccgcgccggaggaggccgaaacccgcttttcctactccggccagaagcagagctggatcattgagctggacgaggatgtgctggagctctctcccggcctgaatttcctggatattgcgccggacagtccctccgccgggctgcgggcgctgtgggcggagctctccgcccagacctctcccctgcccggagacgagacctataccgaacacaatggtctcatcagtattaaacgtgagatccaactggccgattatctgaccgatttccccctctctgtggatcgtctcgtgtacacagcctgggcggctgaccgtgagtttggaacttcccagtacgatacctccatcaacgcggaggagctgacccgccgttttcgcgcctattttcccattccggtgcccgaagggcttgccatggagatcagcatgaccccggacgcctccggccagttgctgagcgcctgctttctcacattggacagcagcctgctcacccttcaggcggactgcgtgagcaccggggaaggcgtcctgtttgccctctgcgccggcggctccatggccaaggctctggacggcagcggaattcccggcggctgggggatctaccgcctctcccccggcggcgacctggagaccgtctactccatccccaacggaggccgggccatggccttctggtcggatggggacggtaccctctttcttctcaccgaggagaagggcgcgtttcttctcaccctgctggacgcggccacactcacccctgttgccgcctgggagctctttcccgcggcggagggcgcgccccacccacaggtgttcccacagtctgacggctctttctgcctcctgtccgcgggcgactttctggccgtgctcaaccgtcggagcggcgcatgggtggtggactttacggcggacacctccctccagtcctccctgggctgccccctgagcaccccttcctccaggctcagcctgtgctatgacggaacccggctggccatcactggcccttgtccgagcacgaaatcggaatatttcctggcagtctacaccgccgacggcctggaatacctggggggctacacctccagcctgtacggcaaccaccccccggactgctacccctggggctcctggcaggacggaagctgccgctccatcgcgctggagccctccctccccggcacggaaactgcctcttgacaaattccctttccccggctaaaataagtgcaattacatcccaaacaggcaatgatgggaagaaggcgcgtcccgtcccgctcagagaaccggtggtcggtgcgaaccggcgcggggaagcgcgcggatactgagcccggagccgcccgtccgaaccccaggcagtagggcgggccgtcacggccacgttaccggccgcggccttgttggaggccatgagcgccccttggtgacaatgggcggaagcagggtggtaccgcgtaaattttacgcccctgaccaggaatttggtcaggggcgttttttcgtaccctggccccagtaaacaggaggaattgttatgaagcccgcacacgagaagtacatccccttcgtccccctcaagatggcccgccgcgcctggcccgacagggagctgaaagcgccccccgtctggtgctcggtggatctgcgggacggcaaccaggccctcattgaccccatgaacgtccgggagaagctggagctgtttcacaccctggtggacatcggcgtcaaggagatcgaggtggggttcccctccgcctccgagacggagtacgagttcatccgcaccctgatcgagggtggacacatccccgacgacgtgaccattcaggtgctggtacaggccagagagcacctcatccgccgcaccttcgaggccattgacggggccaagcatgtgatcttccacttctacaactccacctccaccctccagcagaaggtggtcttccacaccgacgtggagggcgtaaaaaagatcgccgtggacgccgcccggctcatccgggagctgagccagcccgccctcgacgcggggatggatctgcggtacgagtactccccggagtccttcatgggcaccgagatggacgccgccgtagagatctgccaggcggtgatcgaggccatcggtgccacgccggagcgcaaggtgatcctcaacctccccaccaccgtggagaactgtatgcccaactacttcgctgacgaaattgagtactttatctccaggctgcccggccgggaccgcgccattatctccctgcacccccacaacgaccggggcgagggcgtggctaccgctgaactgggcctgctggccggggccgagcgggtggaggccaccctgttcggcaacggcgagcgcaccggcaacgtggacatggtgaccctggccctcaacctctacacccagggcgtggaccccaagctggacttctccgacatcaataaaatccgcgacgtgtacgagcgggtcaccaagatgaagatcggcgagcggcagccctatgtgggcgagctggtgttcaccgccttctccggctcccaccaggacgccatcaataagggtacccgctacatggaggagagcggcaccgagtactgggaggtgccctatctgcccatcgatcccgccgacgtgggccgccagtacgagcccatcatccgcatcaactcccagtcgggcaagggcggctccgccttcgtcatgcagcactccttcggcttcgatctccccaaggccatgcaccccgagttcggccacatcgtccaggtggagaccgaccgggtgggcaaggagctgaagcccgacgccatttacgacctgttcaaggcccattacatcgacgcggtaaagccctatcagctggtgcagcactccttcgccgagtttaccgacgaggagggccactcccacgtcaccttcgccggcgccatccgccacaccgacaccgtgttccaggttcagggctccggcaacggccccattgacgccttcttcaacgccatccacggccagaagatggaccgcttcaccttcatcgactacaaggagcacgccgtcaagcagggctctgactcccaggctgtggcctacatccacctccaggacgagaacggcagggactggttcggcgtaggcatgagccataacatcaacctggcccccctcaagggcatcctctccgccatcaaccgggccgtcagccacgacggcaaatgaacgcccgtcccgtcttgcatccccggcctaaaccagctataataggaacagtttgacagaaaagaggacgcggacaatggaacagcagcgggaggccctgctcgggcaaatctgggcggcccaggacgaggcctatgacctgatgtatgaatacgactcccttccccaccgttacggggctcacattctctatcagtcggaggcccatatcatcgacctcatcggtgagcacccggagattaccgtcaccgagctggccgccattctgaaaaagactcccagcgcctgctcccagatcgtgcgcaagctacgggccaagggctgggtggagcaggtacgcaacgcagagaacaaccggatttataatctatacctgaccgagagcggcaaacaggtctaccaggcgcacacagctttcaaccagtcctgtcaggaggccacctttcaattgttgagcaatttttctcccgaggagttggaacaccatctgatggtacagcggaaactgaacgaggcatatcaggatgatgtgaggcggagccgggattatttaggatagacacaaaagaagccgggggtatgaccgcccggcttctttgttgtggataatccacaaaacaaaagccaaatatttattcactataaagaagtatctaaaatatataaaaattttcttgacttatttcttatttgtcatattataaagatgcttaattattaagaaattagcaaatcaccaagagagggagatgtcaaatggaagctgaaaaaaagtacgcagaaacctatggagggaaggtcggcgggatacttccactgctgggaatgatcgcagcaatcgttgtcctctgctttaccggaatgagttccctacgaaacttctggggagcaggcttcatggccatggtcattggtctgctcgtgtttaaggataaaaaccgctatgcgaaagcagttatgaaaggctttgctaatccgtccttcaccatgctatttcccattttcattgcggccggtatcctgtcacagatcctaacggccgcccacctggtggatggcctggtctatcttgtgagtctggtcaatatcccacctgccattatcccctgcgtgaccttcgtactgtgtgcggtaatgtccactgtgacgggcagctcggcggccgccctcttggccacgatgcccatgctgttcccaatgggtgtgcagatgggctgtcccgccggcctagtcctgggtgccatctgttccggctccgagttcggtaataacctctcccccatttccgacgtgaccatcacctcctccatcggacaggaggtggatatcatcgccgcggtgcgcacccgtgtctggtacagtctggccgcagggatacccgccctcatcctgttctttgtatttggtcttgcaacaaccaagggggttgatctggcctccctaagtgtggacagttcctcctccctgggccttatctttatcatcattcccatcctggtggccgtactcatcctgcgcaagacaaacttcttggtagcccttgtggtaggcgatctgctgggcatcatcctgttgctgatcctgggctattcggacgtggcgagcatctttgccgctgacggcctattggcctccggtaccctcagcctgatggatgttttagtctttatggccctgatcttcgtagtactcgcactgactgaggaggtgggcgtgctggacagtttccagacctttatggtcagacacgccaagacccccagaatggcggaaacggtttccggggtgttcacctgtattttctgtgcgatcattggcagcggtatgtccacgatcgcctttatcagccccatcgtccgcaacatcatgaagcccttccatattgcccgaacccgcgccgccaactatatcgcgggctttgccagcggcatctcctggatggttccccacggcgtcaacaccttgaccgcactggcggttgcaatgggaaccggtgttgtgggcgatgactttaccatgttgaattttattccctacaactttttctgtattggcctgattgtagtatactgggccgcaattttgactggcatcggtcgtaaaaaagacgaaggaggattacaaaatgaagtatgatttcaccagcatattggaccgccgcggaaaggatgcagcggcctatgacaatgtgggtgcccatgtcattgcgcccgcaaggccaaaggaaggctttgatataatccccatgtgggtggcagatatgaacttccctgtggtccccaccatcacagaggcgattatcgcccgggctcagcacccttccttcgggtacttctttcccaccgacaaatactatgattccatcgtccagtggcacgagaagcgcaacggtgtcactggcctaaccaaggagcacatcggctatgaaaacggcgtgctgggtggtgtggtcagcgcactcaatgtactctgctccaggggtgacaacgtgctggttcactcccccacctacagcggctttacatcctgtctgaccaatgccgggtattccatcgtcctctctccactggttcaggacgagcaaggcatttggcgcatggacttcgaggacatggagaagaagatcgtggccaaccacattcacaccgcactattctgctccccccacaaccccacaggccgggtctgggagcgttgggagctggagaaggccatggagatcttccagcggcatggtgtctatgttatctcggacgagatctggtctgatatcatccgccccggtcagaagcacatccccacacagatggtcaacagctacgccaaggagcacacagtggccctctatgctccctccaagacgttcaatctggcgggcctgatcgggtcttaccacatcatctacagcaagtggctccgagatcgggtggataaggagagctccttgtgccactacaacgagataaacgtactttccatgcacgccctgatcggcgcctacaagccggagggctacgagtgggtggatgagttgaaccaggtactcgcgaataatgtggacttcgcctgcgaacacatttgggagcaatacaaaggtattcaggtcaccaagcctcagggcacttatatgcttttcctcgactgcaccaaatggtgtgaagcacatgggaagaccattgaagagctgcaaaaggctggctctgatgtaggggtagcttggcaggatggccgccgttttcacggcccctgccacatccgcatgaatcttgccctccccctctcccgtgttcaggaggcctttgcccgcctggacaagtatgtattcaacgcctgatagatgcaagaggcggcgccggttcccgtatggaaccggtgccgctcagcctgtcgaaaagaccttttcgacaggctgttgaacttttgaaacttcagaaaagtttcaaaagttgtttgatccaacgcgaaagggaaccctgacggttccctttcacactatccttccctccgaatccttcggcaggaggggttatcgacagcctcggcggcggtcccacatgggaccgccgccgaggctgtatttttagttaccgccgaactcgtggaagaagcggtcgtggatgacctgcactgcccggtcggcctcgttgatatccaccaggacggacaccttgatctcgctggtggagatcatgctgatattgatgcccgcattgtacagggcctcaaacattttggccgccacgccggggttgtggaccatgcccgctcccacgatggagaccttggcaattttgtcgttgacatccacatggtcgaactgaaggaaatccctgtgctcatccaggagctgcttgcagcgctccacatcctgaatgctcacggtgaagctgatatccttagtattattgcggccgatggactggagtatgaggtccacattgatccgctccttggccagcagggagaagatcttgaaagcgatgcccggctcgtcggccagccccaccacggccacacgggccacatttttatcgcaggctacgccgctgacgtgcagtttttccatggtttttgcaacctccttgactttggtgccgggcttgccggaaaagctggagaggacctccagattgacgccgtagcgcttggccatctccaccgaacggttgtggagcacctgggcgcccagggtggccagctccagcatctcgtcgtaggtgatctcctccagcttccgcgcccctttgacgtggcggggatctgcggtgtagacgccgtccacgtcggtataaatctggcagagatccgcgtggagcacagcggccagggccaccgccgaggtatcggagccgccccggcccagggtggtgatatcctcatacttgttgaggccctggaagccggtgacgatgacaatggtgttcttgtccagctcggccagcacccgctccgtatcgatgcgcttgatgcgggcgtcgccataggaggagttggtgcggaagcccgcctgccagcccgtcagggagaccaccgggtagcccatggcctcgatggccatggcgcacagggagcaggagatctgctcgccggtggacagcagcatatccatctcccgcttggaggcgttggggttgatctccgcggccttggcaatcagatcatccgtggtgtcgccctgggcggagaggaccgccacgacccggtggccccggcggtaggtctcggttatgatgcgggccacgttgcggatgcggtcggcatccgcgacggagctgccgccgaatttttgaacgatgagtcccattggtatatgtaccccctaaatcaggaatatccgtccgtcgcggaggaggcgcgctcctccgcgacattctatgcgctcagtccagcacccggaacatggagccgggcgtcatacccgtcagccgggcctccagggcagcccgggtcatgggcggggtgaccagcgcgaactcgtccgccggcgctccggggcggctcagccgggtacggtccgggaaggcggcctccgccgcctgtaccccggtcccccggaggtaccagcggctctccagcccgtcgggcggcaccgccgtatcgtccccgccctcggcccagaacatccgcttcttctcgtcccggtgcttggccgcgtcgatcacgtcggccaccacggcggaggcggtgggcagcttgcccgccccccggccgtaaaacatcacctctccgatggcgttgccccgtacggcgatggcgttgaatacatcctccacaccggagagggggttctcccggtccaccaggtgtggggccacataggcgcacaccttcccgtcggtccggcgaatagcccgccccagcagcttgagcttctttccacaggagtcggcataggccacgtcggccagggtgacgccggtgatgccctccgtgggcacctgccgggggtaaatatgccgcccgaaagccagggaggccaggatgcagatcttccggcaggcgtcgtggccctcaatgtcggcggtggggtcctgctcggcgtagccgttggcctgagcctccctcagagcgtcgccaaagctcagccccgcccggatcatacgggtgaggatatagttggtcgtgccgttgaggataccggtgatctcctcgatctcgttggcggccaggcactggttcagggggcggatgatggggatgccgccgcccacactggcttcaaacagatagctgacacccttctcctgggccagccgcagcagctcgcagccgtgctccgccaccagctccttgttggaggtaatgacactcttgcccgcctggagggcccggcgggtgaaatccagcgccaccttggccccgccgatggtttccaccacgatggacacctcagggtcctgctcaatcacggaaaaatcgtgcaccaccttgcctgcaaaggggctgtctgggaaatcccgcacatccagaatatatttcaggcggatcagatcatccaccttgccctcgatgtgccgctcgttggtgtccagcacttcagccacaccggagcccaccacgccaaaccctaaaattgccacgttcaccattctgtcttcctcctgtccgggccgtcagcccgccaaaatctcacagcgcaggactccctctatctccagggcctggttcaataactcctccagcgcgatgcgcagccccgaggtctccgcccccaccgtcaccgcagcacagccgttgcttggtatggactggttgatggtaagaatattcccacccgtctgggcaaagatatttaagacggcggacagcacccctggttcgtccttgagcaggaactgaaaggtgacgatccgcccatgcagcatgtcattgaagggccgcaccgcatccttgtatttataaaatgcgctgcggctgatgcccacccgccgggtggccaagtggaccgtgtccacctcgccggtttccaacagccgcttggcctccgccaccttcagaaaaatctctggcagtgcgctggactccacgatgaaataactgggtgacttacccattctatgtacctcccgcccatatgtccacgtgagaaagccatttgtttatcctttgtggtctattgtagcacaccctcccgcccgccgcaagggcaaagcccctgccaactctgccgatttctgccgatccgcccatgccgtttttgtgtattctcaccgattttcaggagaggaggctgtcttttgccggaaaacagacacctgcgctttctgctccgcctgctctatgccgccctggccctggccggattgtggctggccctgcgctttctcctcccctggctgctccccttcctgctggccttcggccttgccgccctgctggagcccgccgtacgccttctgatggagcgcctgcgcctgccccggcggggcgccgccgcgctgtgtaccgcggccctcaccgccgccgtcctgggcgggctggcgctggtggtatggcgggtaggctacgaactgtccctgctgttgggccgcctgcccaccctgctggccgggctgcccacgctggccgacgggctagagcgctgggcctaccggttcctcatcgccctgcccgttcagttccaaaccctggcccgtgatgccctggagggccttctggagcagggcattgccctgcccaaccgcttttatgacgccctggccggggcggtgacagggctggcttcggcccttcccgccgccgctctttttctctttacgacagttttggccacctatttcaccagcgcaggccgtcccgctctgctggacggcctgcgccgccgccttcccccgccgtggcggacacggctgggccgggtggcaggcggtctgagggaggcgctgggcggctggctgaaagcccagggcctgctgatgctgatcaccttcggtgagctcgccgccggtttcctgctgctgcgggtggagctgtccctccttctggccggacttgtggctctggtggacgccctgccggtcttcggtacaggcaccgtactgctgccctgggcagtgctcgccctgttggggggcgacgtgcggatgagcgtgggcctgctggtgctttactccgttatctcgctcgtgcgaagcctgctggagccccgtctggtgggggcgcgggtggggctccctcccctggctgccctggtctgcatgtatgtgggctttcaggcgctcggagttcttggaatgcttctcgccccactggccgccgtgctggcccggcagctctgggattccggcctcctgcacagcctgttcggaccttaaacaaacagcccgcggcacatgccgcgggctgtctgtttctttatttcgtaccatccgccgggatatagggctcgtccgggggcgtctccaccggcgtgggtacgggagacggtgtggggcttgtgctggtctcgggtggattattgggctggccgctctccccgggagacggggtctcagacggctgtcccgcgttgggccaggtggccgggttctccgggtcaaaattctcgtacctggggtcgttgaccggcggccaggtggagggatcactgatcacaaagctgttgggatcatactcctccggctcctggggctggggcgcggtggtgtggacgtcacaggtcccctgggcctccaggaagctgtagaggtaactgctgtccttggcggcggcaccgcccacgctctcccggctgtaatccaggatgccgatggtcttgaccgtgccctccgtgactcctgcgccctcgtcggcctgccggggacaaaactctcccgccagatgatacaggccctcaatcgccgtgccgtcgccgcccagcaccgggctgccggtgcaaacctccacctccttgtggagactacaggtttcggcgggcacgtcgtcgctgaacaaggtgaaggtgcgggcccggcttcccctgggatcgttcaggcaggcctcagtggcccgcaggccgctgtccatgcagatgctgacgctcttctgttcactgccggcggccgggaaggacttgttctccagcccctcatggatgggggccatgaccttcttccacatggacactgccgggttattgctggagctgatgcgctccgggttgttatagcccacccagaccgcggcggtatagtagggagtatagcccacaaaccacttatcgttattggagttggtggtaccggtcttgccggccaccgtcatacctgagagctgggccccggtgccggttgccccgccgaatttccctgtaaccacatttttcagcatgtcgttgatataccaggtggtctcctcggagagaaccgcctcgggctgattctgggtattgtccagcagaacctcctccgtgccgtcgtccagcacacgggtgaccttggtgtaggtgcggggctccacatacaggccgttgcgtgggaacacggagtaggcggcggccatgtctaccacactcacgccgtcggtgaggccgcccagagcgagctggctggcccccaggtcgttcatcacctgtccgttgacggtgcggccgtcctccaggtcgatatggaacttctcctccatgaactggaaggaattttccacacccaggttctgtagggtgcgcacggccaccgggttggaggacacctccagcgccgccgctacggtcatcctcccccggtaggtctgggggttgttcagcggccaggccttgccgctgaggagctgcaccggatagtcgtcaaaagcggatgcaggactgatcaccccgctctccagagcgggcgcatagacgctcagcggcttgatggaggagcccggctgccgcagggagcggctggcgtagttccagccccggttgctgctcttttcgcccagggcgccggccagcccaacgatgttgccctgggggtcgatgattacgatggccgactggatcgcctgccccgacttgctggtgagctgaaggttgctgcggtcggagtagaccgactccacgatggactggatctccgggtccacacaggcgtaaatattcagtccgccggaggtgaccatgtcggaggccacctgctcggagtagccgtacttctctatgaggtcgttcatcacgtcggtgatgacctgctcatcataccagttgtagatggtggcgggcctggcctcatcggtgctccgttccagatgggaggccagatcatcaatttcggccatggcctcgtcgtactcggactggttgatgctccccagctccagcatcttgcccagaaccagccttgcgcggtactggttgttctccagatagcggtagggattgtaggccgaggggttgttggtgatggagatcaggctggcgcactcggccagatccaactccgacagctccttgccgaagtagttctgggccgccgtggccacgccgtagcagccctctcccaggtaaatatagttgaggtaccactccagaatctgctccttggagtaggtcttgtcaaagtccaaagcggtaaagatctccagaatcttccgttttaccgtcacatcgtcgtactgggtggcattcttgatgagctgctgggtgatggtggagccgccctgaatatcgccgccggtgaacatgagcagcacccccttgagggtacgcttccagttgacgccgtggtgcttccagaacgtctcgtcctcgatggccacggtggcgttgatcagattatctgggatctcctcaaagtcgaccagttggcggttttctgttccatggagggacaggtgctccacatattcccccgtagtggaatccttataataaatcgtactggtctggttcatgacgaaattggcctccagatgggcctgcgggatgatgaccgtcttgatgtagaccgcggcaaagcagagcaggatagcccccgtgatcacgcagatcaggaggaaggtgcccagcaccttccctaccgtgcccgcaaccaccgcagccgtggacggccgcctccgcttccggccccggttcggattggggccctgattggatgttgacgccaaaatgacacctccgtttttcggtggaacacgtatgcttgcaggatcgccccatcgcatgcggcgattgctgatattatagcatattcctccagcttgtccaccctaattctttccaataaaggatgaatataggcttcgtcaaaaatttggcagatcccactcttgcatttttgggcgcaacaggctaaaataagagacgaagaaaaggaaggtatggtgcccaatatgagtgaagaatttggccctgatttcatcaccgtcactgatgaggacggcaatgaatttgagctggagcatctggacacactagagtacaacggccagacctacatggcctttttcccggccgtggaggggaaagaggacggctctgtggaggatgtggatctggatgaggaatacggccttgtgatcctcaaggtgatcgaggcagacggcgaggaacagctctccaccctggacagtgaggaggagctggagctggtgtatcagcagtttatggagtccctcttcgcggaggaggacggctcggacgcataattttttcctgctcggtgcgtgacgggttttatttaaacccacatctctgaaacgggatgcccacctcatggcgtggactgcaggcctcccggcgcccctccgagggacggctggaagttggaagcaacgaagcgacatggaggcaacccacctgccactttgtgcaggttttaaatggatccgcacggccagagcggggcccccacgaaacgctgtttcgtggggtttttcttatttccggcatttgaacaaagtgtaaaacctgttttcgctcttgaaagagtgcggcatttcctgtataatgtcagaatgtctatagccaggccccctgctcccgcggggggacacttatgagaggactgaagctacaaatgagcgcatccagagaaaagaaatcgcgccagagcgacccgacacagggcctgactcaaaaggagaggaaggagctccaggagcagcaggccgccaagcgcaaggccgttgtctatacggtcatcggtgtcattgttgccgtgctggtggccgccctgctgatctggcactccggcatcttccagcgcggcaagaccgctctgacggtgggcggtcacgattactccgtcaccgatgtcaactattatttcacctattatatgaatcaggcatacagcaccagcggcggcgcttttgatcccagcaaggatctccaaacccagtataccgacgaggaacagaccaagagctactttgaccagttcctggacagtaccattgagcagttgaagaagatctccgccctggaaaccgccgcctctgaggccggctacaccctgtccgacgatgacaaggcctatgtggatgaggccatctcctccaccaaaaaggctgccgagtcctacggctatgcctatgacggctatctgaaggccatgtacggcaagtatatgaccccctccgccttcaagacctgtgtggagcgggaagctctggtgaacggttaccagagcgcctacgccgacagcttgggcattaccgacgaggacattcaggcctactatgaggagaatgcctccacgctggacacctacgactaccgctatatctatctcagcggcaaggccgcgtccaccaccgacgaggacggcaacacggtggagcccaccgaggaggagacgaaggccgccatggaagctgccaaggccaaggccgatgcgtttgtggctgcggtgaattcctccgatgacaaggaaactgcctttgccgagctggcccccgactatgtgtctgaggacgacaaggaggactatgaggcggatcccgacgcctccctgcacaccggcacggtgggcagcagcctctcttatcagagctttggcgaatggctgatggatgacagccgcgccaacggcgatgtgggcgtggtggagtccagctccggctactacgccgtcatgctgttgaaccgctaccgggatgagactgccaccgccgacatccgccacattctcatcaaggccgaggtggctgatgccgatgaccccgccaccgaggacgtggacgagagcaaggtgcccactcaggaggccctggacgccgccaaggccgaggccgaggacatcctggcccagtgggaggcgggcgacaagaccgccgagtccttcggcgcgctggccgaggaatactccgacgatcccggctccaacaccaacggcggcctgtatgagcaggtcgcgcccggcgtgatgttcgagggcttcaacgactggatctttgccgacggccgcgccatcggcgacaccggtctggtggagaatccccaggacggccagcagggctggcacatcatctacctggagggctgggacgagcccgtctggaagctcaccggcaagaacgcgctgaccaacgagaagctgaacacctggctggagggcctgacggaaaacatggaggccacccagggcgccggcgtcaagtacctcggcgagtaagagacatcatgggacaggcgggcggagcgctgctccgtccgcctgtttttggaaagggatgaactgcatggacgagaggtttctccgcacagagatgcttttgggcccccaggccatggagcgcctggctgccgcccacgtggccgtgttcggtctgggcggcgtgggaagctggtgcgccgaggccctggcccgctccggcgtgggcgccctcacgctggtggaccacgacacggtgggtctgaccaacctgaaccgccaggtggaggccacccgctccaccctgggccagcccaaggcccaggccatggccgaccgcatccgcgacatcaatccggactgccgcctcaccatccgggcggagaagtatgaggcggggcggcgggaggacttcttcgaccagccgctggactacattgtggactgcatcgacctggtgtcctgcaaactggatttgatcgagaccgccctcacccggggcgtccccatcgtctcctccctgggcacaggcaacaagctggaccccggcctgttccgcatcaccgacctgtcgaaaaccgagggctgccccctggcccgggtggtacgcaaggagctgcgcgcccgcggcatcctccaccaccgggtcctctggtcgccggaggagccgaaggccgccctccagcgggaggcgccgccccccggccgccgctccgtccccggcagcgtggcctgggtgcctccggtggccgggctcatgctggccggagaagtggtcctgtcccttgccgggctgcacgtataaaaacatccctccattggtaaactaaagccaatggagggatgttttttgacgcagaaaaaaggctcccggctccgcagcgcggcggctggcggagcggccgggctggccaacggctttttcgggggcggcggggggatgctgctggtgcccctcctcacccgctggtgtggactggagcagcgccgcgccttcgccacgtccatcgccattatcctccccctgtgcgcactctcgtccgtcatctactggtttcggggcggactggactttgggctggccctcccctatctggctggcggcctgctgggcggcttcgtgggcggaagggtattcaagaagctgaatatggtctggctccgccgcgcctttgccctgcttatcctctacggcggcgtcaaggcgctgttcttctgatggcgtggcccatctccctcctggccggcgccgtcaccggtgtgctctccggcttcggaatcggcggcggcaccctgctgctcatctatatgaccgccttcgccggggtgccccagaatctggcccagggcgtcaacctgctctactttctccccacggccgccaccgccctgcccgcccacatcaaaaatggctatatcgaccgtcagaccgtctggcccgccgtcctggccgggctggcgggcaccgctctggccgcctgggccgccaccagcctggatgtggagctgctccaccgctgcttcggcggtttcctgatcgtggtggggctgcgggagctgttcagccgctcgtagggatatccatcacgaaccatgtaggggcggcctttatggccgcccgcgggcgaccacaagggtcgccccttcatccgccccgccgcctgaacgtcagatatccctccagaatcagcgtcgccgccaccgcgtccctcccatccggccatgccggatgggaaccctgacgccttttggcatgctcggggcaagtgaattgcccctgcgccaagatattgctccgcaaaatgcttgtacggcgcaagcgccgccccgctgcgcggggaaccgtggacgcctcttttactcacagccgctccgccgcctgaaggtcaggtatccctccagaatcagcgtcgccgccacggcgtccacggttttcttatgctgcttcatccgcttgcccgaggcgtggaggatgctgtgggcctccaccgtggtgcggcgctcatcccagagcaccggcttgaggccgcagacctcctccagccgggcggcaaaggcccggtagagctccgcccggggcccctcggtgccgtccatgttccgggggaagcccattaccagctcgtccacactgtgctctttcgcaaggcgggccagctcctccgccaccaccccctccttccggctctggatcaccgtggtgtagccggccagcaggccagtgggatcggagattgccactccggtgcgggcatcgccgtaatcgatggccataatacgcaaatctaccactccttttccgtaccactatagcgtactttttgggaaaaaacaacggaaatgtcaatagtaaatgcgaaaaaaatataaaaatttatttttagggcatcaagcaagggcggcaatacactcccggaagcagatttcagccgttttccatcccaatatttcacgcggataattgttcatccatgcttctgccgcctcaatctccgccgcggacacttttccgaaatcggttcctttcggaaacttccggcgaatcattttgttctggcactcatttgacccgcgttcatacgatgaatacgggtggcagtagtaagccgctgtcctccgctttccctttcgcaccacggaccgttctaacctcttcacgtcagagaactccccgccgttgtcgaatgtgatcgtcttgaatgcctttgcgaaaaggtccgcaccgaatttccgttctatgcggtccattgcctttataacgctttccgccgtccggtctttgattcttgtaatgatttcccatcgggtcaaacgctctgtcagcacaaacagggcttttgacccgtcttttttgctgtaaaccgtgtcgccctcccaatgcccgaaagtgcttctctggtccacttcgtccgggcgtttttcgatatttttcccatacgacgcacgctttccggtctttttaactttcttgtattctcgctttcgcttcgatttctccggcaaattgctgttggtcagggacaggaaaacgccctttgtaatgtaactgtaaagcgtgcttacgcaaatcgaggttttgaacgtccgcccttccaacctgatttcggcaagggccgcggcgggcgaacgatcttccacgataatctttcgttctatgtattccgcaagctcaaagtcgcgcccgattttcagcggtgcgccttttgcggcgaggttttcgcggtatcgcttttccgccccgtccgggttatagcgatcttctgtaatccatgtatcaccgtccaaatactgccagcgggcgcgtttgatttcgcggtaaatcgtgctgatatgcacgtgcaattcgtccgcaatttcccgttttgtatgcccctgattcaagagggcttcaattttataacggtctgtttttgataaatggctaaatacgtgtcccatgccacaacctccacaaagcaaagaaacccgcccaatccgggcgggtttctttcgttctcccttgttcttgcggggtttcctccgccgttgtggtcatattatagcatttgtttcatactcacgcaagtatttatttttcgtcctgctccgtcagccattccaaagacacgtttaggacctttgcgagaacgacaagttcataatctgtcacaaaacgcgttccaatttcaattcggcttacgctgtcccgctccatcgtgattccctccacctgtaaccgggccgcaaggtcctcttgtgtgatttttaggcgggcgcgggcttcttttacgcggtttccgcaaagatttttgcgccctttatagtcatatatcttcatcggttgttcctccacatgtgttaaagtttcgcatttttcttgactttaacacgcacaccgccgataattgtgttaaaggtcagaatccaatgctttcaatggattcaaacccgcaaaaatacgggtcgcccgacacagcgggcggcgaaatggaggatttcacatgaaaagattgctttctctttttcttgcggcctgtcttgccctctccctctccgggtgtcttgcggactacgacacgcccaagcacgccgaattgtccgaacagtacgacttttacgccgattcgcaaagcgcgctttcttccggtatggcaatcacgccggaacaggccgatgaagtattcattatccttgtgtcctgcggcatggaagcaaaagtaacaaatgtcaccagaaaggcgggtgacgacgggcattgtcaggtttccgccgggctatacgtgtatgatgtctattacaccgacggcgtggttgaccgcgtggaatacaacggggaggaactttacccgaaccccgccccggctcccgtagaacccgcgcccacggatgaccccgccgcgccggaaactccggccacgctggaacaggcagttgacgacgcgatcaccgcggccaacgccgaaaaagaagatgtcagtatttacgacgcggccagcgtcggggaaagttcggacggctcctttgtggacatctatctttccgggaaagataatttaacctcgaatatggttcggaaaggaatgctgttgcaggccgccgacattctggaatctctgcaatcccgcgacgacatcgggcgcgtttctcttttttggtctttcccgctcgttgatgcttatggcaacacttcaaccgaaaccgttatgaaagtgacattctacaaagatacgcttgataagatcaattttgaaaattttgattccgacaatataccggaaatctgcgacgacttttaccagcacgcggcattgaacgaataaagcagaacggcgggcattgaattatgcccgccgttcttttgcttattctgatttcttttttacgtccgccgcggcctgcacttccgccgcgtattgctccggggtcagccccaaaacctccgccgcgattctgtccgtcgccgtttcaatcaaatcgttcaggctttcaaagccgccagcttctaccgctttttgatagatcgcctttttcccaatctttacataggggtaaaggcggtcgtaattttctgcgttccacttgttcttcgcccgtgtgttgcacgcatactttttcttttccatgtgtccgcctcctttctccgctgattatatcacttcttgaatactcacgcaagtatgaaaaagcgcacaatctcacgtgagtatttttgtgcaaatttccatcttgtcttttcatactcacgtgagtataataaaagacagaaagagggaagcacaacccgcccacctgccggggcataaagaatacggcgggggccaaccttacgggccgacacgaaaagggggccgacacggtaacgacaacacttcaacttctggtttcatatatgggaggtaatcacatgaaaaagtttgagattggcaaggaatacttcacacgtagcatttgcgacagtgagtgcattttctccatcaagatcaccggacggaccgcaaaaaccgtttcttatgagtatatgggcgaatcccgccgttccaagattcgcttcgatgattccggcgaatatatccagccggaccgctattctatggctcccacgttccgcgctgaacgtgaggttcagccggaggaagaggccccaaccgcggaggaatccgccgtttccgttcccgcggaggacgcggccccctccaacgtgatcactatttcccagcccgccgacagtgggacggtaattgtaatgatcggccagcgcgtcgaatgcgtctgcggtgcctgctatcccgttgagggcggaacggtgatcggctttgaggatgtccccgacgggcgtttcttccgtggcggcgtgtttgccctgattcgctgggacagccgcccggaccgtcccgaacgggtccgcctctccgacattcaccgccgcgggtggcggtctgcgggtggctctccgctgggcgtgttcgtggccggataaactaacaaggggcggcgcaagccgccgcccctctttgatgaatggaggatagttcgatgaaatcatacaagggttacacccgcgcacaactgattgacattctggccgattacgccgtgttcaccgctactgtaaacaataattgcggcggcgcgcgccagaacacgaataaaggtgactacgtgggcctttatagcacctatcccatgaattcccggaagtaccccgcgttttctctttccgttatgtttgaccgtatgaacgcggatattgcaaaggcggcggagatcgcttcttttcgcgtccccgccgcaggcgaaagggcggtggtttgatgtccagcaagccccaccgcatgacccggacggcccgcacccgctcccgcaagttctccgggcgttgtgaatcctgtggaaagcccctttgcagttgccgcgcgtatcagtacaccgacgaaagcaacggggcgatcaccgcaaacgcgccgtacctctgccgcgattgctacgaaacccgctacggcgtaaagataccgacggaggttgacgcgtacaaggcgcgcttgctgggtgtgctgggccgttatgctgatagcgtggagggcgcgcccgcccgtgatctcgccttgcgtgtgatgcgcctgattgaaaataccgattgaccccgcgccgccgaacctcccacggcggcgcaatttttttgaaaaactttacgttttcctattgacttttcatactcacgtgagtataataataaacagaaagggggtgaaacggtgaagaagaaaaagaaaaagcccacgaaatcgcgggtcgatgttcgcaccatcgtaataaccgcaatcgtggactttctggtagggcttgcgttactcctgattgataagcacacgtaagccgaaaccccgtattctatgggcgggttcaccgcccacccatagaatacactttttcttctgaactgtcaaccatgcttgcaaaactcggaatcttcctgatcgtcgttgccattgtgaaactgattatcgccgccgcggtccattgccgccgcaagaaaggggaatgaccatgaaaagaactgcaaacaagttccagcgggcctatatggtcgccaaagcctgcgtgcaggaagtcgaatcccggcaagaggccatcgaaaagaagttcattgccgacaacggcattgtcaatcccgacggctccgttcccgaattcctttactgcatggaggatgacgcggcctttgaaaaggcaaacgccgaatgcgccgcgctcattgcttccgccgggcttgaagaagaactgaacgccgcccgcgccgcgctgaaagcggcggaagatcgcctgattgcctacggcctgtctcttgctcccgccggggttcgggccacgctggaaaaggccgttcggaacaacgccgccacccgcgcaaaggtccttgacctcacgttccggcttgacgtgtccacggtcagcgcgtaagataaaggcgggcggtgcaagccgccgcccgccccaataaagaaaggacgttgtttatggaaaattcggagttagaaaagcagattgacgcatggaaagaaaaggttctttctgcgcatgacgggtgcggcgcggacacgcgcaagatgatgatcgacattgacaagatcatttccgcggcattcgatcatataccctgtttccttgaaaatttataatcgcaaacaaaaaaagcccgccggggaatgcccccggcgggcttcgtttctgtccgaatcggacagttattcactttccgcgggcgcgtctgcttcctcttccgcgtcctgtttaattccgattgccagcatggtttcggcgggcggggtttccacgtagtctttcaaattctcgttggttccccacgcctttttcgcttcctccaatacagcttcaatcatagtcgcaatatccttttccgtgaacagcagtttcagcaccgccggaattctctgataaatccagtctgcgacggcggcaaacttcaattcgcccgtcccgctcccgaactgcttttctgcctgtgtgacaagattaaaaagaatcttcttcaaaacctttgtttctccgcgcttgataagcacgacaaccagcacaaggaacgcgaggaccacaagaacactgtcccaattcgcggccagaaattgaatgatgttcataattcgtttctcctttcgtttttacacagccccacccagcgcgcaaagaagcaggtcaaggctctgcaatttcccgtagttctgcaaccaatattccggggtgttgatgaccccggctttcaccaacgcgtcaacgcccgatttcacgtccgcggttcgcggcccggcctttgtaatcttcgccgcggcctgtgtgaacagaatatccagataggccacctttccgcctgcgacggcgtttttccagtagtccggggagttgatgacccccaactcggccagcttgtcaatggccgcgtccgtctcgctctgaacgtccgccgcgttgacccagccgtaaaccgtggacccgccgcccgcctgcttgataaggtggtacgggtgtttcgcgccctttgaaatcatggtgacttttgccgggccgggcttacaggctttcccgcttgccgccgccgcgctggtgtagtgcgtgttgcccgtaaactgcaccacgtcgcccacggcgaacgccagcgcgccggaggtgtcggaggccccgccgggcttctgcgccgttcctgcgccgcctgtggccgcgcctgcggtgtcataggtgatatacggcaatttgccgtgtttggtccacctgcgcccgttcatgccggagattgcgccgatgttcaggcacgccgtcacctgtacgcagtttttgaacgccggggaacactcgatcacctttccgccgccgatgtaaacgccgatatgacctttcagccagacggcttcccccggaacaatcttgctgaaatcggtggaaacgccggaacacttcgtaatcatggtgtcggctccgatgtccggcacaccgccggaggcataggacgcgccgccgtaggttttggacgcgtcgccgttccagccccacaaaacgcccttgatcatgcacacgcagtcaaagccgaaaacgggcgggttctgattcgccgcggccttgatcatggccgtgcgcgccgcctgcttgttgtagctgtggttctggcagtaccgggacacgttgcccccggtcaggggcgcgccgaaacagcccatgacgtacagtgtcttgtaatggtccacgatgtcttgcagtttcttgatgaattcagacgctttcattttgccctctcctttcgcgtctgcggggcgttccgccccagccgtgatatttgacccgccgcccgctccggcctgtcctgcgccgtcgtaggccgtcaggccgtatgattcgataatctgaatcagcttgtccgggtacttcgggtccgtggcgtagcccgccgccttgatcgcccggcaagcggtcttatagtcccgctccccgacaacggctttgtaccgggccgcgcccgtcagcaacgccgaatggtcctccacgctctcttcccaactgtcgtatgcccggaaaagggctgtcacggtggtaaagttcacgccgtcgtaacactcttgcgttttcgtgctgtaaacccggcctttccagcttgtccccgccttgatgccgaacagggcgtttgccttgacggtcaggccggattttccccagccgctttccaaaatcgcctgcgcgattgtcagcgaggcaagcacgccgcttttctgcatatccgccgcggccagcgcgcccacccgctcaataaatgctttttgttcctgtgtcatttgtgttcctccgctatggctgaatgttgttcaggtctacgggcattccctccgtcgccgtcgggtttgcctgcttgatcttcaccacgttttccgcctttgctttccaactgtaaaagccgattgccgttgccgccggggttcccacataggcgaggaaaacgccaagttgcgaggggtcgaggataacgacacgaacgccgacgacgaaccccgcgaaataggtcaaaagcaccgccgaaagaaccagttttgaaaactcgatctttcggcggtcctgctctttcttccggcggctccgccgtccgccaaataggagaaccgcggcaattccaccgattagcccggcggcggcgctgataaggtaaagcacgtttcacaccgcctttcacaaaaaatcatgctttatcaatctgtcgtcgtaaactcgtttgatatttgcgacggcgtgtgttgcgcggttgttgatatactctttgtgggtgtcgcaatattgctcgtaaaagtcaatttcgcttaaaacttcaaagaactcttcccgcgtgtggggaatatcccgcaatagctcattgttgaaccgtaaaatcgcggcccggtgcatatctgcgtttcgcgcgtcgtctgccctgatatggtcatcaagggtttttctggtttcgtccagcttttcgatcacgtcgccgttgacgcacttcccgattgcctttccgatttttgaccacgggttgatcttaatgggggcaatctcgatcagggtcaaagcgacaagcagaatgccgacggcaccacccccggaaaataagtcgttcaatgtcacgtctgtttccctccgtgtagaagatcgcccccggcgcggattgcgcgccgggggcctttccgcctcccttaaagggtgatttcaagggcggtcagcagatcttccacctcggtttttagccgcgcggggacctgctccaaggtctttttgcccttgacgatcagggtcgcataaacaacagccatcgtttccacctcctttcggcaaaagatgtatgcaaaaagcaggaacagcgcgttactcattgccgcccccgctttcagccgttttcagcagttcgcgtaccttgtcgcgcaaccgctccgggacatcatcaatcgttttcagtcccttttgaatcagatcggcatagacccgttccatgttcgcccctcctttactctgcgccgtacacggtcgcttcgatcatttcgtaaacgtcgcaaagggcaagttgcaggtctgtcacctgcaccgataggctttcattttgtctttgcaactgttcattttctctggtcaattcttcaaccgttttcggcttgttcttgatgcttgtccgcttatgctgtacgctcattcaaaattccctcccacggatgaaataaagcaatccccgcttgcgctgttccgcttcaccttgattcggaaattgaatccccattcctccgccgtcttgctgtcgttggaaagaaaaaacttgctcccgctggtgacggcctgcgtcacgtcctcccatgcgggggaatcgtcgtggccgttgttgcatgcctccacggtgaattctgcgcctgccggaatctgccgggtaatggacataatcgcctttgtcaccatgtcgtcggcttcaaggggcgttgcaagggtcagttcgatttcagtttcgttcttgctgaatgtgtaagtccgcgtcgcggctccgccgtaattgtccgtcgccgtcaccgtcagcgtgtgggacccgttcaacagcttccgccattcatccgcggtcacgctgaacgtgtattcctgcccgctggtcgcggcgtaggaccgcttttgcgttccgtcgatcttctcaacgacggtgatcgtctggccgctgtccgggtcggtgacggtgtatttctggtcgaacgctccggtctttgccccaaggtccgtatctgtcccgctgatcgtgggcggtgtgttgttgatgaccgtccgtgtcgcgctggttttgtacgccgattccgcgcccgcgctgtcgtatgctttgacccggtacgccacattctcccagccctttgtgatctggtcggtgtacgtccggttgattcccttgtagacctgcgcccagccgccgccgttgtactgccgttcgaggatataccccgaaaggttgttgtccgggtcggtggaggtcccccacgtcacggtcagtttttcgccgccccgaacgtcgctcggaacgtcgatggaatccgggaccgacggggcgcggttccaaatgatcgtgtatgcgccgtccgaatccgggttatcagataccaagatttcagattttagattacaaagcgggcgaacgccccagtggccgctgtacgcgttgctccagtccaccgcgccggaggaattgacgtagcggacgccgtacgaacacgacgcataagcgtccgcaagccaccagtaccacgggtcattgacgttaaaactgcttgtctggtattcgctttttgatacgcattccgccgttggcttcgccttgcgggaattgtcatccgtgaatagcgcaagtttgctcccggccaccacgtcgcccgacaatccaacttccgttgacgtggcaaagaaaatcttgtcggtgcatgtttctgttccgccgccgtccacctgcgcttttccgacggtccggttcgtggtcagcagggcggcaatgaagttcgcggagaaccccgccagaaagcccgcttctgcctcgtactcgttgtagttgctccacacattcgagttgttcggcggcgcgtcctgcccgtgctgggccgcgtaccacgcgcccgcccccgcttgactgttcagccatcggcggatatttgaccaaatccagcggttgttgccgtaggaacggcggtttccgtcgccgttgttctgctccatagcgtcaatgcatttcagcgagataatgcgttctgtgatcagcgtgacggaattcgccggaaacccggcgtggttcttgtccgcgatcttccagataatcggtttcccgttgtaaagcgtccccgtgtccttgaccagcgcgccaacggcaagggaacttaaactttttgccattgtttaacactctccttgaataattttttgaacaggcggtccgtttcccggataagatggtgacagttgccctttgccgcatggctccgccaacttccgtatgactgttcgattgccgcaagggtaattttccccttgtccagcaagccccgctgtttcttcaatttccgttgctcgttacatttgctgttcctccttacctttcgcacgatcttccctgtgtcggtcatataggttcggaatccaaggaaatcaattccgttccgcaatgggaaaatatttgtcttgttgttcagtttcagtcccagcccggccacgtacttttcaatctcccagcggcaatactgcaaatacgccttgtcctcgtgaatcaagtaaaagtcgtccatataccgcccataatagcggattcccaatttctcttttatgaagtggtcaagccccgaaaggtacatgaccgcgaaccattgtgaagtctggttgccgatcggaattccggggtcgtccgtgctgtcaatgatcatatcaacaagccatagaacgtccgggtcccggatgaagcggcgcaccattgctttcaatggctcatgcggaattgagtagaaatattttgatatgtcgcatttcagaacccagccgtccgcataatgggcggcgcgcgggtcgggccgcggcaacccctcctcccggcaccgttgttcttcccgcgctttccgctcgaaataataggaccgcataaacgcttccagtcgatacagtccgtcatgcgtcccgcgcccggcctgcgacgcgtagttgtcgcggataaaggtacgggaaaacgctggttctaacacattgtcacataaggaatgctgaaccaccttgtctttgaacgcgttggtcataacaatgcgttctttcggttcgtaaacccgaaatacgaaatattccgacgggcgataggttttgttcttcagcatttccgaaagcaggcaaagggcttccaaaaggtttgcttcaaacttcgcaacgctttcttttccccgtttgccccggcgggcttttagaaaccctgcgtacaggttcccgaaatcgtggacccgctcgaattctgtttgttgcataataataaaaaataactccttgccgtgtatagaatcggccttgcggggacggcaagcggcctgcgcctgccgtcgcaatgcttcatcatcggaccccgccgcgcgcccgcgccggggcggaaactggttcccgtgggccttgcttcaccaatcttgtgtttaccgtcgcgctgtcaccgcggcggagggatgcggcttcctttgatagtggtcctctgttttcagccgttggcttactcattcgcggtattccaccaaagcgggcgaacgcccctgttgccgttgtacgcgttgttccagttcatcgcgccggaggaattgacgttgcggacgttgtacgaattcgacgctacaagccgcaccccaagaaaaacgccccggcgatcaccgccgcggcgcgtttccccgttgtctggattccgtgaaccgttcgaggtccttttttctccaactggccgtcatccgttttacttccacggcgtactttgtccacgccgcgcattgcgtcgttgaaatcaggttctttcgttcggccagttcgatcaaaaacagcatgtctttacaacgtgaaagggcctgtttctgttcataccgccgttcccggaattctcccgcgtcctgaacgtcaagttcgttcgcgtcctgaatatgaaccacgatttcccgcgcaaattccatcaggtctacggcaagtttcccgtgccgctttggaaagcggcgggcggtggtcatgtcgtaggtgtgaaaggctaaatctttcgctttcgtgatgatgataaattctttttcatccgccacgccgcaagcacctctttccccggatttcttcaatctccgacgggtccccgtcgaaccggaatccccattccgtgacggttagaaccgcctgcgccccggtataggttcgcccgctgatcgtcagttcgtcagcgtcggaatcgcacgcggcgcaaggcgggtccagctccgcaaacagattcccaatgatgcaggacagttcccgccgtgtgcaggcgtattccctcaacattcgattctgtttctggccgcgttccaaatgccctttgtcataaccaccccgtcgagggaatcaaattgcacaagaaacgggtttccggtgatgttgttgaacagtccatcttccacgcgggaaacgcggctttccagccccgcaatagcggacagggcttccgccgcgtccgcctccgcctgctctgcggcctccgcgcctgcgtcccacgcggcccgctcgcccggctgaacgtgaacttctgtgtcctccgtgtggtcgatcagtccggcaatggccgtgtcatagttccccatcgtcgtggggttcacgtgaatgtcgctgttgttcgcgtggtcgttcagggcggtaacgtctgcctttttcttaaactccgcggcgtgcgccgtcttcgacgtgttgtggtctgcaaggtcctttttcgtggccgttaccacgttcgggtcgatgacaaaagagatcgcgcccgtgttggaaatttcgatgtgcatagtcagttcaatttccccggcggctccgctggtgataatgaccttttccgtgtccggcgtattgcaaacggcgatcatgttcggctcttccgcgtcgtcgaacacgcccatttcccggatagtccagccgcccacgtcggaggggaccaccgccaccacgtcaatcatgttcggggatttctcgttgacctccacgcggtttacctttccgcgccatttctcgccctttagggcggtcattgtggaattcggcttgtagtagcttccgccgccgtctcccacggcaagggtcgtaatattgactttctggccctccatgactgcttccgtgacaagctgaatgcctacgtcggtcacaatacttccatatttgttttcgatttccgccattgttacgcctccgttctgttctgcgggaagatttcaagtttcccggtttgctgaatataagcggcgcataacgcgcgccaatctgcccccatcttccggtaaacatgcgggtaaatgtccacgcgcacgccgacggtgtggcccgctccggccttgatgcgcgccgtttcctcgatgtcctccgcaagataggggtaaacttccagtcgcacgccgacggaatggaccgccgccgtgaatactgccgcttttttctcaatctgataactgattgcttccaaatgggaccggaggtttttataaaagcgcacccgctccaaaaccgccgcttgccggtccgccgatacccccgattccgtcgcgccgatgatgactttgaacatgtacggttctccgccgtactcgaaccactcttgcactcgcgttccggggaataccgcccccagcgcggtttcgacggcgtatttcgtccccaacctccggtgaacgcgcacgctgtcccggatggtctgccgcttgacttcgatcggataggaatagtcgtaccaatccacatgcagatcataggccagcacgtcaagcgtctgttcgtccagttcgtcaatccgggcgtatatgatgttcttcccgatctgctggaccgtcccttgcaactgctccgcaatgacccgcgcaagggccgtcatggtcgggtcgtttttcaggggaggggggagggaccgcgtataatctgccgaatgcagttcgttgtcattcactttccgcacccccgttcgtaacggcggtcgttccgattttcgcaacctgattgtctttcaccgtcgcaaaagctggggcgcggacctccacccgctttaccccggcttgcataagcagttgaatcaaataggacgggttcacgtcccgccccatcttctccgcctgccatttcttgaacgcgcccaccgccgcgtttacgttctccgaaatcacgtcgtcgctgattgcgccgccctcctgtgtgtagtaggtcacgtcgatgttgtatgccatggtttccggggccttgacggtcacatggtcggtcagcgggcgcaccgtgtccgcgttcaggatttccgaaacctctttcaagatttcttcctctggcagttctccgcctgccagcagaacccgcacgtccacttctcccggctccggcgacgtggcctttacgtccgcgatcagggccgacgcggattttgcgaaatactcatatccgcccatcggccccgctgtggagtatgtttccacgctctcccgtagccgttcataaaatgccgcgtcgctctcttcatctgcgccgcccgcgctctccgttgtgttcgacacgctttgaaagtaggggaacacgtcaaccgcctgtttgatttgccccggaacaaagccgttcccgatttctcccgcctgcgtgcattccgccgccacgtcgccggacaactggcccgccggaatggtcaggtcttgaagcgtggcaaacacaacgtcgccgtccggtgttgcgcgggtccccgccgggatgacggttgcggtgtcaagtttgatggacagcgtatagcgcaaagttgttttcgccttttccggctccaatcggtacgtgtccttgaacagttctgcgagggaatccagatattccccctccgcgtaccgcggcacgttctgttttgccgaaaagtcgatgttcacccgctcttgaacgatgatgtccgccacccacaaaacgaaaagccgcgccgggtccgccgggtacagcgtgcgcccggtgaacttctcgtatgactgaatcagcgcgttcacgattgtttccgtgtcggtttccacaaaggaaatgtccgggtaactcctattcgtcgccgccaatgatcttcacctccacaatgggaatcagggtccccggcctgtcccccaattcaaaggtcacgttttccacctccgcccgcggctcgaattcctcgatcgcttcgagtacctccgaaatcaagattgactgcgccgccggaatcggtttgtcaagaaaccgttgcgccagccccaagccccgctccaacggaacggaaaatttcggcgtagaaaggatgaccgccacgttctgcaatacctcttccgtggtgtcctccggcgcgaggttgattttttcaagggcgtatgcctttacggtgtaagccatcgtccgccctcctatctgctcgaatatgattgcatggttacgttgaccgatgcggccagcaggttcccgccccggtcgtatcgttgcagggaatttgacagtttggtgatgacccacttgtttgtcccatacgctttcgggccgatgatcaggtaatgggcctcgccccgccgcatggtttgaagcaggttcgcaacctccgcaatggggttcacgcccaaaaagacggaaaagaacatggtgaaagacatgctttccacgtcctgccctgtgaactccaaaagcggctctttcaaatgccgctcgtgcgtggcgtacttcaccgaactttcccatttcaggtcgtcaaacgtcttgatggatgaccgtgagacgtaaaaggtgaacgtcccccagcttccgatttctgccatcgtcaaatccccccaatcacgaacccgtccccgtcctctgtcgggaggtagatgcaaagcacgtaatcccccggcgacggtagccatgggctgatcttgacggcgtggctgtggcccgcaaaggccgcgtcgccgcttccgccgctctcggtttccgtccgttgcggcgcgttctgcgccgggatgaatggcgcatttttcagaactttcagttctcccgaaacaatcgggctttctcccttgtccgaaaaggtcacacgggccgttcggttccctgcgttgacagaagagacgatgcccgttcggaccatatttttcaaaacggataattcgctcatttagtagccctccagcacgcggcgcaaggtcagatcggttttatacccgcttcgggatatggaatgtgtcgccgtttcgatgatgtactttccgtcgaacgccccatacccggccacctgaaccgttacgcccgccacaaggcgcgcgtccccggccagcttgaacgatgccttgaattctcctttgttcttttcccgtaaccgcttcattgccagttgccgggcctcttcacggtttgataccttttcgttgatttccagcgtttggccgctcttgtccgcgtcccgcggggtgtaggtatattcgatcgtcgtccccgtggccgggtctgtgtaggacacgtggcatttgctgtacgcggtgtcgtgcaggctcgtggaaaaagaatagcttcccacgtccgcttttccccgctggatggtccgcaccgcgtctttctgctcatacgccgccgcgtcaaacaggacgatgatttttgccgtgactttcagggagattccagccgctttgcaaagccgctgtaaaaatgtgatgtcggattcctgcatttgctctttccgctgataaaatgggtcggacgcggattcaaacatgcaggtaaacccgttcgcccccgcaatctcctttgcaatgccggaaagcgtgtatttctcccacgctttcgtctttttctgtgtccgaatggtggaggcgtaggggatagacccggccttgatggtcgctttcgcgggcgggccgcttccgtccactgtgtccacggcgaacacgccgcagtcaagaacccggtctttcccgtccgattcccaattcttttgcacaatcacggcggagatttccgccccctttgacgcggagggcgtattcagccagcttcccagccatacgccctccttgtcgtcaagggatagttgcaggtcgtccgtcttgtcctcttcgttgtccgtgtaggtcagcgaaagaagatgcttgttgatgtccgccgaaatatccacccccgaaaaggtcaggcggataaccgctcttctcgcgttcatgccgtcccccttttccacggcggcaaccccgccgcaacctgtgattcaggctccgggatggtcagcacgattcccgcggggaacacgaaaaggcggcggtattccgggttcagcttcataatcctgtccgtgtacgcttcgtcgcccagcgttttataggcgattgcgtcccacatgtccccggctatggtggtgtatttagtcatagttccgccgcctttcgtcgtcctcctgttgccgcttccgctcttcgatttcgtccagcagttcttcgtcgtgcctgcgtagcagttcttcgatgtcctccgcctgcgcctcgctcccaacatggaaaacgggcgcgctgtgaatgacgatcgacgcttgccgcgcgccggacgcgatagacggtgccgacacgctgggggcctccgcgcctgcataagccagttgcagggccggaacgccaacccccgcccgaatggtgttgacggtgtttgcgagattgcggaagatagccccggtttccgccgcattgaaaacggtccggttccttgcattcgtgacaagttccgcgcccgcttcacccgctatgaacgtgtcaggcgtgtttttcgtgccttttgcaaaagtcggaatcaacggaatgttgatgccctttccgccgatgccggggacccaatcaggaattttcagtttgttcagcccggaaatcacgccgttgatcaggccgataattccgttcagaacgccgcttgcaatgcttttcagggaattccaaacgccgctgaatatccctttcacgccctcccacacgcgggaccaatcccccgtgaagatgcccgcgaacacgtccacaatgcctttaatcgccgtcagcgcgccggacacaaccccttgaatggtcgtcagcgcaacgctgataatattttgaatcgtcggcataagaaactgaatcacggacataatggccgttgcgatcgtcgaaacgacggttgccagcccttgcaggatggaagcgattgtcggcgcccaatccgcgaacgcctgcgcgatctgcggaagcaccgtttgaacgatgaatgtaaaaatctgttccacaatcgggcggacgtaggtattcacgaactcgataaagccggaaaggatattccacacagtttgcaaaaccgtgatcgcaccgtcgataacgcccgtcgcttcctctccgaacaggttgatcaggaagtcccgcgctccgcccaagttcccgtctgtgaagatgctctggattgtgcttccgatattcgagattgcggacacgattttgtcgaacacttcaacacccgcgtccccgaacacgtttcggataacctcgcgcaccttgtccagattgtcccgcaggatttgcaccgccgaaataatcagggtgatcacacccacgacgggaagcactttcccaagaatgccgctgaacggccccaagattgcgccgcccagcttttgaagcgggccgaacagggttgacagcttcccgaacccctttgcaaccacgcttccaatctttccaagcggacccgccgcaactgcggccccggcccgccccaatattccggtaatggttcccgctactccggtaaacgcccgcgtagcaacgccgcccacgccggaaaatatgcgggtaaacacgccgcccacggctccgccgataccggaaaacaggtttccgattttcgttccggcgaacatctgcccgaacgcgcggcctacgccgcccgccgcgcttccgattccgccgaaataccctgtgacgctttttgcaacgcccttgactttagacgcaaagcccacggcttccacgcccgcaagggcgaatttgcctttgaacagggccatgaccttttgaatggtcagtaccccgcctttcaggtcaagaaatgccagctttgccaccagccccgccgccttgaacgccagaagtccggtgacaacctttgtgatcgtccgtaccaactccgggtttgcattgataaactcggtcagtttggagatcagctccgcggccttttccgcgccctcggtaaacgtcggtaacagcgcgtcgcccagcgcaatttgtagaccctcaaccgcggattgcaacagcgttacttttccttgaaagttgtccagtttgatttgcgccattcgctccgccgcgcctgcggaattgttgaccgaatcggacaatttttgaaaatctgcctcgcttgcattgacgatcgccagcatacccgcaaaggattccttgccgaaaatggccgttgccgccgccacctgctccgtttcagacaacccgcccagactgcttcgcagattgtccaccacttcgcggaatgacttcatgcttccgtctgcattcgtcaggctgattccgtacttgtccatgtactctttcatctgctttgtcggcttcgccatgttcgcaagggcggttttcagcgaggttccggccacttccgactttatggacgcattcgccatcaggccgattgcaagggaaacgtcctcaacggaatatcccagcgcgcccgcgacgggggccactttttggaaagtcgcgcccatcattgccacgttggtatttgaattgctcgacgcttgcgccagcacgtccgcaaagcggcccgcctgatctgccgtcatgttaaacgcggtcagcgcgtccgtcacaatgtcagaaacctgccccaagtcctcgccggatgccgccgcaaggttcataatgcccggcaagccgcccaacatctggtctgttttccatccggccattgccatgtattcgagggcttttcccgcttcaacggcggtaaactgcgtcgtcgcgcccattctctttgcttcatccgacaaacgcttcatttcatccgcggtcgcgccggaaatggcttctacggtggacatctgcgcttcaaactccgcggcctttctcactggcccggcgtaaattgccgttccaagtgccgcaagggttccgacggtccccgcaagttgcgttttggtctttgaaatcgccgcgttgttctgttccaacgcggcgtttacttttgccaattcctcttgactttttttgacccgctcgtaacttttggataatcgttcgttttcctcggtcagacgggaggtgttcacccctgcgtcggacagttctccgcccaattcgttcagccgcgcttcctgttgctcgattctcgatgtggtcgccgcgatctgccgttcgttctgcgccatctttgcccgcagttcttccgttggctctccggtttcgctgatttcccgttgcagtcgttcatgctctgcggtcagccgttccagcttttgacggttcgattcaagggcggcttcctgctttttgtaagcgtcgatctttccggtgatagaatttagcttttgcaggctgttttgcatttgccgcgtggtattcagcgcgctactgaatgccgcattgaagtttccgcccaatgcggcggtcagtttgaagagaagttcatattcctttcttcctgccaaattcttcacctcgctttctggttcttctgctccgctgtggcggcgttgatgtcctcaatccatgccgtgatctccgtcacggtcatgtcaagccagaatggaacgggcgtaaaggttgcctgtgccagtttgaagcattcccgccgccaccagcgggccgggcttcttaaaagcccgtgtcgattaaaaaacttctggccgcgttggtgatcttgttgaaatctttcaggggcattgcttccagcacgtcgcttccgatgcccgcggcctttgccgccatcttcccttgaaaactccgggaaatttccggtgcaagggcgtattcgttgttcatctgcatttcggtttcaatggaaaccatgtcgcgcccggaaagccgctcgaaattgaacgtcagttcggtgtaggtctttccctcatactcgaaaggcttcttgaacacgtgcgtataaacgcccgtgttgccctctgcgggcttctctgcggcttcctgtgctggttcatgggtgacggcttccgccgcgcctgcgggccgctctgcgccctctgtggtggtttttttctcggtgtcgttcatggtcaattcctccattcagattttcataggttcaaatacagaaaaagggcaaaggaaagcccagcgggggggagaacccccgccgggcttatgccttgccaagtgcctttctaacgtcggccagatagtcggttccgttgatgtagtaaatgaaattgataatatcaatttcgaggacctttttcccgtcgatgtaggttgcgaaataggttgccgcatactccccggacgcttccgcggaggcggcgggggccagctttccgggcgcaaacttcgtcggcgttaccatcagcacgtgttttaccgcctgttgaatgaacttgcccgcgctgttgtcccaatactgttgtgccgcgcgcaagtcaagctggtggttgcgcggctctgccagtttgattgcgtcggcggtcacagaacggaaattcagggtcagcgtcattgcctcgatatgcccgacgaacgcgccgttgaacgcgcccgcgattcccgcgcccttgacttcctccgtgatctgcgagatttcaggaagcgtagcttccgccattccgtaaaactccgtcgcgtcctcatacacggcaaagttggttgtgccgttgtcaactttcatgctgtctttccctccttatgccgccaaagccgacgaaacatagtccgcgtcgtactccaacacgaattcgcattctttcatcgggctgggcggggtcatgtagatgtggaaaaccgcttttccagccataagcgcggtttcgctgttttcctcttccagaaattccacgcgcccgcccagcagcttttcctcgttgacaaggccgttcagccagatattaacggaattcacgatgctgtcgatcaggcggcgcgtcatcttcttgtccagcttgctccaataggacaggacaagcgaattcgcaacccatccgaacatgcgcgacacgggaatgaagtagttcttcacgtccgtatcggcggggaaacaggcggtttcgttgccccacagcacatacccgccaatgaaatttaacgcggttacaatgccgttgctgttcaggtagtttgcttgattcaggtcgagaagaacggtggtcccgtcggcaaggcacgcccggtcgatctgcaaagacttgttggaggggctttccgccgggcaaccgccgttgtccgaatcggtcgccgtcatccgcgccgcggtgtggaccgacgcatgaaacacgtaatcgcccagcccgaacaggggccagcaaaggatttccgccttgtcgttgatgttctgcgttttcttccacgcgggcgcgtctgcgtaatgcgtgacttccgttgtgtcaatgtcaatcagggcttttgcgccgtggaaaacgccgttgatggtttccgcctttgcccgcattgccgccgcgacggtggatttgtgggaccatcccggcgcaagaatcatgtcgcacacgattccgtatttcgggaaaaccttgtcaatcagttccaacccggaatacttctttgtgcttacctcaaaaccgccgataatgtctttctccgcgattttggaggggtccaccgcgtcaaacgcaatggttagttctcccgtccgctctggaatgctcccgccctcgatcacttcaagaattagattttcgccctcgtagaacaggtcgaaatcctcgcctgcggtatagtcagtgactttcaccgtgtctttcagggcttccagcggcaaaagaacctttccgtccgtgacggtgtaattctgctccgaaacgctcttcttgtgctttgcggggtccagaatgttcacgaatacgacaggcgatacgccgtacagtttgaactgtgcatagatcgcttcgcaaatcggatagttttcccagttgtcactgtaccccatagcggccacggcctccgcgtaactctggcacatgatcgggtcgttcacgcttccgccgacggtgtgcgccggggccgcgcctacgacgaacgcaatcccggaatctgccgtaacaggggtcgaaaccgacgtgtcaacctgccgcgtcgaaaccccgtggaaatactctgccatttgttatacctccttgtttccccgcattgtcgaaacaatgtcgttgtaatacttgtgcgcaaggtttccgggcgttttcaccttgacgtgaaacgcggaaagccgctcaacggggacgatcatccgcgcaacaaggggatagtccgcgatcacgtccgcaaggtacgctttcacgtcctcgaacgtcccgttgaacacggcgttttctttcagtctcccgtgggggagggacggcccggcatagacgaacaggttgtacccctccggggcttcctgcgcgtcctctgcgggcgtttcctgcccggcggtgtcctcggccccctctctgtccccggcctgtcctgcgccgccctgtgcggcttgttggccgtctgcgtcggttccctccgggccggtgttcagttccgccccgtcgggcgcgcggctgtttgcgccgtccagcgcggcaagaattgccgtttttgtcatgccgtcgtcggcctgcacgccgtttgcggcggcgatttccagcaattccgctttcgtcatgctgggtttatagttcattgccatactttttgaacctcactttctacaacgggcatttcccattccgtcatcatttcccccaaatagtagggggctgtcgttccgtccgggtacacaatcatttcaaggggcggtttcagcatgtaccgctctccaatcacgccgtctttcaacagggcaacacgaattcgggtcagcaggttcagaacgcatgttgcgccctcgctttcgtcctccgaatacgtcgcggcgacgattcgcaccgtacagacgctttccggttcctctcccggctcctgtgtgtctgtgcttttgatgtactgcaacagcagataggggacgcgctcggtctgcgcctttttggtcggcaaccgcattttgtaaatttccgcgggccgctctttcggctctccgctccggcggtctacgcggacaggcaaaagcatgtcctttgtttcgcgccgcacgaactcttccagcacgtccaaaaggtctaaaggtgtcatgtcttatcctccgtagccgttcagaatccgggtgatttcatgttcaatccgcttgtttatgacttcctgcgccttttcctccacctgctccacaaccacgctgttcgccgccatctgtgcggcggatggtcccatgaactcggtgatcggaagtctgcctgttccgtcccgctcgaacatgcccgtatgaccgcttttcatttttgcgataaatgcgtgtgcaaacggggttcgcccgctctccgccagcaccgccgccgaaacggtcgcgcgctggacggggagggtcggggagacattgaagcggtaaagggggattttgtacccggcaaacgataccattcccacaaccccgccgtccgctttctgcgtccgcactttgattgtggtgtctgcccggacattctgccgggtgattgcgtaaacgctcgtgatgccctttagggcctctgttctcacggtgttgttggcccggcgaatgacgcttgccattgccttttccgcgccttttggaacgccggaaagaatcaggttcacccgctcgatctggtcggctgtaatctgaatcattcggtcaacgcctccatgtaaagcacgatttcccctgcttccgggtgaacctttgtgattcggtacaggcaatccccgatttccacgttcaggtccttttgcgggatggttttcaacagggacagcggaacatacatgacaagatcgacaagaatcaaaccgtccacgtggtccgtggacggcttcttccggtcctgcgccccgccgtcgtcgatgatgaccgggcctttgtagcggattccgtcaatccagaattccacaacgtcggcgtgttcccggctgttgtggaatacggcggtcaaatcccgctccacctgatctttgaaattcatggttaaagtacctgcgccacgtaccagctattgacctcatgggggacggtcagcggcttgctgttgatttgcaggaagcggcggtccgggcggcgttcaatccatgtctgcggcaccttgtcgccctccacggtgacaaatcccttgccctcttcgggaatcatagtgattgcgccgtagtagatggagtaatccgcctccgtataaagcaaagcaatgtgcttgtccggtacaatgggcttgttttccggttcgcccggctccgtccagtcgtccagataccattcgttgtactgatagaagtcaagccccaacttgtgatacgtgccgatgtaagttgctccgttcggaagttgccggggcttgatgaccgcaagatcataggctttcacgtccagcacttctttaacctttgcgtggttaatgaacgctgttgcaacatctttcgccatgacgcagacgttgcagttcacgaaaccttcccgctgtacgatttcgtgccaccgctcaatgtctgccagcgggtcgctctgcgcgttgtcccacttcttttcggcggacacgatggtttctttgttggtgaagtcaaagtcgatgacttcattcacaccctcgccaacaatcggaatctgccccgtaaagatcgctgtcgccgccatccactcttcccggcgcacgatcatttcgttcagttcccgcaaatcctccgccagcttttccacggcgcgttccgcgggctttctgccgctgtaagggtcctcgcccgcggcccgctccaacaggtcgtcaacggtggtaatcttgttcggggccagcagaacgggggtgtaactcttcgtctgatagcccgtgttcaggatggttttcccgcctactttcggatgaacaaagggcgcaagggcgcgggacccctttttgaagtccacgtcaacgctcttcgtgttgaacgtccggcggttcttgaaaaaagtatcgcggaagaacgtatgcaccggaggcatacgccgaaccagcttccccagcgtgcggggagtatagatggtagtttcgattcccattttgtttcctctcctttacttcaaaaagattccgatatttcggaatgcggttgtcagggtttccacggtcacactgtccgggagattgattgcgtccgcgaaaaattcgcccgtcaggtaaacaacgacatcttctccggctcccgcgtcgcccgccgcaatgccgtagattcccgccgtggtgttctcgtactctgtttttgccggggtagtgcttccgctgtcagccgcgcttgcgtccaccttgacgatgggttccaccttgccgccaaccagtttcacggggtcgtatttcttgacgcttttcccgctcgaaacctcgcggaccgctgttgcaacgggataatcgcccgcaaaaaaattcaccgggcttgtctggtctttctgaatctcgtacatgcttctttcctccttactttacgtcggggaacagcttgtcaatggccgcgtccacttcgtcggggccgtcgccgcccgctccctctcgctgtcctccggtcccaacgttgcccgcgccgctcgcgtgcgcgtcgtcgtcgcggtcctgaatgtacttgccgccctgtttcttctgctccgcaagaatcgctttcgcaacgtcgcccgcggcaatgggtgtcttgaactttgcgtccgccacgatggtttcatagcccgcaatcgccacgtcctcgatgtcctgaatgcgcttgcgctccgcgtcggtcgccgcttcctcgatctgctttgtcaggtcaggaaaagccgctttcaggtcggccacggtcttaatgtctttgattccgtccatgttctcttcgctccttttcggttcatttgttgttggtttatttgaaaaaccgccgtgcgcgcgggccgtcgtgcggtttaacaacgaaatcggcatattcggataacggttcaggtccagcgaaacgctgttgacaacgattttcgcggcgttttcaatggtggtttccgcgtcctcaaacatcagcttgtcgcaaaatccagcgtcaaccgcctgttttccgtcaaaccagctttccgccgccataattgcggcaacctccgccgcgtctttccccgttttcaggacataagcattcacaatagactgtttgaccacttttaattcctcggtcatctttgcaaggtccgcttcgttgaagtagcccagcaagcccaaggacgggtcatgcaccatgaaaacgccgttccccggaatctcgatcacgtcgcctgccattgcaacaatcgtcgccgcggacgcggcccacccgtcgatttttacggtgatctttgccgcgttgtcctttaggcgggtgtaaatcgcattcgcggcgaacacgtcgccgccgccgctgttgattcgcacaacgatttcagggacggcccccagcgcgtccaattcctctgtaaactgccgcggggtcacttcgtcgccccaccacgtttcggaagcaatgtcgccgtataaaatcagttccggggcggcgttatctcccgccgcggcccggaacgtccagaaatgtttattctttacctgtttgtgctgggcctgcgcccggctctgttcctgtgccatctgctttcgcctcccttaacattttttcttcccgtttgatctgcgcggcgttccggtagaaatcggacccgttcatttccattgcttcccggtcgcgggtggaaaatccgttctgcacccgcttttccgccgcggtcacttcctgcaccgggttcaaaagcccctgcgccgggccgttccattctgcgcctgtgtacgccttgcgaatgatagggtcgccaaaaaatccgggcgcggggattcgtccctttgccacggcctccgcgaaccattcttcataaatcggttggcagaagtcatttgcaagccatgtccggtacattcggaacattttccacgcttccagcaacgccccgcgggacgcgctgtaagacgcgttgaagttctttaccaatagttcataggggatttcgagggccgcgccgatctgcctgcaaatcgcaaccacgaacccgtcaaacgccgtgttcggcctgccggggttcatgtcgtgcgccttttctccctcgttcaagtccacgattgcgccgggcgcaagttcaatcgtgctgtcgtcgcccgcgtccacctgcgcttcctccgggatgatctcgccaaaggttccgtcgctggacgcggattccttttcgatgaacaccgtgaacataccggaaaccacggcggcgacaagttccgcgtcggtatatcggcccaactgcttcaatgcttcaatgacaggggccagaaacggcacgccgcgccgttgtccgatgcgctcccggttcataatgtgaagcacgttccgccgtccggtctttgcgccccatgcttcaacccgcgtccacccatattcgcttgcatcgtaggacaacggatggtgcttgctgatatggtacgcgatcacctcgcccgcgtcgttggtttccacgcctccgacgaaatgcgggtcaaccgttccgttcgggttgctcaatcggtccgcctcaatcagacagattcgcaggtcatacgggcagttcacccgctttgtcactggcaacgtggcgatcacgtcgccgctcataagccagttcagaaaggccagttgttgcagttcatagaaattgtccagccgttcaaggtcgcaggccggggaatccgcccacaaggaaaattcccgctcgatcttgcgttcaaggtcgcgtgctgtttcttcatccattcccaacgcctcatagtcaatttgacttttcagccgcaaccccgcgccgacaacatttgtccggcacgttttcagcgcgcccgttgccagcggtacgcccatgtaaagatcgcggcaccgttgccggaggacggaaaggttctcttgtatatcctcttttgcggacccgccgccatacaaccagcccagcattgatttttttgtctgtgacgcgccgtagttgctgtacccgctgtccagtatttccagcttccggcgggcggcggcgcgcttcacggcccgttgcggcgatactgcggcaatcattcggtcgaacgtgttcaacccgcttcgcctcctttgtcatggtcttaaaggtcccgcgggaccacgcggaaaacgcggtttcgcccgccgcgcttttcgatgttttccagccgcgcaacctcgtttttccaaaattcgatttgttgccggatgtccgcaaggtccgcttttgtcaggctccgcgaaccgatggtgtagctttggtgtgtcgtaacctccaattccgcttccagccatgcggaaaggtgctttcttacgatttcaaggctgattcccgccatttacaaaatacctccgttggttcttgatcgtctgccccgccgcttctgcgcgggggcggctgtggccgcgtcccgctccgtccgtttcaaaaccggatttgcaatttccaaagcgacggtcgcatagttccgaatatcaagcggttcattccgcttgtacccgccgtctttcagcgtccagacgtattgcgcttttccgcgcttataggtgatcaccattttttcggcggtcaggccgcggaaatactcttgcgtgtacccccggtccttttcacgcggaaaatggcaataattcggcccctcttcctgcaccgccagtcgttgatataaaagggccttgcccgtgtcaactccgacagtgaaaagaggggctttgatattgttcgccgttgacggcctattgaagtacggcacttctgcgccgccttttcccttgattgcgaacacacgccgggccgtccgctctttgcagaatcggtaaacctgtgtcgtgaagtgtccgccggaatccacgcaggcgcaaataattttcagccgccgcccgtctgcggtggtgaacgtctgcgaaagaaacttgtccagttcatcccacacgggcttcaacttcaagtcgccgtagatcgcctgatacttgattccccagctttccttgtccacgccccagccgacaacctccacttcaaatcggtcgtcctgcacgtccacgcccgcggtcagcaccagcacttcttccgggacctcgcaattatagcgttcgcggcgtttgaagaggtcgtccgtttcgatttgttcgccctcttcctcccacgtttcgcccatttcggtatttgtccagacttttagaagttcgatgttgccttttttcttctcttcgtttgctgtcaggaatttttcgacgatttcccgccattccacaaagagggaggcaagggcgttcaaatggaatccgcgcacctttcgttccgggtgtgccgcaacgaatttaccctttccgaactgctctttccactccgtttcgctggaaaccacgccgcacgccgggcaagcgcacccgatttcgtccagcttgtcccggtcgaaaatgatattcgcccacaaaagcggcgtgtatgccccgcacgccgggcaaggtacgttccattcctcttgtgtgctgtgttcaaattcaacggcgattctggacgtttccttgttggtcggcgtactcacgcacacttctttcttgttccaaaaggtcgcaagccgcttcccggccagcaacagggggtcgccctcatttccagccgtggccgggtagcggtctatttcgtccgcaagcagaatccgaatcgggcgggaggcgagggaggacggcgaatttgcgccaaccatcgtcacatgaccgcctgggaaaattttctgcaagatcgtgttcccgctgttccggctcttgtcgttcacgcggtcccgtaaaacaggggtgtcccgcaacatcggggaaaggcggtctttggagaatgtttccgccatttgaatggtcggttgcatgaccatgatcggggacgggtcgtagtgcatatagtagccgatcgggttcagaatcagcgcgtccgttttcccgatctgcgccgccgacatgatgaccactttttgaatccgcatgtcgcaaactgcgtccataatctcccgctggtatggggcctttgatgtgcgccatcggcccggctccgccgacgattcggaggacaagcggcggtatttgtccgcccattgcgatatggtcatattcgggggaggggccagcaccgcgaaaatccgggtgaacaggtcaaccgtcgcttttttcattgctgttccctctttccccgaacgtagttttgaaatcggaaagttccatcaatgcttcgtcgatatgatctttcagcagggcgaatatctctgccttgtccgttttcttgcaaaggaccggggccagctttgacggaatcgccatcaggcgggatttgaagtttaccagcatatccgtcataacggcctcgatgtccgccgcggcgtgaagcgtgttttctttcaactgcaattcgtattcttcattctttcgctttgcccgaaccagcttcgcccgctcggtgttgtaatctatcgtctcttcgctctccgggttcctctttcggagataatttatatagcggtggttcgtgtcgatcaggtcgtacaaaccgggtcgaacttctgcgatcaccttttcgtcgcgcaactgccgcacccgtcgttccgacacgtcgaggaatcgggcaaccgctttcgcgtcgtaaagtttcaccgtttttccacccctcccgcgcttttttggcatacccccttaaaaattttcccggccccggaagcgttcaaaaaaatttcgtatctaaaaaaacgccggggctcgctggacccgcaggccgcgcggcccgccgaaagaacctatttcatatttccaattcgtccggctcttccgcttcgtcgttgatctctcccgtttcagggtcgatgtcgtatgctcctgaaagtttctgctttgcaagattatatttccgctcttcaagccgcaggcggcggctctccatctcatatcccttgatggaatcaagcagtttgataatgcgcccgtgtattctgttcagttcggcttctaacttcatagcccggtcgaatgcgcttgcctttatgacagtctgcattgtcaccgtgtagccctcgcgttcaagggcgcgttccttgtcgcccgtggtgtcctgcaatgcggcaatctcccgttgcagggcttccagcttcttttcctgctgtctggttggtttctttccgtcgctcccgtccatatcccaaatcatggaatcttcttcccgttgcagggcttccaacttctctcgctgttgttctaatcgttttgtcccttttggggcgcgcatttcaacaacgcggtcaatataaagcgcggctgggtcgccatgttccagcgcggcaatcttgttttgcaggtcggcttcctttgcaatcagtgtttgcagttctgcaagcatatttgtttccgtgtccagcgtgattccctcgatatactcccgctgttcctgcggtagatcacataggcggaccgtggaatatgccccgtgcgtttcggcatttttattccctacgggcgcgcccgctcccacggcatttttattgcccggctgtccgccgcgtttccgcttcggtttctgtgcgtcaaggtctgcttgccaattatcaaggcttttccattttcggacctgttcagcccttacgccgaattgttccgcaagctgtttcgccgtcatggttccgccggattcaagccatgcccggcgcactttgtcccgctccgggcttctcgcttttgccattgtctacgcaccccctttcgtttgtttcctatttttcgccccgcatacttccgcggaagcgcgtaaaaaacgggccatgttcaaaacatggtccgttttctgcactcgaacggcgcggaggaatacgccgcccgaatcgttgtgttcattttccacaataccaattttaccacggaaaacgggcaatgggtggcaatcttatttttccgggaagcgatagcgcgaaatgattttgtttgcgctgaaattccttgccagacagtccagcgcggcggcgcggatattccggcattgccgcgggctgtaatttactcgtgccgaaagccgttcccattgttcgccctctatgtaaaacccctgaatcaacgctttttcggtgtaattcaggcatttcaattcttccgcgatctctgcttttattttcccgatttcctctatctcgcgccgcaatcggtcaatggtctgtgtgacagaacgggggatattcagcaccacacgttcaacgggatttgaagtcgtgcctttcccgtgcggcataccgtcggaattgaccgcccccaacgtcgaataatactgatcttcgaggttcttaataacccgctcgttcattttgattgctttgtctgcgtccctgtaataatgcagaatcacaataactttttccctgttcacgtccgcttcctccgctctgctttagggcggcttatatatccgccgataaattcgtgtattttccgcccgccggatttccgcccggtattgctgttcgattatcttcgcccgcgccctattccgcttcctccgacggacgcgcggttcaatgtctatcggctccaactcttccgccagttcacgaaataccgctgtcagcttgtcgaacgcttcccgaatctcgcccgaaatgaagtttagtgcgcccaaaatcttttcagttgcctcttccgcggtaaacgttgttctttcagcgtattttctcgcggcttctcttatgctttcggcctgttccgcagtaaatccggccaattcgattttgtccatctgcacgccctcactcttccgccggggaacagatatattccaccgaacacaagattttcagcatcttcccgcaatgcggacaatgcacgggaccgacggcctgcgtcccgaatgtgttatatcgcgtgacctgccccgcgtcgaacttctcgccacaacacgggcaaatccctttcccgacgcaccgtgtttctttctgcggctgtctttccgcccccgtttgcccctgcgggtcctctgtgggcttttcggccccctccgggtccatcttcaccgcctgcggcttctgcccgtcctgcgcgttctgcgggccgtctgcggggtgttccgcccccggcgctttgtcccattcgattttcggaggcgggacggtggagggaatgcaatgcgccgcgggcggcgtgtgttcgtcccgctcccggacgggttcatcaggtggcgcggtttcttccggttcctccggcggctgttcggcctgcggcgggggagggggcggggcgttctcccgtgcgctgtgggggcaaacttcgccttgcggcaagcggcaaacgtcctgcccgttgtattcgcattcctcaaagtcccggcaatggaaatccccgtctttcgtctccgcgtcccgcttcctctcccgcgcggcctttatggagatttccccggtctgcttatagtcctcgaatgcggcgcgctgttcgtcctccggcaatccggccagttcataagccgttgaaaggtttatgtggtctgctttcagttcttctttgaactccgggtacaggtgacgaataatggtgtcataccgcccaatctgcgccgggcttgtgtgaagcacttttgcgataaaatcgcgggttccgtctgcctgaacctcgctgtccccgaacacggttttgacaatcctttgcaggacggccacgaaccgcgggcgggtctttgccttttccagcacgtcccgcaagtagcgcacttcctcgatcttgtcccacgccgttttctcccgctgggagttggtgacaatcaggttcaggccgtcccggatttcctgatcttccgccgcctcttcgttcggctccacggaacaggtgacgaattcatattgcggctttccatcttccacaagggccagcgacgcgaggcggcggcggtggcctgcaatgaccttgtatttcccgccgtccagcggaacaacggtcaggttttgcagaactttcccggcgatctcgattgccgctttcagttcttcaatctcccgcatggaatagaagttatcttccgacggcacaaggtcaaagacgctgattttctttatttcgctttcagcggggcggggcggggtgttcccgccctccgccgcctgccgcgacgcgttgttcaaaatctgattcagattgaattttcccatgatgtacgcccctttctgtccgaatcggacggattcaatctttcccgcggttcaggtattcccgcacaaatgcgatatagtccatagcggtcccgctccggcggctgtattccgcaatcggcatttccgaaaaggtgctttcggtgactttctccgaataccgaattcgggtgtcaaatacggggtattccgggcggctccgcaaccacgcttcgccctgcttctctgcgtcggcccggataaagcaggtaatcaggcacccggccagccgcaagcgcgggttcaagtcgtcccgcgtgtcctcgatctgttctttcagttcggccagcccgtcgaaagcgtacttgtcaatcttaatcggaataatcacgtcgtcggaggcaacaagggcgtttatcgtggaaatgttgatgtccggggcgttgtcgataatgcagaagtcatattgccccgctacggggtccagcgcggcccgcaggcgcgtttgctgtggccgggtggtgtccatcagcacttccatatttgcgcgaatcagcgtcatgttagcgggcaatacgtcgatattctcgaaccgggtctttttgatgacctcccgcacgtccagccgccgggcggtcagaacgtcggaaaggctcttttcgtcgtaggaatggaccccgaacgcctttgacgtgttgccctgcttgtcgttatccacaagcaaaacccgcttattgtggaaaaccgcgaggacgtgggccatgttgtcggcggtcagcgtctttgccacgccgcctttcaggttgataattgatatagttttcaccgcttaaacctccttgctgaatttgccccgctccggcgggttattatttctgtttcttcttccgcggcggtgcttccagccgcaccagtggttcgcgcccgtccagttcatacaggaatacggcttccccggtctgcgcgctgtactggcacacaatgtcggtgatcgtgcggaccgccgccgggaatctgaacgccagttccggcgggtggatttcccgccccgtcacgatcttgtcgcctatttcataggggcaagaggcggaaatttttatgatcgtcatgtggtcgcctactttctgttcggtccggcgcggcgttactcgaaccgccgcttgatgaagtccacgaattccggcggaagcgggccgctttcatcccctgtaatcagcattacgcctccgctttgtgtcgcggcttcccgttgttccgggcgcggggccgcggcgatatggaccagttttccgttgttgtccagttcatacatgaatgtaacggtcccgttcttcacgctatgtacgcacacaatgtcagtgatcgtgtggacctcttcgacaaccgttgccggaatcaggtggaaacgcttcgccagttctccccttatttctcgccggattttaattttgtcgccaatctcgaaagggcatgttgcattgaatgccgcaagtttcattgttctgcctccatttctccggggaaattgatgatttccccggtgctttcgtctacgttgattcggtactgtgttttgtctatggcttccgtcgcgggtcggtctatcttcttttccgccagcgcgcggctacattgccgggccagcgcggaaaggtggtagacgaacttttcattgatgacgttatacggcatgatgaccgccgcgacgaaaagcccggtctttgcgacaatgtatgtcatgccctgcggggtttcccgctcgtacaactgcaccatgtcaattacatcttccagcggcgataaatacttgttctgaatgaacgaaatcccgttccgcgtttgcaacggcttcaacacgccgccgtcgtacaccagtgaaaggctctcttcgtcaatccggtgttccgtctggtccgtgtcggaaaggttgattccctccggcgcgcgctggtgacgaaatatgatcttctcttgctgtttggctgaaatgtcgaacatggaatagatattttcttcatccatgtacggaagtcctgtgatcgggtaaattgcggatgaatccccaagccattgtgaaacctctccgccggattcctcccggtcgtacagacagaagattttcgttttactgcaaatggaagcaactttctttagcttcatgtgggtccaccgcctttctgttcgagatattcccgcataacccggacggccacgcggcacgcctcttccgtggccgcaagcaccgcttccgaacctctgaaccctccgaaataccgataaccaaacagggcggcgcgtcttgtctccgggtcaagaatcgctatggcctcttcgatggtcattttctgttgttctcccattccggcttcctcacttcctgcgccgcttcctgcgcttctttttgggtgtccggggcgggggtgtggccgtctgcggctccggcacgatctcttcgcaaagaacttcgatttcctccacgtcctccggctgaaaacatagtgtcgcgccggggtcgtaggtccccgcggcccaatccgccttgaactgttcaagggcgtttttgtaccgggggaacgggtggacctgctcggaatgataaattgccatcatcattcgttcgtcgtccgccgggtcccaattatgcaggtgataggcttcgtggttgtcgtagtcccaaagggacagcagaaccaccagcccgtcaaactcttcattcgcccgctgaatgttctcgaaatcccggtatgtcatgccctgtccggcgtacctctcccggattttctgaatggtcttgccgcccgtatggaggcggcaccgaatgactttcggttgataggtcatgtattttcaccgtctttcccgctgttgaaagcaaaagtaaactggttgcttttcatcttttccgccggggtgaaattcgttttgattccgataattccttctcccggtgtttcctgaaccggaggcccgctataagtcaccgtcccggccagttccgacccgcggtaaacactgtatgtcccgtacccgctgatagtctgtattgcaaacgggaggaaagggagaacttcaagcggcgcacctcctaacgaaatatcgtccgttgtcggcccgtgtgcgatttctccgctgtcgcaatattgcttcacgatttcggaaacagcagaattgaccgcgcttattccgtcctccgtgtgcggggtgtatagcaaatctgttgccgcgcgcgtgatttccctcttgatctgacgggacatttccgccgcgcgctggtcccagttccaccagccctgtttccctctggccgggaaaggttcgtcgaacatgaccgggttttcaaggacccacgcgaaccgccccggcgaatagtcgcccaaaagccgctcccggtcatccagactgtccacaaggttttcaacaggtacgcaatcgacgatttccacggtcccgaccaccgcgccgtaatgaagttccattgattccggcaatatcgaatcaagcgcaacgctgatatagtccggtcctccgattgccgcatggaccgccacgcggccccgaatgttggtccgccgcgggcgggtttcgtaatgcttcaacccggccacgattgcgaacgcgtagggttggtatacggtaaagactttcacgctgaaacctcctttttggggttgtatatgaccaacattgacgggaacggggcgggggcgtatgcgtttccctcttcatcggtgaagtgtaacctcccgcgcacaaaccggatttctgctttcccgtatatgtagtcgtgaaaatatgctgtgtctgttctggccggaatcagcaggacaaccgttgtcccgctccgggattcctcataggctttgcgaacccatttcccggtttcccgtccgtatggagggttacaccaaacagcaccccccccccgcaagattccaaggactattcaaaccatcggtttccggcgtgtagtacgccgggcattttgcacttttggccgtcgccgccgcgtccagcacaaacccgaattcatcattcagttggtcgaaaaagtcctgcggcgtgcaatagtccattttcttactgctcaataacgccgcgttcattccgcgtcctccgtgtcccgctcctttgcggctttaaccgccgccggaatatccccgcggcctgcgccctcaacctccacgcgcacaacgtcgcccgttcgatatactgcaatcttccgggccgggcgaatggccttgacgatctccacaacagcaccacccgccgcggctaccagaaccacgaaccccagccaaacccaaaaagacgaaaagataaatcgcaaaaactccatgtctcttcttcactcctttttaatttctaccgtgcaaattgtgtcgtttctcgaacctccgtgcgggaccataagtacccgctccatcgaaaagccgcgttttgcaccgcatcccatactattccagccaaaacatataacttttccacccggcttcactattcttgcaatctcgttcttcgcctcactccaaaacgtcatgcgtccatcccacccgtcaattccgattccgtcatagcattcctttacctgtctttgcgaatatggggggtcatataaaacaccatccaccgatttgtccttgaattttttcagaaaatctatcgcctgtaaatgataatccgtcggtcgttcaggattaagatcgtttgttatcgttgcagggctacactctcccgcgtatgggtcaacccacaacccatccgttatttcctgcatgagtaattcttttatgggcttgattctgaacgtccatttattaggcattgcccattgcctttctatcttcatttgctctttccaccttccaatctgtcggctatgctcaaaattcctgtcattgcttcccgaatattcgtgtctgtgcctgccgtgatggaaagcacccgcgcaatgtcccgcaattcctccgccgcggccacggcctccgccgccgcgccggattctttcatgcagtccgggcaaagcgtcaatccctccgccgtccgcttcccgcaccgttcgcacgctttcagtttcatagcgcgccacctataccggataaccgaacacgacaagggttcccgttagcaccgcgccgatcaggaagaaaagccacgcggccagaagaaccacaagggcggtttccgcccaatccgccgcgcgcaaggccaacttcgccgcaatcagcgggccacgcctgcgctgtgcggcccgcttcgcctccgggtccccgcggttcaagtcgtatgtattcgcctttgtagccgcggccagtttcggcgtgaagtgctttcgcaccgtgaagatcacccaataggcgatcataagcaaaattcctgcgttcatcggtttctctccacttctccggtgtggccccgtagggccagcattttttcacgaaccagcttgtcaacaacgcggcccggcgttttctgcccgctcatggtcataagccgttcgaggttataggcggtctgcggtgttacccgaaccgttagtttctgtctgtgctgtttcttcattgctcccgctcctttcgtgcgcgtagtcgagaaatagaaccgctccgttgaatcggacccgccacggttcgaggtccgccgcggtgacgtattttctgccgaaccgctctttcatgtcccgccagacttcccacggtacaaagaaaaagtcattcccgattccggcgcacacggcggagatcgcgccgtgcttgtggtgatgttccagcgcgtcccgctgttcctgcgtcagaacgtcccatttcaggcgttccgtggtggtgtactttgcttcaaagacgattgaccgtccgcccgcaagcgtcccctgaaagtccggctgtgcgcgggccgtgaaccgccctttgaaaatcccgtcgcggctcttctccaacacgcggaatggttcaggcgttttgtccgccgtcgcccgcccgtgggacgcatacaacgcgcacgcggcttttatggcctgctcgaaaaaatgcccctgcgcgttgttgaccttattttggtagcgcaaggccgcgcgctggtgatctatctgcatcgtttatccctccgttttctcccgctcccgttcgtcatggtctggacaggggaacggctctgtccggtagcactcttcgcaacattcccccatgtgtacggctccccgccgcaattatcgcggaacaggcactttcggcaagcgtcgtccgccgtcctgccgtcgcaatattctttgataacggcaactgcggcgttcaatgcctgcgcctgttctatcaggttgtcgcgctccattcatgcaacctccgttctttgtgacgctccaagtattcgccccagctttctttcaggtatgaccgcccgtaaatgaaccgctgtgcgaattccttttgaagcgcgtttggtatgattccttttctctcgttccgctccggctgggcgtatatgctgataccctttaggcgtttcagccgttccacccggtaggccgcgttttccacgtcctccgtgacaagcaggtaaataaacaggttatacggcttcttcccgtggttccccagcagttccgccgcccgctcgattgcttcaatctgcggtatctggtcgcacgaaaaccgaatgaatcgaatccacgtcagccgcgccagtatgcccgctatgcggtcattgaccaaccgtgcgtccatgccttgatttaggtctatcgcgtacccgctcccgatcatgctttcaagctgggaaattccgtattcggaagcaagaatgttgttgtccatcaggacaagtttgttcgtgtccggtcgcacaacctgtttccattccctgtacggctttatttcaccctctttttccgggaccacgcaccacgggcaatgattcgggcaaccgcgggtcaaataccctatcgcgtagtcgcattccgggtaaatgctgtaatcaggaaaggccgcgtcgatctccggcggcaactgttggtttatcggtatgtcgtcatacccggtcccgccgcgtattgtgtccggcggcaagtacaggttttccggcgtgaagtcaaagactttgcttgaatacacccggtcataatggcacataggggaccaccattcgacgaaatccccgcgggctttgtggtatgccgaaatcttcatcaaggcatagttcggaaaggtcttgtgcttcatgtactcctgttccgcgtcgtgaagtcctatccgcatagcgcaccccgcttcacaactccacaattccgccgatgttgtccacgtctgcccgcgtgacgctccggcgtttcagaattcccgcagtcacggtcccgtacttttcccagcgcgccgacacaaggacgaaataccgcaattccgggttcatcgttgcccgaactttcaaggctcccaaaatccggtcgtcaatctccatttgcaggggatagacggcaattcttcccgtgtccttgtcaatttcgcggcaaatcgccataaggcgcataggcttccttggctcttgctccgggcggcgcggctcccgctcggaccgcctgcaatcgcatagttcgcccgcgtccaaatgcgccccgcaattcgggcattcccggtaaggcgttcccatgttgaccactcctttctattctttcttcctcaatttcaggtatattgaccaacccgtgaagtcgttgtatttgtactcaatcccgtaatcttcgtccgtcagggtccagccgggatatttcttttcccaaaactcccgccccggacgctcccgcgcccacttctcgatctgccgccgattgtacttcccgtcgttcgtccgactggtggggcgttcaaggttctgcgaggaagtccaccgcttcttcccgccgctctgctttacaaggtagacacaaagggccgctatgccgttttcatcggcttgcaggcggtcagcgttgcaaaagccgattcgatcacccttcttctggcccttgcgtttccgtttcctccacaactcttccaccgtgtcgcggtccaacccgccgttcataacgatatggtgatgaatacgaacgggggtgtcgctgtttcgtttggtggtgtatgacgtgatcagcaggtatttcagcggcggcaatccctctttctccctgcggtatgaaatccggcggaggtaatttgtcgcctcccgctccgcgtcctccaccgtggccggaagatatttcgggctgtatgtagccgatacatgaagcgcgtccgggtcgtccccgaaattcaggtttccaagctggataaaataccgccgggcgtttatgtcgttcaggttcttttgctttggctccgattctcgcactttcttcgagcgggtccgccttgtggctctgtactgtgcgtctgtgtactggaatatgtcaacttcccggtagctctttccgcaatagattttcttttctctgataaatgttcgcactttgcttcaccctctttctgtggatgatgaagcgggcgtgtcctgtctttccggtctgctccccgtcagggcgcaaagggggaagagggttcctatcctgcgccccctccctcttccccctttgcaatccccctttaccctcggcggcgcaaaaagagaatgtgaagagggaagaggacgtggagcgggaccgctgaacccgtgctttcttcctgtctgcgtaacaaggcttcgtcggaatgataatacccattacaagcccgctacgccgcataaaaacggcgttgtttcttgacttttccgccgctttttgctatactttcgttaggttgatagatgatatattttcatcggcggaatccgcttcgcgttgctttgcagaacaacgcggggcggtttttcttatgtactttttgcggcggcggggagggggtcaaccctccaccgcctttttgtctgcctcttcctgcgcgatctcttccgcgtcctgctttgaccggaacagggcggcaactaccgcgcccagcgcgtcgccccacaaatagggcggataatcgttcagcgtggacatgagcgcgtccacggcttccagcttcatttcttcacggcgcgcggcctgctcttcttcgtcgtcctctccggggatagataccaagattacagatttcggatagcaaagcgggcgaacgccccagttgccgctgtacgcgctgctccagaccatcgcgccggaggaatagacgtcgcggacgcaagcgttatattccgggtcacacgtccacggggtcaggttccagcaccacgcgtccacgggcggggtgatgtcccgatacttccggcacagcgcgtcggaccgcaaggcgatcttgtccacggcggttccgtaatcggtcattccgtcgtcggcggtcaggtcgctttcccaatcaaggaacgcggcccggtctgcgccctccgcaaccaatgcgtcaaggaacgccccgttcagttcacggcgcaaagaggatttccgccagtcgttgcagttctcttcatcgaacgcccggcgaaaaacaggctccgccgccagacaaagcgttcccgcgccgatgtcctcgaatttgacccactcaacgccgccatacatgaagcgatcgcccggtttcagttcagcaagttttttcatggtccttttcctcccgaaaaatagatttgatttccttgatatagtcccgcaccgttgcggaaattgtgtagtagaacacggggaggaagagggcgaaaacttcgccgccgatcgccttatatccccgttctgtcagggcgtaggccgcacccgctcgaaacagcaggaccccggccacggtcagggccgcatatttcgccacggtccagccgttcagccgaacgcgccgccgggtgtgcttctggctccgccgccgcgggcgggcttgtcccgctccaatggtgattgttctgatttcctgcgtcatggtgtcgcctctttctcgaatctgaacccggccttgaatgcttctatgcactctttagcaatcaggtctttcaatctgccgtactccaaatagtcgttgtaacttccgccccgcaggtacgccgggcgcgctccgattttctccatgtctgcgatcagacttttaacccgttcgttcggttcttccggggtcatcttctcccgctccttttggcaacgtgattcggtccgccgccgcgattgcaacggcgcgcccgttccggtccagcagttcgccttgcacgtgaagacctttcccgtccggggtctttcggtaaatcaccgccgttattttctgataggtgataccgccgaacgcaaccgggcgttcatccagaaaagcccgcttcaattcattcactgtcacggcgcgcaccgcctttccgggaaatctcgtattccgccccgtagcggcggcgtttgcaccgccaacaggtgattttcaggttctttccgcctgctatgcgtgttatgtcgtgcttcccggcctttttcagttcgagaaagcagggcaagcagaattgacgcttcacagcttcaccccctctttgattttcaaatagaattcctccggggtcatgtccgccggaacggtcaaactgattgcgtggaactgcttacggcatttcgtacattcccgccgctcgattgcccccacggtccagatattcacacttccgccgtggccggggtaaagtccgatttctccgcaacggggacaaacaacacgcaagccatttttcacgatctcgccggattctccgtaaatcacgccgtttgtggcctctcgcgctacgttcttcattccggttccctctcgatcacttcacaatccccggcgcggattcccaaatagttcccgccgtggtggatgaaatagactgtttcgccgtccccggtcgtcgataccccttgcacgtagaaaatccggcctttctcaacaagcggaatttttgtatcgcgggtgattcggattttcacgccgtcaccctctttcccaaatccgcttgacttcttcgcaacagtagtccgccccgttggttagcacccaatctttcagatcgtcccgctgggcgcgcttgcaatgccgttccaacgcgtcgtaatcgtcttgcagggtgtccgggttcaggaatttcagggtttgccccgtggcgaacgccagttcagccgaaaccacaatgcaccctgttccgtcgtaggtgtccgggtgaatgcgaatgaacaggttccccaacctcattttgaagtagccgggcattgcggtttcttcttttgtcaggccctttgcggtcccgaattcctgcattgccacggcgcgggcggttttcaaggtcagcttcacgccgccgggatagtcctttttcttcatggttccgcctccgcctccatagcttcaagccctaaccaccagcccggactattccgtttgtcctcataaggacaagggcttccatcgtcacaactgacctttccgcacccggcgcaatagttccgctggaattcttcgtcccacggcccttccaaaatcggcaaggcccgcaagaacgcggccagcgtctccgggtttttggtgatcgcttcaaaattagttgccaactcgcacgccccctttagcattcgccgcggcgggcttcccgcgccgcttgaaattctcctgaactctctgttgtgcaagaacggggttgtattcccgccgctggttgcggtcaagttctcccgtttcgccgcgcttcaattcgcggtagaccgttgccgttgtcacgccaagccctgcggcaatgtcggccacgcggtccccgttcaggtatcgggcggcgatctgctctcggtcccgaaagtctatgtatctgtactgccgcaccacatttcacccccgttctgtttctgcttcccgtgggcgcggtgtaccacaaccgcgcccacggcctttcattcgtaaacttgataaatctcgccgtttttcatcagccacgcccgccccgaacagttaaagcggatgaagttccagtccgtcgcgtcatagtacggggtcccgatgatttttacccggcttgcctcgaacccgaattcctcgcaaacttcaatccgcgcggcctcttcggtgatctcttcggaacagttattgacctcccatttctcgcggcccacttgatacgcaataaccgcttccggtctattcacgcaccatctgtaatgcgcgtactgcataacgtcgcccgcagtcagccgccccgcgttcacgtgttccatgaccgcctcgtaaagccccgacgcgtcaaccagcttcccgcggctcataacctccgccgcaaactcttcttctgtcagggtgattccgtgttgtgctttccacgcccggtcatagccagcttttagcgcgtcgctcgaatcgtacaaatatccgttatccagcacgaatttttcaaacggtttcagatttgcgaaatccgccgtttccctgattttctcggccagcaagtcaccatatccgggaactgcccccacattctccgggaggtccgcccgctcgttttcgtcgtaaatccggctatccgggtgcttgtcgctccaaaactcgatgcgcccgccgtcgttcacctcgtagaacgtcccattctcttccgttgcataggtctttcggatcacgttcccctccaatgtggatttttctttgtaatgaactccaccgatgatttccgctttcgcggcctcgtactcttcaaaagaaacgtgcgtcatgtcggttcctcccttgtatttccggctctgttatggtaaaaaaataaatgcgatagaactttcacccgtcgttcgacgtggtgtttgttctttcgcatttaatattacaaggcgcgtttgggaaaaaacaaggaaaaagcgcttgacttcccatatgagctgtgatagacttgatacacctatgaaaaagggctctttttttgtgcgcatttttacggtgtgatgacgtacaaaacccttccctcactgtgaggacatagggaggcaagcatgccgaatccgcaccgtgacgtaacatagtgggcgcagtctatgcgcctttacgttgctggattcggcccaagggctgtgtccagcttttttgctgcgcgcggtcaaacaatgaaggaggtgccgaacatggcgaaggccggcaaccgggtgaagatcactctgcgctgctccgagtgcaagcagcggaactacaacaccaacaagaacaagaagaacactcccgaccgtctggaattgaacaagtactgccccttctgcaggaagcacacggttcataacgaaaccaagtaatgagtgctgctatggctcagaagaaagaagggttaaacggaatgtctgaaaacgagaagctcgagcaggccgccgaccaggctgccgacaagcccgcgaaaaccgataagaaaaaggacgccaaggccgataagaaaaagcccggcgtgttcgctcgcatcggcaagtggttcaaggatatgaggagcgagctgaagaaggtccagtggcccacccgcaagcagaccgtcaacaacaccgtcatcgtgatcatctgctgcattatcgttggcatctgtatctggctgttcgatgccctcgccggcgccgtgattaccgccctgctggatctctttggtaagggttaaggtgcgacatggctgacaatgcgaagtggtatgtggttcatacctattccggctatgagaacaccgtggccgccagtatcgagaaggccgtggagaaccgcggcctgcgcgacctgattcaggaggtcagcatccccctggagacggtcaccgagatcacggataacggcccaaaaaccgtggagcgcaaggtcttccccggctacgtgctggtgaagatggtgatgaccgatgacacgtggcatctggtgcgcaacattcgcggtgcaaccggctttgtcggctccggcaacaaggccatccccctgacggacgaggagatcgccgccctcggcgtggaaaagcgcgaggtggtggtcggctatcaggtgggcgacaacgtcaaaatcaccgacggtgctctggagtccttcctgggcacggtcgaggagatcgacctggaccgcagcaaggtccgggtggtggtttccatgttcggccgcgaaacccccgtcgagcttgagctggaccaggtagaacctgtccaggactgagctccgggccgggcggcccattccccgcacgtgggagggactgcaccgcagttccgcttccaaccacatttatcgtaggaggtgctgtttcaaatggcacagaaaattactggttatgtgaaacttcagattcccgcgggcaaggcgactcccgcgccccccgtcggtcccgccctcggtcagcacggcatcaacatcgccgcgttcaccaaggagttcaacgagcgcaccaaaaacgacgtgggcctgatcatccccgtggtgatcaccgtctacgccgaccgctcctttaccttcatcaccaagactccccccgccgccgttctcatcaagaaggcgtgcaacatcgagtccggctccggtgtgcccaacaagaccaaagtggccaccatcagcaaggaggatgtccgcaagatcgccgagaccaagatgcctgacctgaacgcggccagcatcgaggcggccatgagcatgatcgccggcaccgcccgctccatgggcatcgtcgtgggcgactaaggcgaaggagggaaagagcaatgtttagaggcaagaaataccaggagagcgccaagctgatcgacaaagccgctctgtatgataccgctgaggccatggagctggtcgtgaagaccgcccccgccaagtttgacgagactgtcgagctccacgtgaagctgggcgttgactcccgtcacgccgaccagcaggtgcgcggcgccatcgtcctcccccacggcaccggcaagacccagcgcgtgctggtcttcgccaagggcgacaaggccgaggccgccaaggccgccggcgccgacttcgtgggcgagatggacctggtggagaagattcagaaggagaactggttcgactatgacgtggtcgtggcttctcccgacatgatgggcgttgtgggccgtctgggtaaggtcctgggtcccaagggcctgatgccctcccccaaggctggcaccgtcacccccgacgtggccaaggccgtcaccgagatcaaggctggtaaggtggagtaccgtctggacaagaccaacatcatccactgccccatcggcaaggtctccttcggcgccgagaagctcaccgagaacttcaacgctctgatgggtgccattgtcaaggctaagccttccgccgccaagggtcagtacatccgctcctgcgtgtgtgcttccaccatgggccccggcgtgaagatcaattccgcgaagctgatgtaacaagaagcgcgggggcccgtggagcagccgtacagcgcaccccgcagacgaaaaagcagttgcgccgcaggcgcaaggtgtttttcgcggaggggtaagcagtgtggtgtcgcgcagccgccgcagcgtgacaagaagcgcgtagggtaggcgcataggggagctaagaggccatggaggcgaaaaaacaggctgggcgaagcccagcggcatgtttcgcggaatggccgcttagcgacccggccatgcgcccaacccgcagcgtgacagcgtcgccgcaagctccagatccttcgcttcgccgccagcggcaaagctcactccttccgctgcggctccttttccccacgcgaaccgcttcgctgggttcgcgtgggggcctcgagggtgagagagcaacggaagcgggacgagttcgccgtagcggcggatacgggccgacaggccccgcaaaaaatgtcattttcggacaggttgtgcttgacacagcctgtccgggatgatatactattaaccgtgttcaaagacagcaggtgggcgcaagccggaaatcctgccgagaatgcagccacaacgggatgaaattctttgtgctgttttcgcttgctttgaatgcgaaaacagcttttttgttgcgtctgcatcggaaaagttggactcaatctcaacggaggtgaattccaaatgcctaacgcaaaggttctcagcgagaagcaggccatcgtggccgagctgaccgagaagctcaagaccgccagcagcggcgtgcttgtggactacaagggaatcactgtggctcaggacaccgctctgcgcgccgagtgccgcaagaacgagctggactacgccgtcgtgaagaacaccctggtgcgtttcgccatcaacaatgtcggtctggaggagatggattccgtgctcaacggcaccacttccctggccctgtctcacggcgatcccatcgctcccatgcgcgtcatcaacaagttcgccaagcagttcaacggtgagaagttcaccatcaaggccggcttcatggacggcaaggtcctgtccctggacgagatcaaggctctggccgagctgccctccaaggaggttctgcaggctcaggttctgggcaccatgctggcccccatcaccagcctggccatcgtcatcaaggccatctgcgagcagaagggcggctctgtcgaggccgccgaggctgtcgagtaactcgacacacatttttacaaacatttatttaggaggttacctatcatggcttctgagaaaatcaatgccctcatcgaagaggttaagggtctgactgttctggagctctccgagctcgtccacgctctggaggaggagttcggcgtctccgccgccgctatggctgctcccgccgccggcggtgctgccgctcccgctgctgaagagaagaccgagttcgacgtggtgctggccgaggtcggcgccgagaagatcaaggtcattaaggctgtccgtgagatcaccggtctgggcctggccgaggccaaggctgccgttgaggctgcccccaaggccatcaaggagggcgtctccaaggacgaggccgaggagctgaagaagaagctggaagaggtcggcgccaaggtcgagctgaagtaagctttttcactcgcttaccaaaaagagctgtatcccgtctgggatacagctcttttttcgtgttacgcctccagtcccctccaagcggcaaagcgttgccagagcaggcaggccagccagccgcagaacaggcccaccagcaccccggccagcacatcactggggaagtggacccctacatacagccgtgagaagcccatcagggcggccagcaccaccgccgtcacccccatccaccggcggggcagagtgcggcaccaggccgacgctgcggcaaaggaggcgctagtgtgtcctgaagggaaggagttggggtcgtgctccgcgatcagaggcgtcagcccctccaccgtcagccagggccgggggcgctccaccaggtgcttgagaatcccgttggtgaacatcaggctcagcagcagggccatcaggccagctgctcccgccttccgggtctttttgaagcagagcagaaggacggacagggcaatccacatcagtccgctgtcacccagatgggtgtagagcgtaaacaggggtgtcaggacggcgttgcgcaccgcctcctggagccagagcaggatgcctccgtccagattcagaaaccattcgggcatattgtttcctccatataggagaggggcggcgacatggctgccgccgcccctctgtgttcttttggcttactgagcatcggccgcagccgcgccgtccccccactcgcagtccagaatgacgccattcatcagctcaaacttgtcggtctttaccgtatgggtcttacccacacgcacctcctgggtgccgatctctgtggtaatggggttgaccacgttgcactcgatggtgaagagcaggtctatggtgccctcatccaccggaatttccagggtgccgtcagtggtatccaccgtcacggtctgctcgtgggccctcggctccacagaaaccacctggccatccagcatctcgccggaggccatcaactggccggggatgtatttctggatattgtcgtagacctcctgctccacacccttgaccagcacggtataggtcacctgggtcttgccgggattgatgccgccgcccccgtccttgcccaggaacttcacgcccagcaccactacggccacaaggaccaccagaatcaccagcagatccacaatgttgagcttgccaaacaatcttcccttttcgtctatcatcttttgtaacctccgaggttgtaaattgacataatacttggtacaatgatacttgcatattgtaccatacttccctaccctgaaacaagtcttttctttgtccggaggttttcatatatgaaagtcatcactctgatttccggcggcgacagcggcggagccaagactcacgtccactccctgctgcaaaacctctcccgcaccatcgaggtgaccatggtctgctttctggagggcccctttgcccaggaggcccgggaactgggcatccctacagtggtgctctccggccgcaatctgctgcgcacataccgcaccctcaaacggatgatccgggaggggggctatcagcttatccactgccacggcgcacgcggcaacatgatgggcgccctgctgcgccgctccaccggcctgccggtggtgaccaccgtccactccgactaccgactggactacctgggccgccccctctcccgcctcacctacggcaccatcaacaccatcgccctgcgccggctggactaccgcatcggcgtgtccgacgccatgaccgacctgctcatcaagcggggctttgatcccgacaggctgttcaccatctacaacggcatcgacttcaccccccgcacccctgccctgagccgtgaggaatacttccgctccgtggggctggaggccgatggggacagtgtagtggtcggtatcgccgcccggctcaacccggtcaaggacatcgccaccctggtccggggctttgccaaggcccatcgggagtgccccagcctgcggctgctcatcgccggcgacggtgagcagatgtccatgctcaaggggctcgccgctgagctgggggtggagcggcaggtgtgcttcgccggatgggtcagcgacaccgacagcttctaccacgccatcgacatcaacaccctcacctctctgtcggagaccttcccctactctctcaccgagggggcccgggccgccctgcccaccatcgccagccgggtgggcggcgtcccctacctcattgaacacggcgtccatggcctgctgttcgaggcgggcgacgcggataccctggcccgccacctgattactctggccaaggaccccaccctccgccaacacctgggggagcggctctatcagcggggcagggaggatttttccctggagagcaccctggagcgccagctcaacatctatgagaccattctccgccgccagagccgcaagaagggccgccgggacggcgccctggtatgcggcgcctacggccggggcaacgccggcgacgacgccatcctggaggccattgtcaccgagctgcgccagatcgacccggacctccccatctgggtgctctcccgcaacccggacgacacccgcctcacctaccgggtcaactccatctacacctttgccttcccccgctttctgtggcggatgcgcaagacccacctctacatcaacggcggcggctccctgatgcaggatgtgaccagccaccgctctctgtggttctatctgtttactatctcctgggccaagcggctgggcaaccaggtgatgatgtacggctgcggcatcggccccattcactcccccgccaaccgccgcagggcctcccgcgtgctccagaggagcgtggacgccatcaccctacgggacacacactccgccgaggaactggaggacatgggggtgacgaggccacaggtcatcctctccgccgatcccacggtgatcctccccgccgcaccagcccaagtggtggacggcattctggagagtcaggggattgacccccacggccgctacatcggcttcgccctgcggccctggccggggtttgaggccaaggccgccgtcttcggcgccgcggcagactacgcctatgagacgtacggcctcacccctgtctttctgcccatcgagcggcgtctggacgtgggggcggcccagttggccgcccagcacatgaaggccccccactacattcttccccagaccggccgctccgaccacaccatcggtctgttcgcccggatgcaggcggtggtctccatgcggctccacgccctggtcttctccgccggtcagggtgtgcccctggtgggcgtggtctacgaccagaagatcagctccttcctgtcctacatcggacaggatctctacaccgggctggacgaggtgacggaggaggccctgcggtcccacatcgacgcggcctgcgcccgcatcggggatgaggccttcctctccggcggcgtggagcggctgcgccaggtggaacggcgcaacagcgagaccgcccggatgctgctggagaggtgagggacgtgagacagattctctgcctgtctgctgacccctggcgcactatccccacccgcacccagcagcttatgacccgcatgcgggacgcccaggtgctcctgttcgagccgccgggaaaatactcccgacagccgggccgcagggtgcgccccggtctcacggtctgcgccctccccccggtgctggaggcggaggagcggcaccgcctcctgttccgccttcactaccgcaaactgggtaagtttatccgccgccagatggagcaccaccgttttaaggagccgctgctgtggtgcaccgcgccggagcacatccacctgctggacgaggtgccccaccggggtgtggtctacgactgcgaccgggactggcccgaccagtccccctggtgggagagcgatctggccctggccgccgatgtggtctttgccgcctcccaggggctcattgaccacctctccccctgcaacgacaacatcgccctgctgcccaacggggtgaaccaccccatgtttacccggccccccgccgagcttccgccggagctgcgggggctctccagccccattctgggctataccggcaccctgtggcgggatctggacctcgcccccgttctgtacgccgcccaggccatgccggcctgcaccttcgtctttctgggccgccgggagaagaaccccatggccgagctgctagagcggctgcccaacgtccgcctcctggggcggcgggcgccggtggaggtgcccgactacctggcccgctttgacgtatgcctcaacctgctgcgccgttccgagcagggcaatgacgtggtgccctgccgcatctacgaatacctctcctccggcaaacccgtggtgtccatgctctttcccgagcaggtggagcacttccccgacgtggtgtacggcgcccactctccggaggaattcgccgccctctgccgccgcgccctggcggagaccggcgactgggccaaaaaccgccggagggagcatggggccgccgccgcctggtcggcccgcgccgacgaggtaacccgtattctcggtaccaccgggctctattgaggtatgagcgatggggccccaatttctctcacatacaacaccccctgtccccgtagaatggggacagggggtgttgtcttgtctctgtctgatcttttcacacaggtagcccacaatccggtactggggctgacctgtctgctggtgctggccgtggtgctggtcaacggctggaccgacgcgccaaacgctatcgccactgtggtatcaacgggagttctctcctttcggcgggcggtcgcgctggcggcggcatgcaacctgctgggcgtcctcgtcatgacggcaatcaacgcaacagtagcggagaccgtctactccatcgctgacttcggcccggaccgggccgcggctctctccgctctctgcgcggcgctgtgcgccattgtcctttgggccgtcctggcctggcgcttcggggtgcccaccagtgagagccatgccctggtggccgggctcaccggggccgccctggccctgcccggcgggctggacaacatccgggctggagcctggggacgggtactcctgggactggtcctctccgtggcgctgggctggtgggtgggcggcctgtgccgccgtctgctggagcgcctgcacccctccctccccctctgccgccggggccaactggccggggcgggcgctatggccttcctccacggggcccaggacgggcagaaatttctgggcgtctttctcctgggcgccgcgctggcccaggggggcggtgtgggccaaaccttctccgtgcccggctggcttatgctgctctgtgccgccgtcatggccctgggtaccgcgatgggcgggcggcggatcatcgaaaccgtgggtcgggacatggtgattctggccccccgggagggtctggccgccgatctggggggcggactttgcctgctcctgtgtacgctggccggccttccagtgagcaccactcacgccaagaccgccgctattctcggggccggctccgccggcggggggacggtcaaccaccgtgtggctgcccgcatcgccctcacctggctgttcacctttcccggctgcggcctgctggggtttttgttggccagcctcttccgttcccccctctcctgtggtatactgatgcccggtacgattttctgacattcgacacaggaggctccaaccatgtacccctacgacacagtcatctttgatttagacggcacgcttctgaacacccttcaggatctggccgacagcaccaattacgctctggcgcttcaggggatgcccgcccgaacgctggaggaggttcgccgcttcgtaggcaacggcgtggggcggctcatccaccgggccgtgcccgaggggacgcccgaggaggtggaagcccgcgtcctggccgacttccgcgcccactataccctgaatatggagcataaaaccgccccctaccccggcgttctgcccctgctggaccgtctggggcaggccggtatccgcaccgccgtggtgtccaacaaattcgacagtgcggtaaagggcctgtgccatgcctattttggggcgcgcatcccggtggccatcggcgaatcccagggggtagcccgcaagcccgcgccggacacggtattccgcgcgctggaggagctgggcgccggaaccggccgggccgtctacgtgggcgactccgatgtggacatccagaccgccgccaacgccgggctgccctgcctttcggtgagctggggcttccgggacgcggagtttctcactgcccatggcgcccagcgcatcgtggacaccccccaggcattggaggccctgcttctcggcgcataaggccaaaaagcccccgccatagctttgctatggcgggggctttttttaatacatcaggttcttctcggtctcagggtcaaagaggtggatgaggtcggggcggaaggcaaagttgatctccgtgccgtaggggatgccggcccggtgctcggcgggcaggtcggtggtggggatgcgcagcaccacgtcgcggcccacggcgttgacgtgcaggtacacctcgctgcccatcatctcggacacgtccaccttgctggacacggtatcgctgccaggggcagcggcaaaggcgatgtgctcgggacggatgcccacagtcaccttgcgctcgcccacgcccttcccggtcagcagctcctgggccttgtctcccagcaccacggtggcctcgcccaccttgagctggtacttgccgtccttcttctccagctcgccgtcgaagaagttcatctggggcgagccgatgaagccggccacgaacaggttggcgggctggtcgaacacctcctggggggtgccgatctgctggatgaagccgtccttcatgatgacgatgcggtcgcccagagtcatggcctcggtctggtcgtgggtgacgtagatgaaggtggtgttgatgcgctggcgcagcttgatgatctccgcgcgcatctggttgcgcagcttggcgtccaggttggacagcggctcgtccatcaggaacacctggggatcacggacgatggcgcggccgatggccacgcgctggcgctggccgccggacagggccttgggcttgcggtccaggtactgggtgatgtccagaatctcagccgcctcccgcaccttcttgtcgatctcctccttgggcaccttgcgcagcttcagggcgaaggccatgttctcatatacggtcatgtgggggtacagggcgtagctctggaagaccatggcgatgtcccggtccttcggctccacgtcgttcatccgcttgccgccgatgatcaaatcgccctcggagatatcctccaggccggcgatcatccgcagggtggtggacttgccgcagccggaggggccgaccaggacgatgaactccttgtccgcaatctccaggttgaagtcgtgaaccgcggtcaccttgttgtcatagatcttcttcacattcttcagggatacagttgccatgttcagggccgtaagggcaatgcctccgcaaataccctcttgcccgcagagagcgtcactctgcggacgttacggcaggtctccacactgccgcaccgccggcccggcgggcgttcctcctttttgaccgctcctccgccctatgaaaatggagtagggtcggaaggcttgaattttggggcgcacgtttaccggctgaccagctcgccgcggaagaagacgtccttgacgtctagattttgatccagaaccaccacattggcccgcttgccgggctccagactgcccacccggctgaagatgccgatggccatagccgggttgacggcggcggcccgcacggcatccgccagggggatgccgaaggatacagcggtcttcatgcacttcatcaggtcggtgacggagcctgccaaggtgccgtcgctcagggtagcccggttgcccttgacctgaacggcctgaccgcccagggtatagtcgccgtcaggcatgccggcggcccgcatagtatcggaaatcaggatgacccgcttggagccgaacatcttgaacacggcccgcaccaccgaggggtggatgtgcacgccgtcacagatgagctccacattgcacaggggggtgtccagggcggctcccaccacgccgggggcccggtggctgaaggccggcatggcgttgaatagatgggtcacctgccgggcccccagacggaaagcctccatagaggtgtcatagtccgccgtggtatgggcgatggacacggtgacttctccctccaccgcctcaataaactccatggcccccggctcctccggggcaatggaaacgagcttgaccagtccctgggaggcggccatcaggcggcggaacatagccacgtcgggggcgtggagccacgcgccgttctgtgcgccctttttggccatggagaggaagggtccctccagattgatgccgcagagggcggcgccgggcttatcggcggcccgatgggcggcggccacctgacagatcttggtgagctgctcctccgtcagggtcataccggcagggcagatctgggtgaccccccgggagagctcatattgtgccataatctccaggccctctggttcggcgtcggagaagtcccggcccatgcagccgtggaagtggacgtcggtgagaccggggatcacatagcagccggaggcgtcataggtctttccgtccgcgctggagccggagagcaggcggccgtcaaagcagatgtcccgctggacaaagccctcctgcaggtcgaacacttgagcgccggttatccgcatacggtcacacctgcttccaccagcttgtgaagggcggccttgtcgcccaccagagttacgtcaggatggagctggagcacagaggcgggaacctccttggtcacggggcccgtaaacgccttgcagacaatgtccgccttttcctcgccgctgaccaccatcaggatgcggcgggcgttcatgatgttcttgatacccatgctcagggcgtggcggggcacctcatcacggctctcaaagaaacgcttgttggcctcaatggtactctcggtcagatccaccacgtgggtctccaggccgaagtcgtcgccgggctcgttgaaggcgatgtggccgttatggcccatccccagcaactggaggtcaataccacccagctccgcaatgagtttattataggccgcacactcggcattggggtccttggccaggccgttgagcacgtgggtgttctccggatggatgtcaatatggtcgaagagattgtcctgcatgaaatagcggtagctctgctcatggtggggggacagtccgaggtactcgtccaggttgacggagcgggtctccgcgaaggacaagtcgcccttcttataccactccacaagttgctgatagagccctacgggggtaccgccggtggccagacccagcacgcagttgggcttgtagatcacctgcgcagagataatgttggccgcccggcggctcatggccttgtagttttcggcttgataaatgcgcattgcaaccatctcctatctttacagagtgggacgggcgcagcctacgcccgcccctggggcgttccaatggatcagcagaacttagccacggcggcggcgatcatagcgtgggcctcgtccactacagccgcatcgctgtcgatcagggcgggcatgggcttgcggaccgagccgcagggcacgccgtccttggccaaaattgctttctgtacggcgtacaggttgccgtgggcggagcacatcttgtagatgatgtggtcaatctcattctggatctggcgggccgcctccatctcacccttctggaagtgctcatacaccttcaggaagagctcgggcataacggcataggtacctccgatgccggcgcaggcgcccatggccagaccggagatgaactgctcatcgggcccgttaaaaacgagcagatcctcgtcatgccacatctggatatcctgggttggcatggaggagttcttcacgccgatcacacgggggtttttcttcatctcccgcagcagagaggtggtcagggccacccccgccagttgggggatgttgtagatgacaaagtcggtgttgggggcggcggcggagatatcattccagtactgggcgatgccgtactcgggcaggtggaagtagatgggaggaatggaggcaatggcgtccacccccaggctctccgcgtgggcggccagcacctggctgtcggcggtgttgttgcacgccacgtgggcgatgacaaccaccttgcccttggcctcggccatcacgttctccagcaccaccttgcgctcctccacgccctgatagatgcactcgccggaggaaccgcccacatacaggccgtttacgcccttgccaatcaggtggcgggtcaggccccgcacccgctccggtgagatattcccttcctcgtcatagcaggcgtaaaacgcggggataacaccgtggtatttcttcaaatcgctcatgatagtatccttctctcttctcaatcagaatctcattttatagaggctccgttcttttggcggcacatttgtagcgcaggctccgctggctgtgccagcggaggggcagcacgagcggcgcgtcagcccttgactgctcccatggctattccctgggtaaagtacttctggaacgcgatgaacaccacgatgatggggatggccgccagggccgcaccggccatgatgaggccgaagtcggaggacatctcgccctgtaggttggcaatcgccaggggcagggtccacttctccttactggtcagcataaccaactgaaggaaatagtcattccaggtattgacaaaggtaaaaatggccagagcgccgatgccgggcttgatcatggggaacaccacgctgaagaaggtcttcagctccccggcgccgtccacccgggcagcctccagaatttcattagggatcgtctcagagaactgcttcatcaggaagacaccgaagggccagcccacggtaggcaggatgaccgcccacaaggtgtcactcaggtgcagcagcttcatctcctgagccagagggataacaatgacctgcttgggcagagccatggcgcagatgataatggtgaacaggatggcccggccgtagaaccgcttcttacccaaggcatagccggccagagcagcagtaatacaggtcaggagcatggccatggcagagatgaacacaatattaaacagccacagaaaagcagggttctcaaacaggcgggcatagttgtccacagtggggttctggggaaaccagatgggtacgcgggaattgatctcgatgacatccttgaatgaaccggtgacaatccagtacagggggaacaggaagaagatcaccagcaggatcagaattaccacggcgacggccttataagccgtagaagtgccgctcagatcagtttttttcactttgactgtggtcgtatgtgcactcattttctcactccttccttagtccgtcttcgccactttgaactggatggcggagaaaatggcgatgataatggccagaacaacaccgatcgcgcaggcataacccagatcgttcagccggtaagcggtatcgtagacctgatacatgatggtcatggtggagttcagcggcccgcccttggtcagcaactggatcagcgcaaagcactggaaggagttgatggtcgtgataaccagcacgtagagggtggtaggcatgatctggggccacttgatcttccaaaagacctgaagcttggtggcgccgtccacttgggcggcctcgataagggactggtctacgttgcccagtgccgccacatacagcacgatgggttggccgatggaggtggtaaacaggatcaggatgatgaaccagagggccgtgctctgggtgcccaaccagtcaaagccggtcgtgcccgccacttggttaaggatgccgttgtagggattcagaatccacttccacactaccgtgatggccaccgatccggtgaccaccggcaggtagaacacacagcggaagaaggagcggggaatggagtgcatcttatagatggcggaactcacccacagggagaaagcggtgacacagggcaccgccaccaccacgataatcagtgtattcaggaagcccttgtgaaaaatagggtcctgaaagagcttgatatagttctccagtcctgcgaaccccttgataccgcccaagccatacttcgtaaagctgtagaacaggcagatgaacatgggcacgaccacgaaggtcacgaaaaagatcaggctgggcagcaggaacagataggcggagatggtctctctccgcaccagggcgcggctcatgccggagaattgggactgcttttgctttttgggcttccgtccggcctgggccgtcacggtattttgcgccatgagtgtctcctctctttcaagtggtatttgcctttcctttcaccggtgtggtaaaaagaagctgtgcccgccccctctcagcagggagcgggcacaggtgtgcgcaattcaaatgcgttgatcgggctctcagccaatgtttgcgttggcctgctgcacaaagttgtcggccgcagcctgcacgtcagcgccggtggtcataatctcagccagcatgggccaccagtaaccgcgctgctcggtccagccgccggtcaggttgtagtagcggcccaggtagtcgctcatcagggcaaagggcgcgcgggtctcggcgtcagcgtcgccggcatagacgtcaccccagtcagcgtggacagggaagaatccagtggtcttcaccgcctcgatgccggtggtctggtcgtcgcagacaaactgcacaaacttcttggcggcctcaatcttggcctcatccttgttgttgaacacgccgaagccataggggccggccatctccagctcgggcttgccgtcgtcggaggggaaggccatggcaaagggagtgaactgggtctgctcagcatactgggtgtaattggagtagttccagcagaaggacacggcgcaggtctggttggcaaaggcctgcagctcgtcggccgcggcgaagctggcattggcggacatggaaccgttgttcaccatatcctgcagcagcttgagagccttgacgttgttctcgctgttagcgaggtaggaggtgccgtcctcattgacatagtagtcggagtacaggttgttgacgagggcgcgggtaccctggtccccgccttgggctccgcagtagatgatgccgggggtggcaacgttgacggtgcccgccgccgcggcgtcacgaacggcctccatggcttttacgaagttgtcggtggtccaggtgcgggtttcctcgtcgatatactggagggcaccagccgcctcaaagacatcatagttgatagccatgcagtgggcggctacgctcagggggtacatgtagtaggtgccgtccaactgagacacagaggaaatgccctcgggaatgtcggagccgccattctcccacaggtcggacaggtccaccatcaggccctcacgggcgtagttgcccacgatacgctcggggccctcaaagatgatgtcggggccggtgccagaggtgatggcgttggtcagcttctggtcgccgtcctgatagttgatgggagtgacagtgatcttgacgtcgggattctgctcattgaatgcggcgatgatggaatcccagttggaagcgtcggtgaagccaccgatgttgaacgcccacagattcaactcaacagcgccggtggagctgccgccggtctcgccgccgggcgcgggggactcactgttaccctgggagccgttgccgcaggcggccagccccagagtcataccggcggcgagcaggagcgcaagaggtttcttcatgttcattgttcttcctcctcattttcgataaatttttctttccaggacatctcgtccgttgtgtagattgtataattccgagggtgttttgtcaatatgcttttcgaagaaaattttatttctcataaaattctgcaaatttctttcacgttttgcaatacgcggtcaaatgtgcttgtctgaaagcacctccgccacggcctcccttgtctccgcactgccctgcacatccctgcggcacacctcatggaacagcacgtccatcaggtagagctgtgctacacgggccgccaccgagccgccctggaggggcccctccagagagccgcactgaagcactacgtcggcataggccgcaccgggggatttggggaaccgggtgaccaggatggccaccgctctccggtcccggatgattttcaggtttttcagcagctcctccgtggagccggagtaggaaaaatacagtaccacgtcccgggccgtcaggtgggaggcggcgatggcctgcatgtgggaatccagcaccgcgtagaagttgggccgggcggtgctgaacagatgggcgcactcctgggccaggatcatggaccccccctgccccatgcacagcaccttttccgcggaaaagagcaggtccgccgccttccggacgctgtccgggcggatcagttccaccgtctgggccatggcatcccggtcagcggcgtagagcttctgacacagctcctcaatgctgtcttccggtcggatctcccctggtacggtaggggcttccacccgccgtgccgtggagttggctacggcaagcttgaaggcgctgtaccccttgtagcccagccgcttgcagaagcgggagatagtggcctccgccacgccggcctcctccgccagctcggagatggacatgaactgggtcttctgctggtgaatcaccgcatagtcggccaccttcttttccgcgctggtcagctggtagtattcactgttgatcttttcaaatacatttccaaagggcataactgccccctcactgtccggccaggagctgtcccagcatctggtcacacatcaccagcatccgcggcaggtggaagggccccttgaacgtactgcccttacaggcgggcatggtgggcttgccgtcccggcgcaggtagccgtaccagtcgccgtattcgggatcggagaagtgctccttgcagtagtccagggtgcgctcaaaccaggtcaggtacttctcgtcgccggtgtcgcggtagatcatcaggctggcgatgaggatctcgtcgtggggccaccagagcttcatgtcgtgctcataggcctcagggggacgccccaggcagtcgatgaagtagagcaggccgccgtactcgtagtcccagccggcctcgatggcctggtcaaagatcttgaccgccacctcgtgctgctccttgtcgcccttccggttggcgtcctccatcaggaaccaggagcactcgatgtcgtggccggggttgaccacccggccctcggtcacgtcgccccggaactcgccgttggggccgacgctctccaaggtgcagcccagctctggcttgtagtggtagcggaaaatctcatccacgcactgggcggcccgctcgctgtaaagcgcgtcctgctcggggtccacccggcgcaggaccgaggtgatgttcagatagatcatagggttggccagggcgcggccggagcgggtctctgggatggtcttggggcccatccccgtggggtcggcgaccagcccctggttcaggttccagatcaggtcgtaggccgcgcgggcccgctccaggcatgccttgtcgccggtaacaccgtaatactcggcgttggcgatggcatagaagccctcggagaagcaatagcggcgctgacgcagcggcttgccgtcgccggtgacggtgaagtacatccggttgcccgccgcccggttgatgcagtaccgctccatgaagtccaggcagctcttgctggcggccagccactcctccttcactccgtacacgtggcacagataagcgaagatccaagcgcagcggccctgcatccacacactcttgtccgtggagaacacctttccctcccgatccagacaggtatagacgccgccgtgcaccgggtccatgccgtttttcatccaaaaccggatgctgcgctccagttcctcctgaatccacttctggtgactctgtaaacgagccttatgatccataatgtcagatcccacctttcgctgattgggagaggtcccccatttgcctccatcataaccgccctcccccctcccgtcaagagaatttcgaaaattattttcaaaaccctgaaaatatgcttgacagattcaaaaaaactgatagcctataggggaaggaacctgtctgtttcccacaaaaaaggagggcttacgcaatgaagcatcttggaattgaagtcccagtaaaaaacgtgccggaactggaccccggttttctccccctgggaaagttctgcaccgcctttctgaaggacgccaaaaagccgctggacatcgcggtggagcgggccggcggcgaggtggcggtctacaaaacctttatccacggcactccggacatggccgaggccgacatctactatgtggaccgcatcatcaagatgctgctctggatgaagggcggcttcaaggtgtacctcagcggcgatcaggccgtatatgaggccatgaaggccacctactgcgtgggcggcgcccgcgcctttgacgccgacttcatgtccaacgtctatgagaagccctttgaggtggtgtactgcgaccaggtgcctgccgagaagagcaatccccaggctgtgggccgccacctgggcggctgccgcatcggcttcgatgccggcggttccgaccgcaaggtgtccgccgtcatcgacggcgagccggtcttctccgaggaggtcgtctggttccccaagaccacctccgaccccgactaccactatgagggcatcgtctccgccctcaaggccgctgccgagcacatgccccgggtggacgcggtgggcgtctcctccgccggcatctatatcgagaaccgcaccatggtggcttccctgttcctcaaggtgtccaaggaggactttgatgccaaggtgaaggacatctatatccgcgccatccgcgacaccttcggcgacgtgccctatgtggtggccaacgacggcgatgtgtccgccctggccggcgccatgagcctggaggaagacaacattctgggcatcgccatgggtaccagcgaggccgtgggctacgtggaccagagcggcaacatcaccggctggctcaacgagctggccttcgccccggtggacgtgtcccccaacgccatggaggacgagtggtccggcgacatcggctgcggggtcaaatacttctcccaggactccgtcatcaagctggctcccgccgccggcatcagcctgtccgccgacctctcccctgctgagaagctcaaggaggtccagaagctgatggaccagggcggttcccccgccgaggccatctaccgctccatcggcgtgtacctgggccactccctggccctgtaccaccacttctacggcttcaagcatgtgctgctgctgggtcgcgtcatgtccggccggggcggcgacatcatcctggacacctgtaagaaggtgctggccgacgagtacccggaggtggccggcctcatgaaccccaccctgcccgacgagaaggcccgccgtgtaggccagtccgtggccgccgcctccctgcccgagttgaggtaagcggtgaaacgccacatcgtctgcctgggagactccaacacccatggatactgcgccgatcccgccgactgcgccgacggctccctccgccgctttaatgaatcagagcggtggacctgccgcctccaggctgccctgggagaggactttctggttcttgaggaggggctacccggacgcaccaccgtctttgacgacccggtggaggagagtttgagcgccctgccctacctctatccatgcctcatgagccacgcgccggtgtccctgctggtggtcatgctgggcaccaacgataccaaggagcggctgggcgccaacgcctgcgccatcggcaagggcctgcgccgcctggtgcggaaggcacagtccatcgactgctgggcgggcgggcagcccaaccttctgattgtcgccccgcccgccatcggaaagggagtggagcgatctcccgtggcccaggagatgggactgggctgcgtggaaaaatccctgcgcctgcccggccagttccgggcggtcgccgcagaaacccgctgccactttctggacgccaatgcccttggcttggcgcacaaccccattgacttcatgcacctcacccgtgagagccacgcccggctggccgccgcgctggccgagcggattcccacactgttctgaacccgtacaggcccggcgaactgtcgccgggcctgtgacaaaaaggaggccccttcatggccgcaggcatttttaatccggaaaacgacttctggcgtctgatcgaaaagctggtggatctctttctcctcagtgtgttctggctggtctgctctctgcccgtgttcaccctggggcccgccaccgccgccctctaccgcacagtggcgcgctgtatccgcggcagcgagcgcaagagctggagcctgttttttcgtaccttccgggaaaatttcaaggttggcgccctgaccaccctcgtggtggtggctgtcggtgcggttttgttcgttctctataccctgctctatcagactgcatcgctcaaccgcgccggctacatcctgtttatggcctactatgtgtttcttttgttgccgctgggcctgctgtgctacctctttcccgtcctctcccagtttgaattcggtgtgggcggcctcctctccaactgcgccaagctggccatcgcccacctgccctctacgatcgccctggcgctgctgctgtatgccgccctgacggtgtgtctcaacttcttcctggccatcgcagtcacccccgcccttctggccctgctccactccctccttctggagcgcatcttcgccccctacatccgccagcagttgggagaagatgacaatgacacttaaaaaaacagcctgtcgaatacatgcttcgacaggctgttttttgtttctatttctccgccagcagcttattgagttccgtcataaaggtgccgatgtccttaaactgccggtacaccgacgcgaagcggacataggccacctcgtccacctctctcagccggtccatcaccaactccccaatcttcgccgaggggatctcccggtccatgtcgttctggagaacctgctcaatttcgttggcaatctcctccagctttccaaagggcaccgggcgcttctcacaggcccggatcatgccgttgagcagcttgcttttgtcaaatgtctggcggctgccatccttcttgatgaccaccagaggcagactctccatggtctcataggttgtaaaccgcttatggcacgccaggcactccctgcggcggcggatgctggccccctcatcggagggccgggaatccaccaccttgctctccggatgggcgcagtacggacatttcatggtgtcttgccccctttgcttcattttaagctatgatggttcattatagcataaaagtgcagcctgtggtatccccatttgagaaaaaaatttccgtatgattttgttttttccgggtacactacaatcagcgaaagcgaggtgagcttgatgcagaatcagaatccggaccagatgaaggcccgcagccagaatggtcagaacaagaccaatggccagaatgctcagaacaagaagaaggagcaggctcagaacaagaacaaccagcccaaccagttctgactttgagccatgggccggggctccgccccggcccaatttttctttccaaatttttttcatttttctattgacattctgcgccattttggtataataacatgcgtgctcacgagagagcagtaaaaatagcgggtttgtgtaagggtagcacagcagactctgactctgtatgtgagggttcgaatccttcacccgctgccaaagctccgtaacctttcggttgcggagctttttcttggtaaaaagcggcggcgcatccgaatggatgcgccgccgctttatccacgtccgagggcgcggttttgaatatggatagcctcctcccgcgccccccggtcaggtgcggagagttcatgtaccaaatagtccggcccgatgcgctccactacctcacagatggcaggggaagtccagggctgatgcgtatcgatgcgcaggatatggcggtagccgaagccgtaccgctttaaatagtccagaggcaaccccggaggaagaaaacccgtatgggcccggacatattccccgctgagggagcagtgaagatgaatccccctgatgtaccggcaaagacctccatgccggtccagcatgcggtgcacatagtccgccccttcctccagggtacgcaggctggtgtcgcagttcatcagatgcccgatatccagcatgatccccttgcgctcagcccggattccgtccagcagacggcgggtcagctccggctcggtgaaggtgaagcccggccaccactggttctctaccaggaagtcgaagggccacgcccggtctcccagcaggagattgataacctccgccgctgcatcgatgacctcctcatgtgtgtgccgccagtggtaagtgaagccctcctccaccgacacgtcggacacgtggaacaccacatagcgcgccccccacgtcacagctcggtccagatcctcccggtagaggcgcagcagggtctcccgtccctccgggccgccgtaaaaggaccgccacacttcctccgagccaaatttctcggtcagtgcggcccggtctccccgccagaaatccagccaatctggataaaaggtcaggtggtagcccacgtgcagcgcctgcggcaccgtgcaaggcagttcctcaccgccccataccacctccaggccgtcacagccgcaggaacggcaagcctcctccaagtccccatactccgtcaggacagaggcggtcatgggcaggctcatcagggtatccatttatttgcttccagtgttgaagaatggggccagcgccgccgccaccccgctgaccggcatggtctggagcagaatcttgcccggcccggttaccacggtgttgaacaggccctcgccgccaaagaggacattcttgacgcccttcaccatttgaatgtcaatggtgcaggtggcatccatcatggctaggttgccgctgtccaccaccatgctctgccccgcctggagctcatactccaccgcatagccgtcgacctccagaaaggccgtgccgcggccggagagcttctgcataataaatccctcgccgccgaaaaagccagctcccgctttcttttgaaagaagatggacagctccaccccctgttcagaggccagaaagccgcttttctgcaccactacggggtgggccgggtcaatctccaccgccttaatggacccagggaagctggaggcaaaggcgatcatcccagctccgccctgggcggtataagtattttgaaacatcgactcaccggagaacatgcgaccgaaggctttgccaataccgccggctccggtttccatcttcatgttggggctcatccacaccatggagccccgctcggtgatcatggcctcgttggcctccagatcacacaccacaacgggcatgggctcaccaatgatctcatacttcataatgggtccctccttatgtttggatgctcctagtatattacggtttccgaaggatggcaagtcccgccccatgcactttacaaattctttcctttcgtggtatgatggtactattctttcaaggaggcgtcggaccatggagctgacaagggagcaggcgctggccctgctcaggcagtataacgaggagccctttcacctgcgccatgccctgacggtggaggccgtcatgaactggttcgcccgggagctgggttacggggaggaggcggcgttctgggcccaagcggggctgctgcacgacttggacttcgagcgctacccggaggagcactgcgtcaaggtgcgcgagatcatggaggcccgcgggctggacccggccctcatccacgcggtagtcagccacggctggggcatgacggagggcgacgcccagccggagcacgaaatggagcgggtgctcttcgccgtggacgaactcaccggactgatcggcgcagccgccctcatgcgcccctccaagagcgtgcaggacatggagctgtccagtctgcgcaagaaattcaaggacaaaaagtttgccgccggctgctcccgggagaccatcacccagggagcccaactcctggtttgggagctcaacgacctgctggagcgcaccctccaggccatgaaggcctgcgaggcggacatcgaagcccagtgcgccgccctctgagatccacaaaaaaagaccgtgtcccccggcggggatacggtctttttgtcaagcgtcggtggcctcggtggcaatgcccgcccgctcctgggcgatgttcagtgcgtggtcgccgatgcgctcaaagtcggtaagcagctcggagaaaatgatgcacgcctcgtctgagcaggagccctgcttcatccgcttcatctggttgcggcgatactcctcagtcatgtcgtccatccgctgctccagcgcggaaaccttggtgagccagtcggtgggctcgatgctctcctgctccagcaggtccagcacctccaggcagacggcctccatgctcctcagctcctcctgagcctcttcggagaattgaatcttcttcttgtccagcatctgggtgtactcgcagatattcatggcatggtcgccgatgcgctcgatgttgccggtgatcttgaagtaggcgctgatggcggtggagtccttctcgttggtctcgtgcacgatgatgttggagatgtactgggagatctccttgttgagatagtcgatatactcctcggtggcctccgcgctctccacgcgctttacatcccgctccagcactgcctggaagctggtggcgatgttctccttcgccatgcccatcatgcggttgagctcctggcggatctgggtgacatacatcgcggaaaagccgatggggtgctcctgcttggaggcaggcataggcaccagaaaagccaggtgcatcccctcctccttgtcctccttgcggtcgggcaggatgcgcatggcgatcttcaccagatatccgccgaagggcagcagcagcagggtggtcacaatattaaagagggtgtgcatgttggcaatctgcgccgccgggttgtcgggggtcatggactgcataaacccggtcaacggcgtggccatgcagatgacggtgaacagaacggtgccgaacacgttgaacatcaggtggatgatggtggtgcgcttggcgttgcggctggtgccgatggaggccaaaacggcggtgatacaggtgccgatgttctgtccgaagaggacgtataccgcgctgtccaggccgattaccccactgagggccagcgcctgcaggatacccaccgaggcggaggaggactggatcagagctgtgaaggccgctcccgccagaatgccgacaacggggttggagaaggtgctcaccagattgacaaaggcgggccattcccgcaggggctccatggccgagcccatcatctccataccgataaagagcacgcccaggccggccagaatatttccgtagtggtgaatctggggcttcttcaaaaagaccaccatggccacgcccacaaaggcgaacaggggagccacggcgcccacgtccagggcgatgagctggccggtgatggtggtgccgatattggcgcccatgatgatccacaccgcctgtttcagcgtcatcatgccagagttgacgaagcccaccaccatgacagtggtggcggaggaggactggatgaccgcggtaatgcccgcgcccaccaggatgcccaggaagcggttggaggtcagccgctccagaatgcccttcatgcggttgcccgccgcggcctccaggccggcgctcatcatctgcatgccgtaaaggaacagggccaggccgcccagcagccccaggagaatgcttatgtctaggttcacgttcattccctcattttttacattcttttttctgatctcttaccaaatgccagcagtagtataccgaatgtaaagtggcgcgtcaacggtatttacaagaactttacaaaaagattcgaccggatctttactcttttttaatcttccaatttccggccagccgttgcctttcagccgattttaggctatactacccttatcccgttcgtttggcctccgggcccgcggaacaaaaggagaatgtttttatggaacagcaaccggccaagaagcgccgaggccctgcaagcaagctggggaagatcctgatcaacctgatcgtcaccgctgtggtgggcttcctctacttctatgtggccctgccccccatcaacctgcagtccagcgatttttataccttcatcggcatcctgtgtgtggtgtatgtcgtcagcgccctgatcacctccggcatgaatgtggtcagcagcggtggaggccccaaggagtacctccgcttcatcaagacccagtgcctgcctgtgggcatcctgtttctggccctgatcgcggtggccatcgtgggctccgtcctctcgatgccccttttccgcgccgcggcctaccgggatctgctcaccgtggaggatggcaatttcgccgaggacatcgccgagatttcctttagtgagatccccaccctggacaaggactccgccaacttcctgggcgaccgccagatgggcaccctcagcgacatggtcagccagtttgaatactccaacgactccacccagatcaactaccagggccgccccgtccgggtcgcccccatcgcctatgctgacctcatcaagtggttcaccaaccgctcccagggcctgcccgcctatgtcatcgtggacatggtcacccaggaggccactgtggtgcgcctggaggaagggatgaaatactccttctctgagcccctcaaccgcaacatcgtgcgccacctgcgcttccaataccccacctacatgttcggcacgccccagttcgagatcgacgaggacggccgcccctggtggatcgccccccgggtggtcaagaccatcggcctcttcggcggcaccgacatcaagggggccgtcctggtggacgccatcaccggcgagagcacctactacgaggaggtgcccacatgggtggacaacgtctacacccccgaactcatcatggagcagtatgactaccacggcaccctggtcaacggcttcatcaactccatctttggccagcgggacgtgaccgtcaccacccagggctccaactatatcgctctcaacgacgacgtttatatgtataccggcgtcacctcagccaacgccgaccagtccaacctgggttttctgctgtccaaccagcgcaccaaggagaccaagttctatacggcgcccggcgctacagagaaggccgctcaggcttctgccatgggcgtggtgcaggatcttgggtatatagccaccttccccctgctgctcaatatcgctggcgagcccacttacttcatccccctgaaggacaataccaacctggtcaagagctacgccatggtcaatgtggcccaataccagatcgtggccaccggctccaccgtctccgagtgtgagcagaagtatgtccagctgctgggcagcaagggcatcaccacgccggaggagcggccgcagaccgaggccagcggcgtcatcgccgagctccgctccgccgtgctggacggcaacacctactacttcatccgcctggagggcgaggaggtgttctactccgtctccgcctcccagaatgaggtggccgtgatcctcaatgtgggcgactccgtcactattgagcacgaggtcccgcaggagggcagcgagtcgctcatcctggacggctacaccatcaccagccacaccagaggcagttctgccgttccggcggagccctccgcctcccccgagccgcagaccggcgcagccgcatgacacagcgggcggacagcagtgctgtccgcccgctttttgcgaggtgattccccgtgattctctccgtctcccgccgtaccgacatcccccgctggtactccgagtggctcctccgccgcctgcgcgccggcgaggtgctggtgcgcaatccctaccgccccggccagctccgccgggtccccctctcccccgcagtcgtggacgctatcgtgttctggacgaaagaccccgccccgctgctcccctggctggacgagctggacgggatgggctaccgctatctgtttcagttcaccctcaccccctacgggccggagatcgaaccgggcctgcgggacaagcgggccattgtggagacctttcaggtcctgggccgccgcctggggcgggggcgggtgctgtggcggtacgaccccattctgttcaccgacgccatcggcctcgcctggcacgaggcccggttccgcaaactctgtaaagcgctttccccgttcactgatcaggtgacggtgagctttctcgacccctaccccggccgtcccatgggcggcctgcggcccccaaatgccctggaaatgcaggagctggcgtccatgctggggcaaactgcaaaggaatatcacttgtcaattgtggcctgctgcgaggcgggggacttctccccccacggcatcggccgggccgcctgtatcgaccgggcccggctggagcgcctgtgcggcgggccgctgcggctgggccccgaccggggccagcggcccggctgcggctgctgtgaaagcgtggacatcggcgcctacgacacctgtccttccggctgccgctactgctatgccaaccgcacccccgcccgcacagcggcacggcgggcggagcacgcccccgacagccccctactgaccggcatacctagccccggagataccgttaccgacctgcccgcctgctcctgccgcgatgggcagctccgtctgttctgaccgtcatccagccgttcagcagacccagggcctcgggcgacaggagcagcagggcgcacaggttgggcagggccatcaggccgttgaagatatcagctaactgccacaccacggccacgtcgcctacgcttcccgccaccacggccagcaggaaagccgcccggtagggccagcgccagcggtcggtaccggtgaggtactggaggccccgctccccgtagtagctgctgcccagcagagaggtgaaggcaaagagcaggaggcagaccgccacaaagaccaccccgaagcggccgaacacggtggagaaggcggcggcggacaggggcgcgcccaccatggcgctggtgacggtgccgctctgaatggccagcagggccgcattctcctggtacaccccggaggtgaggatcaccagggctgtgatggaacagaccgacagagtggcaataaacacctcaaaaatgccccacatcccctgctctgccggttcctgtacgttggaggcggcgtgggcgatggcggaggagcccatgcctgcctcgtttgtgaatacaccgcgggccacgccgtagcgcatggctgcggccatgccgtaccctatgccgccccccagggccgccttgggggtgacggcgcccgtcacgatgcgctccagcgcctcgggaatggccgcccggtggcaaatcagcaccatcactccgccgccgataaacagaagggccatgcagggcaccagggtttcgctgacccgcccgatgcgcccgatgccgcccaggatcaccagtccggtcagcacagccaccaccagtcccaccgccagccggtcccagccgaaggccgcctccagggatgcggcgatggagttggcttgcaccacatttccgccccccagggaggcggccacacagcacagggaaaacagggcggccagcgtccggctgcccactccccgctccatgtagcacatggggccgccctgccagccgccgtctcggcttttctcccggtagcgcaccgccagggtcttttctacacatccggtcatcatgcccagaaaggcggacacccacatccagaacaccgcccccggcccgccgtagaagatggcggtagccaccccggcgatggagccagtgccaatggtggaggccagggcggtggacagggcctggagctgggtaagccccccgccctcccgccgcctcttcggacggagcagggagcctagcgtggttttgagccacagccggacgtgaaagagctgaaagaagccggtccgcaccgaaaaatacaggccgctgagtaaaaagaggcccagcagccacgggttccagataaaatttcccaatcgctcggcaaaggccatgtccacacccccctgttacacatatgccggaggggggaggaacatgtctcccttgtcaagggcggttttcccctttataatagggtcaaaaggagggcgacatcccatgtttgacttccagcagatcagccgttaccgggaaaacaaccgcctggaggccaagctggccaccggcgggctgcccaggagcatctgggagacctattccgcctttgccaacacctacggcggcgtcatcctgctgggggtggaggagctgcccgaccacaccctgcgggtgcaggggctgctggagccccgggagctggtggacgagtttaccgccctgctccaggacccgcgggtggtcagcgccaacctgctcacccccggcgacatccaggttctccacgtcgacggcggggatatcgtggccatcacggtgcccccggcggagcaggatcagcgcccggtctacatcggcggcgatctggcccgcggctcctaccgccgcagcggcgacggggactaccactgtacccgggcggagctcaacgccatgctgggcggccgctcccactgacagcaggcccccggtcacccagtggccgggggcctgtcagatttgcgccagcgcgtccagcaggatatggctccactcctccggccgctcccggaagggcaggtgccccgcgtccggcagggagagaaataccttacagggggccgacagggtatcgtaataggccgccgccaatggatagggcgtggtccagtcccgttctcccgccgtcaggatgaccggcaccccatagcgcggcggacaaccgtccagggacaggccccccagcagctcctcatagagggcggcgttggccgccagcatccggtcaaagcggagcttccaccgcaggtcgtttccggtcagctccggggcggccagtccctccagcggagacggcccgccgtactggggcggcagataccgctccttccgccggcgaaaccgcagcagggctccggcccccgcccggtccagccgccgcagggccagcacctgctccagctcctgcgccagcctttccgcgtcctcctcccgccccgccccgcgggcccttcggatggcctccgccgccgatacctgctcggaccgcttgaagtccaccatctggctgacggggagccaggctgagagcttctccgggcggcggagcgcatagagcccgcccagcaggctcccccaggagtggcccagcaggaacagcctgtcccggccataccgggcccgcagggcgtccaccagctcgtccaggtcggagagcagccgctccacagtgggcggcggggcggccgggtcccggtaataggtgttcccgctgccccgctgatcccaatgaaccacggtgaacgccgcctccagcgccccctgccaccggcaggcggtggcccctagggtgctgcccggcccgccgtggagcaccagcaggacgggattggcacggctccgcccccggacgcggatatactgctcgatgccgccgatggggaggtaagccgcctcctgcaccccgtccgccgtgcggatggcgtaccgcccgaaccgccccggcctcatggagcctcccccacggccgccagcagctcctccacgcatctgcgctgccgctggacgatgtccaccatgttgtcaatggtgatgcgggccaagggcggcacctcctgtccctcattgccggcgcggccccgctccagggcggcgtactccgcctccagccgccgccgctgctcctccagggccagccgcacctccgcctgagacagcttgtctgccagggagagggcgctgtagagtgtggtgggatagagggcggaggaggcccgcagggcgtcggcgatcagggtgtgcagatggctccggcccgcctcggtaatccggtagaccgccttctgccggtggcccgtctgctccacccccgccagggcgatgcagccctccccctccagctttttgagcgcgtggtagatggagcccggaagcacgccgccccaccgctccgcgtccgccccgcccagcttctgctggaggtcgtagcccgacatgggccccccgtccagcagtcccagcaccagaagttttgtcatagcgtctcctcctcggtctatattcaacattgagtatacaacaaagaatatatttgtcaagaggagacagaaacgccgggcggcccgtttgggccacccggcgtttctattttacaggttggcgtccagcactgcggtgtagctggcctcgggcatcacgcccaccttgcggtcgatctccttgccgtccttgaggaaaatcacggtggggatgctcatgacgccgaagcggacagccagctccggctgctcgtcggtgttgaccttgcccaccagcaccttgccctcgtagcggtcggccaggccgtcgatcaccggagagagcattttgcaggggccgcaccaggtggcccagaagtccaccatcgccagcccgctggcggtggccttgtcgaacgcctcgttggtcagatgaataagtgccataatttgttccgtcctttctctgtatcgccttatgatgaattagagtgtgtctacgtattccgatgcccggtggcccgccacctggccctcccccacggccttggacacctggaggggcaggccggtacagtcccccgcggcgaacacgcctgggaggttggtggccatgttccggtcggttttgatgtaaccgccctccagcgccaggccggggagcaggtcggcgggggccatagaggggcggagaatgaacacaccctcgcaggggagggtcacgctgtcggcccgcagggcctccaccttcttctcccccagcacctccagccggacggccttcacgaagggaatatcggagtgcaggccctccggcggccggtcgctgacgtaggtgaccctgcatcccagctcacgcaggtagttggcctcgtggggagcgtcggcggttttgcccaccactgcgatctccctgccccggtagagcatcccgtcgcaggtagcgcagtagctcactcccgcgcccagccgctccgcctcgcccgggtacttcttcgcccgcaccacgccggtggccagcaccacggcgcgggcctgctccacctcgctgccgatgctcagatagtatgcgccgcccacggccaggagattcagcacccggccgtcccgccgctccacccccatctgtccggcgtgggtgcggaagcgctccagcagttcgggaccggtcacattgtaaaaacccagatagttgtcgatgcggctggtcttgtagaggggattgtcccggtcgtccccgctgaccaccagtaccgacttgttgcgcgccctggcctggatggcggcggacaggcccgctgggccgccgccgatcaccgcgatatcgtacactggtattcctcctcccggtcgccgaagagggcggagagcaccgccgctacctccgggttggcaatttcatagtatacctcgttgcccgaccgggcggccttgaccaccccggcggccttgaggcgcatcaggtgctgggagatgcaggactgggactggccggtgttggcctccatgcagcccacgttgcggcagccgcacttcagcagcccgcggacgatccgcagccggagcgggtgggccagggccttcagcagctccgccttctcctcatagagggcggtgggatcgctcatatcgctcacctcgtcgttaatttctaatattattatattcaaatattataatatgtcaacccctttttccaaatttctcttgacagtttggccgcctctgtttatcatggtaattcgtttggctgtcaaatcattcgagcgtcaaacaagcctacatcagaaaaggagctcaaccatgcacgagaccgcgaccaagcgccccggccgcgccgggaaatacattcggcgggccctgctcgccctggcggcggtgattctcgccgccgtactggtgctgctggccctgttccaagccgagctgcgcaccctgaacaccattgagcgggtggacgacaccgacctgttcaccatgacctatctgggagactacggcctggacgactttctggcccagggcggcgcctccaacgacaacgagctgctggacttcctgatgcagaagctgctcaagggtctccccctgcgcttcgacatcccggatctgggctgctccacctttgccgccgagaccccggagggcgacgccatcttcggccgcaactttgacatgtactactcccccgccctctttgtccgcaccgccccggaggacggctaccgctccatctccatggtcaacctgtcctacatcggctttggggagggcaagctgcccaccagcctgctggacagcctgctcaccctggccgccccctatgtccctctggacggcctgaacgagaagggcctggcggtgggagtgctgctcatcgacaccgagcccaccgaccagcagaccgacaagcccgacatcaccaccaccaccgccatccgcctgctgctggatcgggcggccaccgtggatgaggcgctggcgctgctgagccagtacgacatgcacgcctccgccaactcctgctaccactttcagatcgctgacgccgccggccgcgccgtggtggtggagtacattggcgacgagatgaacgtggtggagagtccccgggccaccaactttctgctcaccgagggcgactgggacttcggccggggccaggatcgcttcgccgtcctggaggagaccatggaggccagcggcggcgtgctcaccgaggaggagggcatggccctgctccaggcggtcagccagcagccccagcccggcaaggacagctccacccagtggtcctgcctctacaaccaggtgcggggcactgtggacatcgccgtggccatggactatgacagcctctatcacttcgccattgacgaataaccggcacaggcccgccgcatatgcggcgggcctgtgctttttgttttaccgaatcccccagaccagcaagctggagcgccccacccgccggaactccacgccgtggaagtggggttccagcagggcggccagctccgccccgctgtagaggcgcacgtccccctcgccggacagggggaggaacaggttggccaccccccgcagccccgccggggccgtgcagtctcccagcaggagcacgccgccgggctggagcacccgggcaaactccgccgccgccgcgcccgggttgggatagtggtggaaagagtcgttgcacagcagcacctcaaaccgcccgtcggcaaagggcaggcgctcggcgtccccctgcaccagctccaccgcgccgcccagcttttcccgggccaccgccagcatattggccgacagatccagccctgtccgggcggtctccggaaaccggagccccacctcccgcagcagctctcccgtgccgcagcccacgtccagaaccgagccgtggggaatctggacaagctgctccagcaacaccgggtacagcccacgggcatggctgccgaagcgggcggtgtcataggtccatgcctgccggtcaaaggctcggccagagcgcgttttacagtcgttcatcgcacattctccttattgaattttattcattgaattttgttcattcgaatggaaattttttgcctccgacgcgcgtccccgcgcttcggaggcgttgttcagtattccggctccagaatccggccggcatagcgccggaggagcgccacccgctcctccaggggcaccgcatgttcccccagcaggccgatctgcccgtggagcagatagctggccgccagggccggatgctccaggcgcagctctccccgttgacaggcgtcctccagctcctccgccacatggggcgtcagataggcgcagatgcgccagttcagctcctcatggatgctctggttctccggccggtggtaaaaggcgtggtaacgggcgttctgctcggtctccagcgtcagcgccgccatgtcgtccagccgctgccggatcgtgcggctccggtcgtggatgatgggcagcccggcggcacagcactcccgaacatactgctccatggcctcccggaacagcacccgcttggagtcaaaatagcggtagcacagcccctgcaccacccccatccgcctggcgatgtccgccatggaggtgtcctcataccccttttccgcaaacagctccatggccgtgtccaggatctcctgccgccgtacctccggcggctttgatatccgcgccatcccatcacctcatccgcagtatagcactcgattgaacaaaagtcaatgaataaaattcattttgagagaagccgcttgaggcccgcctcatccagcaggttgaccgtctcaagccgcccccggtagaacaccgcccagttgttgaacacgccgggcaactccttggccctctgcaggctgtccaccgggatcagggtcaccggcgcgcccctctccccgcagaagcgcttcacctgctccagactggcgtgaatgtaggggcactgcatgccgtaatagatggtcagctcctgctccgggatcgtcccccgccgggcggcatccgtgaaccggggcgcggtgccgtcaaaggagagggccagcagctcataccctccggcggcggtgtccaccacctgaaagccgtattttttcgcaaagctttggtcggagagccaggccttctgcttctgggcgcccagcatgcagacgcccgacttccccttcgctccggcgtccgccaggcagtactccatcagcgcccgcccgcagccctttcccttgtacgcccccgctgcccacaggcagtacaagtacaggtagttgtcccccgtcacggggacccaggcggtctccagcggggcatactccacaaataccgcccccttctcgtccagctttcggaagacatgcccctcctccagccgcccggcaagccagcggcgcttggcctccacccccggatggggcttcctgctgcggatgatgcagcacaggtgctccccgtccaggttttccggcgtcagattgataaactctttttccatagtcctcccccggtttaattccaccaaaagtaccagagctccgactttgccaggccgtccgccaggatgccgatctgctccacgccctgatccacaatgtccgggcaaaagccctattgctccagcgtcagggctatcgactcctcccgggccatcgggcggggtaattggcactccagcgcgtcgtgggtgacggcgcagggtaccgctccatgccgctcctgtcagtaccgcgccgccgcctgctccggcgtgacgccatgtactcccccctccggctccaggttcatctgcaggcattccagcaggggatcgtcatcccacatgggtgcgaaataggtacaaggacagcctaacagctccatcatcgcccgggccaactccgggggtgtccgcttttcttccatcactccggctctttcttcatactctctccgccaaccgggcggccccccacgtattccaccgccggtccagataggccttcattccgcggtcatgacagttaaacaaaaaacgcccctcctgactcggcttcttttgaagtgcctctcccatgcgcccccctttggtttagtataccacatatcactcaaatttccgacaccgttagcaaaaaagaggcagaaaccaattggtttctgcctctttttggtggagataagcgggatcgaaccgctgacctcttgaatgccattcaagcgctctcccagctgagctatacccccatgttcaatttttgctgttttgctgaccgaacgaattgtattttagcagagtattacccatttgtcaactacttttttcgcttttttacaaattcatttaggtaagctgtgtggacggcgtgtaaaagtgagagcatcacgcaaattgaatacttcgtactatgtttgcaattaataatagcatctatctttttgacgcacgcaacctgaaccgcccccctcttttgaacaagtctaaaatatgtgccctgcatctcccaagggctaaaaattggaacggcactcttagagactccagcaaaacgatatttatttttgattatgcctgcttataatagtccactatagcgctcaactcccaaattacaaagaactctcgctcttctcgctctattggcaaaaaaacaaaaaagtagttgacaaatgggtaatactctgctaaaatacaattcgttcggtcagcaaaacagcaaaaattgaacataggggtatagctcagctgggagcctggtacaagcgtgtactagcacccctcaccaaaattgaaaatcgaaatcttgtgcctctcccatatatgggggtatagctcagctgggagagcgcttgaatggcattcaagaggtcagcggttcgatcccgcttatctccaccatgagaggcacaagtcagaaatccgtttccgcaaggaagcggatttttgtttatgcagcaaaggtcactatgtccaggccgccgttgaactgctcaaagtcaatattaaagtcgatgtgcagcttatagtcccggcaaacctccacccgcttgattaggcagttgacgatcattttctttgcctccaggctggcgctgtcatacatatccgcccaagaaatgatgtcgtcatattgagcctccagagagctcaggacagtttgcccttcctcataggcggcctgggccgcttcaaactgcttttggagctcggtgcacttggcctcggcttcggacaccatagagcccagcaggtctttggaaaaggcgctttccccgcgcagggccttgatgacctctgctttcagcatatctaattcaacggcagctttgacgtgctccgcccggacactttgaagcaaccgtttccgctcctccattttttcacggtaacgagtgttgacaatctcgcttttagggattgctttcatgcgctcaaaaatctgacgtaccatcttatcaatgatcccatccagaatatgggccgtgtagcccgtctgcccgtcacagtctgtctgtttgcgggttttaccatagcagatataccgcacccgcttgatcacccggcggggatcgtctttacaagggtatgccttcccgctggtggtgagagtgagccttgctccacaatggccgcaaaagacatttccagacaagagggactgcccgccaatgttgcggggaacagtgcgttccttttcggcagcgttggcccggtttgtgcggatgcgctgagcggcctcaaataactccggttcaataatctgtaaatgcgggagcaccttggaacggctctcaccgctgcggagtacgtctgtataggtcaggttacagatgataccccggatggtggcgtgatgccacatcttgccgctgcgggcccggtagccctggttatttaatgtaggtggcgatccgctgggctccgtagccctcgtgtacatacttatcaaagacaatgcggacgacagcggcctcggtttcgctgagggccagctcgtaaacctcgtgcttgcgcttgttcacccgcccgcttttcaaaaggtcatagccatagggggcgacgccacccttgaagcctccatcctccacaagctaccccagagcggttttggtacggatggaggttttttcgctttcgccgtccgcctgccagaagcggatgtagttggtgagcttgtcggtgtgattgtcaaaccgctgctcaccctcctgggtactccaaacccggacgccgttcttgacgaaccattccaccacaaagggcgtttcgtctgcgatccgcccgatgcggtcaaacatgaacaccagcagaatatcaaacttgccctgccgggcccgttccttgatgatttgtagcttgtcccggttttccgcccgtaccttatggccggaaacgccatcctcctgttcctcgtgaacaatcgtccagcccattttctcgcaaaaggcgtggcaggctttccactgcatgggaatgtcggcctggtttttatcgttgtgatccacctgcttatcggtagacacccggtataaacagtcaacgcgagtgccagttatcatttgattttccatgtataagccatcctttcaaatgtcatttaggcaggtgaaaagaggcttttcgtacgcaggatttttgaacttgtcaaggtgcatagggactacccccaccattattatccctctgttccgagggcttgacaaggatgactccgggccgggtggatgtggtctgcgccacaaaggacgagagcaaaatctgcttgacctgcccaatggccacggtgttttgtgactccgcaaaggtggcggatatttcaaacccatcaatggcaaaaacggcatttgactttggcatatacggcctcctctctcatggatggactgacacggacaaactccccgttgtcccgtggggaaacgaacagggccagcaccgttcctgatgctggccctgttccttgcctcacttctggacaaagtatccataggtctaaagatggggccgccgcactcattttcttggcctgtcgttagacagcaatactcggcgcgacggccccgcacaaaggggcggcggcccggacagtcaggcggccaacctgacccggcggatcgtggccgtgggatggcctgtcccacttgcggcgctggtgtcagacacccaccgctgagctccccgtgctatatcaggggccccggtgtccctttgttgagaggaacttcctctcatataccaccagaaaaagggggacaaatggagatggcagttagaaattttcctgcaaatattttttcatctgcttgataccgctctctaccgagtgccggacggcgcttttgtctacgccctcctcacgggcaatctgacggtagctctttcccaggatcaaatgagcgtccacgcggcggccctggagctccggcagggagttgagggcgttccacagccggaaaaacagctccttgcgatccataagctcctggggactgggctcgtgcaggcaagcggagtattcgatcccatcatcacaatccagggagtagaacgccttgttgtagcgtactcgttccgcatgggcggcctcacgccgcttgctggctatgagttcctcggccacttcatcggaaacctctatgtattcgtcgtgggtgtaccacgggtaaaagtctttcagattgatggtcgtcatttgtaattcctccgttcagatggttaggggatgaatggcaatctgaacgggggaaggtggagagcggcatcgaaactcaactcgtttctcttttcttgatatgaatcgcagtacactttgttttccgtaccgaacttctatgcaacattgaaattcacattcgacaactcagaaaaccaaagtggcctaggattcatcgaaacctcccttcaccaaacaaataaattgtaatacctaaaaaaggcgcactgtgatgaatttagtcagaaaagagtgtattgtaaaatatttttgaggtgaattataatgcaatcttattctaggcctttaggcgacgcagtaaagcgtgcgcgagctgaacttggtttcacacagaatcaagttgcagaagcggcagatattgatgtgcgtacagtactgaacatagagaactataaaggcaatcctaaaatggaagtgctcttccctcttgtgcgtgtgttgaaaatggactccagagagattttctatccagaaatgcgtcgtgaaagtccagcaattcgccggttgcgcttcttgatagaagaatgtagtggagaagaagcaacggctttagcacctgcgatagagtctattctgtctgtattgagatcaaaaacagctgctacggttggctaatcataaaaaagagagcttgcatcccttatattggggaagcaggctcttcatgcctaagtgtcaggctctttgtttactaccattttcagttgtacgacatctaccctgatttcctttttacatttagggcagtaaagggggaatttcacaaggacagtatctgcatatatttttgttcgtgtctttccaccacaaattgggcagcaaacccacagtgagccttgttgatcgttttttactggttctattccgtcgtgtctctgcgttaatcggcgggatctatcagacgaaatatacataccctcaaaaggttagttggcttcgatcgagatttgatgatttccgtatttcacatagtctacctgagacagatccaacggagcggcgaacacataatactccatgccttccatacccgcactctcactaatagctactgtggagccgtcctttaagacaacttccaagggaccgacatacggaacaatgcggttgttgttaggttctgtagcggagtaactgaaagtaaggctcaaaggagaaagagtcaggttctccagcgtactggtatatccatattcttcatccgtccaggtcaggccagccgtatccagcgagagtatctcggtatcattataaagggtaatgtcgaaggaaaactctccactcagaatttgagtatattccttttcgggagtctgaagccatagcccatgaagtgtaagctgcttggacacctcgtcattgaaacggacatcggttccggtttgagttccaatccagataacaccttctttcaaattatcctggggattttcatcagggagccaatcacatttgaggatgtaaccactatcggaataggcaccatcctcaaaggtaagctccaatgcttcaccaggcccaaaaagctggtagcatccatctgtcttgctatcataatcgggcagaatcacatcttccggtgccttgatctggaggcggagatagtaaacgttttcgtcggccagagctacaataggtgtaatggttgtgccgttgctggttacaccattctcaaaagtctttcccatctggtcaatgacctgaatctggccatccgaaagagagccattcttttcagcaaagaaattttgaagcagcgctcccgcaccgagtacatgaccaactgccaacgcagaaacagtaagtgtagaaatgattgctgcaaccgccaaaaaacgaagtggacggatgtgtttccgcggtttattcattgatactttattcatagttaactccttaatccgtgacgaggagtaaggagtagtaatgcccaaatccaaaccctccaccgggtatgaatccagcaaatcggaaatattacgcttcattaacaaatcccttcctcgtcagtatttcttttagttttgcgcgacctcttcttagcctggttttgatggttgattcattgattgccatgctaagggagatttcttgaatcgtttgagcgtagtaataatatcgtaaaaaaatctcttgatcttgttctggcaacgattggattgctttacgaacgagccgttgctcctcggcctgctcaacatcattcagcgggtcattggggccgggaatatcaagaaaatcatcttctagcggaagagtctttcccatcttccgtaacttgtttttggctttatttctcgcaacggcagcaagccacccttttacaaaacccggtttcaattcggatgattgctgccatgcagccagaaatacatctgatacgacctcctctccgtcctcctgggacatagcaccgcgaagaatattccataccacagtagaaacataaggtatgtaaatatccataagtgactctagcccagacggatcaccggtttgcattttatgcaatatggcatcttctctcataagaaaggctcctaactgtctttgaaagctgctttcgcttataatatcacaccattttgatgctaggtttcaaaaatttttgcttttgacggctactgaaatcggtagcagttttgggaatattcatcgatgaatttgagatattgttcacggctcgtaatttctaacggtagtccgttttccgtagtatgaaatgatacaatgtgatttttctcgtcgatccatactcgccatgattcgcacagctctttttctacttccattcggtatccctccatctacaacgcttgcttaggaaaactcttaataaaaataattattataacaaggatggaatttgttttatataacctcgcatcactaatatcacataaaaactgtgcgtagtttcaaaaattaaaaaaggaaatatgtggaatatagagagcgtgtggcattgcaattttggcaagcaattcgggtgtggccacactccgaaattttcacaggccgcagacccgtgaaaatgcttgttgtggagctccccaaacccgctgaacttctggacactttgtccagaagtcccggcgcaagcgcctgttgtcggcggcccggggctatcgctcctgggccttattttcacgcctatccgtatggccgagcagatggtcaatgttcgccttgaccgccacggcctgccgcatatccgcctgggccttgcggtattccgcataaagggcctttttcttttcggagagctcccggcgctgctttttcagcgtgtccattttggggagctttgccccgcccaaaagttcactcatggccgtctttgccgcccggtagtctgccagctccgcctcgtgctgggccagatattttctgctataccgggccgccttgtagccgtcaaacacaggccgcgtctttgcgtactgcaccaccgcgcccatgagctcggaggttttggcaagggtggcctccgtgtcccgcagctccccggccagtttgtgagcccgatccaccgccgcctcggtgctggatgccagcgccgcatagtccataagatcgtgttcccggagatacaggagcgcggcggccatctgctttatgttatagactttggcccaccgctcataagccgagcccttgccctgggccatgcgctcttgaatgtcgatgatcagattgacgcgccgggccggggccgggctgtcctggggcagctccgggatgggccgttccccggcaatcgccgcccggatgtcatcgggatcgaaaccggggcccagggtggatgcccgcaggcgggtgtacttatcctgtccaggggccaggaacgagatcgcgccgccccgcccatgcttcacttgaaagccggactcctccatgagccgcagaaacgccgggaagtaagtcggcgggcttttgctccagagccgccacgatccccagccgcacccgctgctgggccgagggtggcttttccccgatccattgtctatagtgaagaaaacggcccttgctatgctgcttcggattttgaatgatagacagctcgtgctcaatgcacacccggtcagagagccgccgcaccgcaaagctggagccgatgaagttatggaatttccgggaacagtcctgggcggtggagttgtaataaatgtgattgtgaatgtggctcttgtcaatgtgggtgcagacgaagaactgatacgtgccctttgtccagcgcatggctgtttcatagccgattttgtttgcctcctccggcgtgacctcgccgggcgggaacgcctgccggatctgaaaaaacagggccccgcgctccaccgcccggcccgtttccgcctggtactggcttttcagcagcagaaactcggcgggagcggatgcaggatcacagagataggcagacacggcccccagctttttcggattgagcccataggcaaaccgctcttccatcgtttggatggccgttttcccagccgctaccttatagggccggatgtaggttgtagcgataacctcaccttcttccaaaaagaaagcggcgactggagcacagccgccgcaaggaacttggggacaaatttccccaaaattcaaattgatattagaagtaaagctatccaccataatacttgtgactaaataataaatgaggatttatttttcttgagcacggtttgctctttgcttcttatagtaacaataatttatcggctctggaacaattactgcaataataactgaaagctctattggcatacctactcgaatacaaatgaatgcaattataggaatgaccgcatgtgtatagtaagcaattgcaccactcaatttcgcactcttctgggttaaatataatatgaccatcaatgaagtaaaatgagccacaatagttactggctcaaaaagttcattttctattctaccactaatcccataccataagggaattacagaaatagaaattatcaaatcctttatagaatcgagcacagactcttttatattattattggggttcttgaattttaatatcccagttgcccaaaatacagttactacaatctgatacttacttaattcaagactctctaaattaaatttgcccaacaaaactagtgaaataacaaaagatatatccaatagtttttctaatattttcatttttatcttctttcattggagtaaatttacaggttttatttttcttaatagcatagcacaggagcaaccgtttgtctattcattactattggtacaaagtgtttgaagtagtaaaaaaacggggaacagcgcagggccacttccggtaggtcagagccgcacgatggcggagagcttttccagaagatcggacaggggctgccacagcttttcatagtcccgttgcagagccgtgatctcctccaggtaaatgccgccgtaggtatttgcctggatcgccacctggtttaagttgttggagcaccgccgctggagcgacaccagctcctggacgggtgacaggtcaacatggagcacatagccattgagggccattttccgcatataggcccccatattgcggatgcccgcctcggccatgcgctcctggatcagcgccagctcctcctcggacaccatcacatgaagatggatggggcggcggcgtttctttgtcatcgctcctcccgttccaggctccggctggtgcggggcggctcctttaccttgtccatcaccttgccacgctccgggggcagcgcggggattggcgtaccgaatactccacaaaggcgcgttacttcctgatcggcaaaatcctgatcacgctttttgtccatagtaccttctttccgggatcgggtaacttctggacaaaatggtgtgcaccccgtcaagtggacagcgaaataatttacatttacgcatgaaaatccttcctgcacaccatatggtgctgggtactatgcagccagcagacggtcatggacttccataggggtccgcacgcccaggccgcgctggaggcggcggaagttgtaataggtgatgtactcctggatcatcttgaccaactgctcccggctggtgaaccgcctgccatagtagcgctcccgcttgaggatgccccagaagccctccatggggccgttgtcaatgcactttcccacccgggacatactctgtgtaatgccagctgcagccagcttgtcatggaagatctgagtggtataggcgctgccccggtcgctgtggagcagagggcgggcgccgggattgccctccaatgcctgagccagagtgcgatggaccaaggcagcgtcgttggtgtcccggatgacaaaggaaacgatgcgccggtcacacagatccaggatggcgctcaggtagagcttgcgtatgttggtgcccgtatagtagtgaaactccgtcacatcggtgagccacttttcgttggggcggtcggcgtaaaattggcggtccaacacattctccgccagctgtcggggggatgatgccgcccgagtgcagccatgtggggcatgttttaccacagactgaatcccaaggccacggcagatgcgcagtgtccgcttatcgttgaccggcgtatggtaatacttgtccaaatcgtcccgaatgcggcggtatcccttgtccgggctctcccggtggatctcctgcaccaactgggcgatgcgctgattctcggcgacgcggcccccggctttcccggagcgccaccggtaatagctggcccgggagatatgcagtgcacggcacgccgcgcctatggggaaaccttcctcttctgcgccgcggcgcaccgcctcgtactgccgctcctgacgaaactgcctcagcgatcccccctttccagctcttgcactttttttcgcagatacagttccattttcagcaattcattctccttcttcaaccgggcgttctcgatccgcagggcctcatcccggctccggggcgtttggtccgccaggcgcttgccacgccggtcctccaatcccgcgggacccaactcctgatactttttcacccagctccgcagcgtctgtacggctacttggtgtgcctgcgccacctcttggagcgtccggccgccctccagacaggccagcgccgcctccagccgttcctctatggtgtggtcgttcctcatgatagtccctcctctttctctcttggagtttctctcatgatacgcctttacccagtccaataccagattcccggagcgcaaatgatacttttccgcgatggccatagaactgccctgaccggacaggtactcctccgccacttggcgcttgaagtcctcgctgtacttccgtttggagcgattcccattctcctccaatgccgaaattccctccgagcgataccggctgatccaactctccatagtggtgtgccccactccggcccgacgcgccgcttcccgcattcgcaaccggcctgcaaggcattcctctaccagcgagactttttcctcgagcctaagctcttttcgtttccccatctatgctccctccttatattattttcttgtctgccttattgggagcataccaaaacgtccagaagtcccgcgctaaaatgttgacagcatcggggccaaacaggggcaggccgtagaaacacacggcccaccccaaaagcggccccggaaagccttgtaatcagcggggtttggggggcctaattgtcaacgccccaaccccgctttttccgcatatattcccgctgttggcggcggtgggctttctttgcacaggccgccgagcagtaagcctgccgccgatccggagcaacgggcccgccacagatagggcaaatcttaaaatccggcctgggcccctcggtcaagagggcggcctccagcgccagatcgaggggcagcacggcctcccgaaagtaacggcacagcgcccccgtccagcatttccccagcatatagcactcacagtccaggggcagacacccgtactcccggtcatagttggcacaccattttgtcaccagggtgcggatcgcccgtttttcctcgcgtgtcagttcacgggccaagccgtcacctcccgccagccggggcccgcataagctcccggtagcaggacacgcagccgatcccgcgccagtagggacacccggagcaccgggagcccctgggcggctttgccggggccggagcctgggggcggggcttctgctgcatcatcttttcataggggctgttggtaaacctcatttgtccgcctcctctccgtcatcgtcctcctcgtcccagggcgggccgtcatcgtcctcgtccccgtagccgtccggctcgtcatagtccgtgagctcgtcgccgtagtcctcctggggcgcggcggctttctgctgtttggggcgcagcaccttgaaatagaacgccgcaccgccgcccaccagggccacagccagcaccgccaggagcatccccgtgttgccgcccgtttccggcccggcctcctccggggcgggctcctcggtttccgtgggctccggctccggctcaacgcccacgtacttgctcatattgacggagcagacggcacaatccgtattgacggcccccgcctcgcatttttcagagcaggagcacaccgcttgctccacgccagcggcctccgccgcagccagcagatcagcctcatccacaacgctgaaaaagtaggtttcgtactgttcgccctcttcgtccacgggcttgtcatagtcaatgacgatatagaacgtattgccgccgctggtctggacggtaataaactgcttgttggtgtactcgtcatagagcaaatcgcgggtcacaaggttgccctcttcggaaaagccctcgccgggctcaatggtgggctccggggcaggagtttcctccgtcatggtgggatcgccgtagtccgagccctcgccgccgtccgcgtaggcatacgccgggatgctaaagccgcataaaagaacgacggcgcagagcgccgccgccatcacccgaaagcgtttcatcttcaattttcctcctttccgccgtcctcggacttctggacactttggtgtgcaccccgtcaagtggacagcgaaataatttacatttacgcatgaaaatccttcctgcacaccatatggtgctgggtactatgcagccagcagacggtcatggacttccataggggtccgcacgcccaggccgcgctggaggcggcggaagttgtaataggtgatgtactcctggatcatcttgaccaactgctcccggctggtgaaccgcctgccatagtagcgctcccgcttgaggatgccccagaagccctccatggggccgttgtcaatgcactttcccacccgggacatactctgtgtaatgccagctgcagccagcttgtcatggaagatctgagtggtataggcgctgccccggtcgctgtggagcagagggcgggcgccgggattgccctccaatgcctgagccagagtgcgatggaccaaggcagcgtcgttggtgtcccggatgacaaaggaaacgatgcgccggtcacacagatccaggatggcgctcaggtagagcttgcgtatgttggtgcccgtatagtagtgaaactccgtcacatcggtgagccacttttcgttggggcggtcggcgtaaaattggcggtccaacacattctccgccagctgtcggggggatgatgccgcccgagtgcagccatgtggggcatgttttaccacagactgaatcccaaggccacggcagatgcgcagtgtccgcttatcgttgaccggcgtatggtaatacttgtccaaatcgtcccgaatgcggcggtatcccttgtccgggctctcccggtggatctcctgcaccaactgggcgatgcgctgattctcggcgacgcggcccccggctttcccggagcgccaccggtaatagctggcccgggagatatgcagtgcacggcacgccgcgcctatggggaaaccttcctcttctgcgccgcggcgcaccgcctcgtactgccgctcctgacgaaactgcctcagcgatcccccctttccagctcttgcactttttttcgcagatacagttccattttcagcaattcattctccttcttcaaccgggcgttctcgatccgcagggcctcatcccggctccggggcgtttggtccgccaggcgcttgccacgccggtcctccaatcccgcgggacccaactcctgatactttttcacccagctccgcagcgtctgtacggctacttggtgtgcctgcgccacctcttggagcgtccggccgccctccagacaggccagcgccgcctccagccgttcctctatggtgtggtcgttcctcatgatagtccctcctctttctctcttggagtttctctcatgatacgcctttacccagtccaataccagattcccggagcgcaaatgatacttttccgcgatggccatagaactgccctgaccggacaggtactcctccgccacttggcgcttgaagtcctcgctgtacttccgtttggagcgattcccattctcctccaatgccgaaattccctccgagcgataccggctgatccaactctccatagtggtgtgccccactccggcccgacgcgccgcttcccgcattcgcaaccggcctgcaaggcattcctctaccagcgagactttttcctcgagcctaagctcttttcgtttccccatctatgctccctccttatattattttcttgtctgccttattgggagcataccactttgtccagaggtgccgccatcccggagccgctggagcaccaggggcagctcctccagggaaacgctcatgccccgcacgatgtccacaatctcctcgttttccgcctcccggtgcttttgctccagttctttcagccgggcctgctgttcgctgattttggccttgaccttatcaatctcggcctggattttttggcttttgcttgccgccatagataacctccttgtcagggtaaacgcccgtaggcgtagaaatgagattgccagtagcttgtattcaggtttgcatattggatgggatcgccacaatggatcatcatcccgtcccccacatagatgccacaatgggacacgcccgccgtgtcataggtgccgacaaagaacaccagatcgccggggcggggtgcgctggtgggggtacagatgttatagagcccctgggctcccaggcggcccacattccagccggagtgattgatcacccaggacacaaagccggagcagtcaaaggacgtggccggagagctgccgccccacacatagggatagcccaggtatttctccgcctcgcccaaaatggccgcaaaggtttcatcgtccagatattcctccggcacgtcatagtcagcgggcgggttcgtgatgtatttccccacataggctgactccgggaacagatcgggcctgttccccagggtggacatatagagagaataacgggccatctgttcctctcccatcatttccaggggcagatgggaaaggtttttgttttccagcgtgacatagcagatgtaccaggagtagggatcgccgtcgctgtcataccgggtttcccacaccacgcgctccgtcaggatatactggcggtcaaagagggtttccagggtgccctgcacctcgtccgccgtccattccccctcatggagcacgcagagggtagagatcagcacatagggatcgtgctcgatctcgtccaagtcaaaatgatattcgtcatagctgtgggtggcggtataggtgtccaggtagttttgcagctcggcctccatgctggaataggccgcctccgccgccaggatctccccgtcctccgaggggtaggtggtaacgcccacagcccccgcgccggaatttcccagcatcactagggaggaagaacaggactgcatcataaagagcaggagcacacaggtcagggccaacagcacccccacgggatgccgcttcacaaagcccgcgatcttcgccccggccttttccgtggcggcggcggtctttttggccgcgcttgccgctcccgtctttgccgcctcccgcgcccgcttttgatactgctttttcaagcggtgcttgcgccacatccgggaaacggggttgccggacatttccgggtgttcctgggcggtcatgcggaaatgatagtccgccgtggccttgacatatttggactcggcccgctggacagcctttgccggatgctgccggattttcttttgcacgaaccgcttgccatgccgcaggccggactcgcccaccagctcggagcggtgggccccctcgatccccacgttttcctgttcattctcataaatcttgccatgcacaaaaccgcgggcggccccgccagcggcccggcctatccgccgcaccgggccgggctttttgggcggtttctgttttgccagcttatcctttgcccgttccagcttttccccgcgctcctccatgcggagcttggacgcggcggcctgctcctgtttgcttttctgacggaacttcgtcgtcgcaaacttcgctttggcttcttcggcggcgctgccgccaaaatccgcccgctccgttgctcctcctctccccacaaagtctttcgactttgcggggcaccccatgttctggacactttgtccagaagtgccgctgtccgcagccccggcaccgcctggggagccgcccccagcggccccgccaggatcggcggcgctctcccaggagccggggcgctccctggcctcctgtttgggcttattcggttttcgcttcattcttcaaatcctccgggcgggtagtcagcaggttatagatttctccacgggggaaccgatccacaaaggggatggtcacatcgccatagaacagcaggccctcgccggaattggagtgggtgatataggagagctggtgctcggaaatgccgagctgtttcgccaaaatcgcccggtcactttgggcctgggacagcaggatcataaagtccgtgttgtccagaatagcctcgatctcccgactggccaaaaggtctttgacgttctgcgtcagggctgaagggacacagcctttctttctcagcatcttccacacggccacaaagtagctggcggtgagcgcgtcccggagcaggatatggaactcatcaaaatagcaccaggtagaaacgccgctgtgaaaattcacattgaccgccgaagttataaagtcgttggtaacgtgcatggcgatcttgcggaggttttctcccagcccttttagaacgatgcacacgatatgggacgtgagctttacgttggtctggtggttgaacaggttaagggagccggtgcagtagagctccagggcggttgccacacggcgggcctccggctccggctgcttcaaaagctcctcgtacaagtcctggagcaagggcggcttgccgtccccgatccccagggccatatcccggtagatcagccgcacacagcggtcaatcaccgtcttttcgatgggctgcaagccgtccttgccgcccaccaccagctcacacagagacaacaaaaaatccgctttcatggaaagcgggctttcgtcgtcgtccaggtcaagctggatgtccatagggttgatatggctgggagatccgggggcgatctccaccacctggccgcccagccgccgcaccagcggggcatattcgcccatcggatcgacaatgataatgcgatcctttggaatagtgagaaacacattgatgatctcacgctttgcggcaaagctcttgccggagcccgtggagccgagatagagcccgttggccgatttcagttttttgcggtcagccatgatgacgttgtgggaaagggcgttcatgccgtagtagagggacggcccggccatgcggagctccctggtcataaagggaatgaaaatcgccgtggagctggtggtcatgccccgctggatttccacctcgttatagcccagggccagagaggacacaaacgcctgctcctgctgccagtccagccgcttcaaggcacagttgtatttctgcgcgatgccgcccacggtaaacacatcgttttccaaccgctgccgggtgggggcgatattgatgaccgtgaacgtgagcaggaacattcgctcgttgcgggactgcagatcggccaggagctccgccgcgtccttgctgaatgtaatcaggtcagggggcaggatgtcgggatcgtacccggcccgcaccgccttgcgctgttcctccaccttcattttgccgatgtcggagagcttgcccttgatggttttaatggccttgagctgatccaccgtctgaatatggagcgtaaccgtcatttccgcatccagctccaggatctccgccaggagcttgtcagagagctcggacgccaaaatctgcaagtaggacgccgcgccccagtattggccgatgcggaacgtccgggactgccggaagtcgaagctgtccgcagcgatatagtcctttgtgccaagcccggttttggggatgtcctgccaggagaagcggaacggctcccggttgccggggtgcatctggccgtggagcagggccagccgcgcctgcccgtccatcgggacagagggaacgcccagccgtttgaggttgcctgtcacgtcggcctccacccgttccaggcgggggcgggcctccgcgatcccctcggcgggcaggccgaacgtgatgtattttgaccgctcgatgccgttgttgcttttggcgatctggctttttaacattcccgtgaactccgcccggatgctgtcatagtcatcctgtgccggggggatattgaccttgtacttgctccgggaacgggagcggcggttgacaaaggagagctggaacggcagggagctgtcaaagtaattgagaaacgagctccatccgctgaaaatcgcagtctgatcctcggtagaagccacggaataattgatgtcctcatattccacggtcttcgtgtagagcccatcggggagctggcacaccccgtccgggtgcatcaccagataaggaatcgtctgctgggcagacaacgcagctttccggttagcggcctttccggggccgcgctttgggctttttgctttttgcaatcgtatcctcctttctcacagcgccccgctgggtaaacggggcatagatattttccgtctggtagggcctcaccccaggccgcaggaaacgagcccgcaggatgttccgcaccaccttttcaaaggggagcccgtctttttcgtacatcgccagcaggaacgccgggagcgccaccgccatcatcaggaacatggctcccgtgttgccgacggcgctccgggccagcagataggacgggatgcccaccgccgccgcgatcccgaaacacacaagctggcgtttcgtcaggttaaaggcaagtttggtcttgattttggataagtcgttggggacatttacatagggaatttttaatcactcctttccggcccggccacctctggacactttgtccagaagtccgggatggtgctttccacctcgttcccccacacgtcccagccgggcggggactgccgggcgaacagctccaccctgggcacatcgcccatgagggccacgatcttatcacgggcctcctccggcttgcggctgtgctcctggatgggggaaatgataaactggtggacgtttgccgcctgccgtttcgggtgtccccgtgttgccagcaggcagacctccgcgttgccccgcgtccagaagcccaggccgtagaaccagccctcggacttacggtttttcttcaaccaaacgaaagcaacgctcttgtaggtgaagccccacgccttgatgagccgcagggcctccgggagctgcgggaacgtagcccacaaaaaaagcacgctgttcggggccgccagatctgtcaccgggagcgtgcataactcgtcaatccccattgtggggtagtgtttttccgccgccccctgcaagcccttttgagcataccgccaggggggatcggcgtagattacagaatactgtccgatagtcaaactcctttctccccggcctccaccgccgcgcccgccacgcggatgcgctcactggcggcggcatagtaggccgggacggtttcaaaacagaggaagcggcggcccgtgttgagggcggttaccgccgttgtgccggagcccgcgcagatgtccgccaccagttcgccgggccgggtataggtcttgataaaatactcacacagggccaccggcttctgcgtggggtggacggtgcgctggacggtggggaacgtgagcacattccccggaaagcgcaggccgtcctccgagccgcccgtggtacggacgaattttccatagtttgggctgtccccgttgtttgttaggccccgcttgtagggcttgccctgttcaaactgcggattgtagagggggagcttctggtagaataccaggatgttctccgtcttttttaacggagcccgcctcgcgttgaggaaacctgtgcatcggcttttgtaccacacccactcatagcggagcatggacaggttggatgcccccagcaccttgtcataggggcactgagcaaagaacaggatcgcgccgtccggcttgaccgcccatttcaccgcctcccacagctccgggagcggcaacggcacatcccaaaagttccgggtagtgccgtagggcggatcggttaagagcatatccacggaatgacggggcagggagcgcagtcccttgatgccatccatgaggaacagcccctccgagagctccggggacttctggacactttgtccagaggtgcccttatcggtcatccctggcctccttgccctttgccggggcgggccgggtggcgttttcacgggcggcctgcgcccgcccctcggctaactgctgggcaatcgtctttgcgtcatccctgccgcccagcaattcccgcttttgaaaaacggcctccgtttccgccatgaagcggtgaacgtcagcctgggtgaagtcctccggcgctttcccataccacaggcgcgtcccgtcgggcccatatcttctcggcatataacactcctttctcaatgcgcgctaaagatgctgcgcgctatcgtcccggttttgaacaacatgaagcagagcaaaaccgtatagcccacggtgccccagattgccccgatgggatctccacccgtggcaatcccctggatcagcaccgcatagattgcaacacacaccagaatgagcatcccctggaagcccacggcaaagagggagcgcagatagttctgcccgatctggcccacctcccggtgggagattgtcgccatagggatcggggccaaactggtgagcaaatagatttccagcatcctcccgtagaccaggacaaagatgacgatgcccagcgcccacatggttacgccgataatggaggactggagccacaagccgagaagcggccctagatccatcccctccagggtagtttccagctccgtgatcatatccggtgtgatgtccgtggagccctggatgagccctccggcctgggcaatcaccgtctgcgacacgtcaaagacggccatcacaatatcaaaggtattcgagagaatgaagatggcacaagccgttttgaacatccatttgtagatattcgccacgtcaaacccgtgcatattgttcttttccaaaagcatctgaatgagctcataggtggcaacaaaggtcagtaccagcccggcaatcggcaagatcaccgtttcggaaagctggcggatgagggaaaataccccggcgttccacgccgccggggtagtccccacctgtaccgcgatctctccgacttgggtattgacgtaatcaaagagcccctccaggttccccatgatcccgccaatcaacagctctttgagccagtctgtgagccagtcggtgagaaaatccataggccgttaccttagaacaggccgctcagcagagggatcagggtggtgcccagcaggatgatgccgccgcccgccatgagctgtttcatgccctggcttttggagccaggattgtctgagccgtaaccctccagcagattgacaacgccccacacgcccaaaccagcgccgagagcaacaacaagagtctgcaaagtatcaacagcagaagaaaagaactccatatagcctccatttctccgggttttccccggccatgaaaaaagccgcccgtttgggcggcaggttgcgacctctggacactttggtatgctcccaataaggcagacaagaaaataatataaggagggagcatagatggggaaacgaaaagagcttaggctcgaggaaaaagtctcgctggtagaggaatgccttgcaggccggttgcgaatgcgggaagcggcgcgtcgggccggagtggggcacaccactatggagagttggatcagccggtatcgctcggagggaatttcggcattggaggagaatgggaatcgctccaaacggaagtacagcgaggacttcaagcgccaagtggcggaggagtacctgtccggtcagggcagttctatggccatcgcggaaaagtatcatttgcgctccgggaatctggtattggactgggtaaaggcgtatcatgagagaaactccaagagagaaagaggagggactatcatgaggaacgaccacaccatagaggaacggctggaggcggcgctggcctgtctggagggcggccggacgctccaagaggtggcgcaggcacaccaagtagccgtacagacgctgcggagctgggtgaaaaagtatcaggagttgggtcccgcgggattggaggaccggcgtggcaagcgcctggcggaccaaacgccccggagccgggatgaggccctgcggatcgagaacgcccggttgaagaaggagaatgaattgctgaaaatggaactgtatctgcgaaaaaaagtgcaagagctggaaaggggggatcgctgaggcagtttcgtcaggagcggcagtacgaggcggtgcgccgcggcgcagaagaggaaggtttccccataggcgcggcgtgccgtgcactgcatatctcccgggccagctattaccggtggcgctccgggaaagccgggggccgcgtcgccgagaatcagcgcatcgcccagttggtgcaggagatccaccgggagagcccggacaagggataccgccgcattcgggacgatttggacaagtattaccatacgccggtcaacgataagcggacactgcgcatctgccgtggccttgggattcagtctgtggtaaaacatgccccacatggctgcactcgggcggcatcatccccccgacagctggcggagaatgtgttggaccgccaattttacgccgaccgccccaacgaaaagtggctcaccgatgtgacggagtttcactactatacgggcaccaacatacgcaagctctacctgagcgccatcctggatctgtgtgaccggcgcatcgtttcctttgtcatccgggacaccaacgacgctgccttggtccatcgcactctggctcaggcattggagggcaatcccggcgcccgccctctgctccacagcgaccggggcagcgcctataccactcagatcttccatgacaagctggctgcagctggcattacacagagtatgtcccgggtgggaaagtgcattgacaacggccccatggagggcttctggggcatcctcaagcgggagcgctactatggcaggcggttcaccagccgggagcagttggtcaagatgatccaggagtacatcacctattacaacttccgccgcctccagcgcggcctgggcgtgcggacccctatggaagtccatgaccgtctgctggctgcatagtacccagcaccatatggtgtgcaggaaggattttcatgcgtaaatgtaaattatttcgctgtccacttgacggggtgcacaccactttgtccagaagtgatttatacataggcatccggatcgtccacgtcgtcgtaattgagaatgtcctcgtcctcgcttacgggccccgcttcggatacgtctacctcgtacacctcacaagcctcggaaagcccaggccgcctgcggcggttgatgagcttatccaggtcaaaggcgtttttctttttatcggcctcagccgtgtacttgtagttcgggtgctgcttcaaatcgtatttgggcgagaagaacgggggcaagccccgcagctgcaaaatacacttatcgcccggcatggtagccagctcgctgggtgtcatcagctcccggcccagccgctggttattttgactgtagctttccgactgtccacgggagcggctgtcggtctgcatggagattgtggcctttcccagccagttttctgatatttccttgatggtgctggcctcacggcctcccaggaataccacgctgtccatatttccgagaattgtctccgcgtgtttatcgtaaatggccttgcactgcgccaactgctggtaaaagagcgtcagcgatacctcgcgggagcggattaccgcgcagattttttcgagctggggcacctgtcccgtgttcgccgcctcgtcccacagcacccgcacatgatggggcaggcggcccccgtgaacattgtccgcccgttcacacagaagattgaacatctgcgaaaaggccagggccacaatgaagttataagtcggggttgtgtcggaaatcgtgaagaaaaccgccgttttccgatccccgatgcggtcaagctccagctcgtcatagctcatgatctcccggagctgggggatgtcaaagggggccagccgggagccgcaggaaatcaaaatacttttcgcggtcttgccgctggccagcttatatttcttgtactgcttcacggcaaagcaatccggcttgcgcttttccaagcccttgaacatatagtccaccgcgttcatataggactcgtcatcctctttcacgtccatgccggaaatcatgtccaccagggtattgatgttccgatcctcggcaggagcttcaaagatgatataggtaatcaacgcacaataaaggagcgtttctgccttcgtccagaacggatcgccctccttgccctcgccctttgtatttgctatgagggtgtccacaaatttgaggatgtccgcctcattgtggatataggacagcggattgtagtgcatggattttgaaaagtcgatgctgttgaacaccttgaccttatatccccggcgttgcaggaaagctcccacctgggagagcaccccgccttttggatcgacgcacacataggagctgtgcgcctggagtagctggggcgtgagccagaagcgggttttgcccgacccggacgagccgatgatacaagagttgaggttgcgggcgttggccggatttttgggccgggtgttcatggtgagaaactccgtctttgtcaaaatgacgttgttctcaaacttcggatcgacaaagggcttgatgtctttttcggtgccccagcgggccgacccgtactcctcatcccgcctaaatttctttgcgttcttgcttttcatatagatcagcaggcggaagcccaccgcgcccacaatgccgatgagccagtcaaagggatgcagccccggcgcaaagtcggcaaaggccgggccgatagtctgccccagccccatgagcttatgggcgaaatccgcgccagcggccagacggtaagccgtccccagctttaagcaggcccacagaataaacaggtacgggatgttgggtatcacatatttcttgatgctatctgtcctcatgcaccgcctcccttgcacgttctttcttgtgggacggctggcgggccagttcagcggcggcccgtttgagctgttcccggatcgggacgcgccgggacttggaacgcttcatcacgcgccgggaatattccgaaaaacaagcggtgatggcatcggcctgcccgcttttgaaaaacagcaggtacttgtccggcccggtcttataaaaggcatagtccacattccagcggcgggccacccggtcaaagtcctttggggactccacctcgatgctgttcgtggcggccccgtggcccatgagctggcgcaccgtctgtttgccgtggggtgtctggcgggcccggtgcgctttcttgattttccggcccaccgccagacacgcctgggccagcacccgacctgtgagctttgtcgccttgatcgaaactgctatggtacgtctggaaacgtcctcgtcaatcagccgtatccctcctttccatgaaaaaagcacctctggacaaaacgtccagaagtgccgttatcgttcctcgtgttcctttgcggcaatcttccgatagccctccagggaggaaccgtcaataatttctttgtaggccgccatctgctcccgcaccgtgagctgcggaaaggcaaagactttgtgctcggcgggaatatcctcgatcccgtgatagtgctcgatgaattgaccaccgttgttcagcacatagcctccaggggcaaagtggccatcctcttcaagccgaatatcccgcccgtatgcctcatagtcaaaataattcagcaggtgctccggcacgtcaatggcctccatgtcctccacatagatgcggcccagggtttcatcgtcctcgacaccaggataaaactcgtagcaatccaggttttgcgccagattgatgagatcggccacgctggacgtatattcaccgctgtcaatgacggcctcaaatttctccagatcgccctgatccagctcggagagtagacaggccaggtggttgagctcgtccagattttcatattccgtcaggtagtcataaagccccagcacatcaccgtcaaaactggttataaaaaactcctcatagcgcaccccatccacgccgatgcgtttcagcagcccttgcacctcctccgtggtggtggggaatttcagcgcttctccaaccagctcgccctcgttgtattttcccaggttcgtgatgtaggcttcaaacagggacgccatatcagcggcggccctggcccttgacggtcaggatgccctcaagggtggtggcggtgatccccagccgctgggccacggcaatatcatttttcatggactcggtgatcgtatggccgcacaccaccagcacacgggaacgccggagcaggtcacggcccatgtcaatgccgttcttgtgctcctccggcaccgcatcattgaggaacagcggcagatagagcatggggcagatgggggaatagcccgcatcatagaccacgcggcagtaatgcgccgcctgctccatgtccaccgcaggatcgccgcgccatgcggcggtaatataagcaagggatcgtttcatcttcaacacccccgatatttataataggtagttcgaccctatccccccgccccttccctatccagggaaagggggcggctctggaggatatacccccgccgcgccgctggaaatagcacggccggggcagaccgtcaagggcaggccgccgcaaagcggcggtgcgctgcacccttgacggcccactcccggctgtgcaggaaaacagacggcgacgggggatatatcaccacagagcccatcccaggcgcggggcgcttacctctggacaaagtgtccagaagcggggccgggttacttctccaaatcctttttttgtccggcttcgccagttcgggcggctgtttctctttccactcgtccagcaaagtcataatctgttctttcattttggcaggagtgacctccttgccgaaatacttagacagttcagcagtcgaaataatcacaccgcgatcctcctttttttcttcactcaaaataccgtcgatcacatcgccgttgagcttgccctccttgtccagctcgtggagccgctttgcctgggccaccgagggggaggaaacctcaccatcaatggaaacggcaatcagccgctggttttccggcctgatatacgagatctccaccgcaggcataaagcccatctgctttgtgtccaccttgtccagaagctccggcaccagggaattgagccggatataccgcatgacctttttatagttcatgtcgtgctccttacccacaatctccaccgagagcttacccagggcctcggcctctttctccgttttcgggcgggccccctggcgtttgatggcctccacctccaaatccaggagctttgccagctcgctggggaggggatcaccgcgctgtttgttgctgttccgcatttcccggacggcttcaagatcagtcatctcccggacaatacagggcatttcctccagcccggcccgcgcaccaccatgatggcggcggtggcccgcgataatctcatagcccttgccgtccttttccgggcggacggtggcgggggtcataatgccgtgttccttgatcgtccccaccaaatcgtccatcgccttatcgtcctgcaccttgtaggggtgttcccggaacgtgtggaacgggtggagctccgacatcttcaaatagacgatttttccctcttccaccgggcggggcgggacttctggcgtgggcggcagcttgatttccggcggcgggactgccgcctccttgacgggagcggccttgcccggctttaccgtcttagcggatttagacgcaggcgcactgccggagcccgtttccttgcccttgtcggctttcttacctctggacactttggtgtgcaccccgtcaagtggacagcgaaataatttacatttacgcatgaaaatccttcctgcacaccatatggtgctgggtactatgcagccagcagacggtcatggacttccataggggtccgcacgcccaggccgcgctggaggcggcggaagttgtaataggtgatgtactcctggatcatcttgaccaactgctcccggctggtgaaccgcctgccatagtagcgctcccgcttgaggatgccccagaagccctccatggggccgttgtcaatgcactttcccacccgggacatactctgtgtaatgccagctgcagccagcttgtcatggaagatctgagtggtataggcgctgccccggtcgctgtggagcagagggcgggcgccgggattgccctccaatgcctgagccagagtgcgatggaccaaggcagcgtcgttggtgtcccggatgacaaaggaaacgatgcgccggtcacacagatccaggatggcgctcaggtagagcttgcgtatgttggtgcccgtatagtagtgaaactccgtcacatcggtgagccacttttcgttggggcggtcggcgtaaaattggcggtccaacacattctccgccagctgtcggggggatgatgccgcccgagtgcagccatgtggggcatgttttaccacagactgaatcccaaggccacggcagatgcgcagtgtccgcttatcgttgaccggcgtatggtaatacttgtccaaatcgtcccgaatgcggcggtatcccttgtccgggctctcccggtggatctcctgcaccaactgggcgatgcgctgattctcggcgacgcggcccccggctttcccggagcgccaccggtaatagctggcccgggagatatgcagtgcacggcacgccgcgcctatggggaaaccttcctcttctgcgccgcggcgcaccgcctcgtactgccgctcctgacgaaactgcctcagcgatcccccctttccagctcttgcactttttttcgcagatacagttccattttcagcaattcattctccttcttcaaccgggcgttctcgatccgcagggcctcatcccggctccggggcgtttggtccgccaggcgcttgccacgccggtcctccaatcccgcgggacccaactcctgatactttttcacccagctccgcagcgtctgtacggctacttggtgtgcctgcgccacctcttggagcgtccggccgccctccagacaggccagcgccgcctccagccgttcctctatggtgtggtcgttcctcatgatagtccctcctctttctctcttggagtttctctcatgatacgcctttacccagtccaataccagattcccggagcgcaaatgatacttttccgcgatggccatagaactgccctgaccggacaggtactcctccgccacttggcgcttgaagtcctcgctgtacttccgtttggagcgattcccattctcctccaatgccgaaattccctccgagcgataccggctgatccaactctccatagtggtgtgccccactccggcccgacgcgccgcttcccgcattcgcaaccggcctgcaaggcattcctctaccagcgagactttttcctcgagcctaagctcttttcgtttccccatctatgctccctccttatattattttcttgtctgccttattgggagcataccactttgtcccgaacagagggcggagcctcctcacgggccgccttgtcaaccttagacgggcggcctgtgcggggctccgccgctttctcctttttccccgcagacaccgcagcctgctctttcgggggacggccccggcgctttttcggcttatccgcctccggcgcttttccctccgcagcatgggcaggtacgtcctttttgccattgtcggcaaactggagctctgacagattgatcacctttccagccggagccggtgtatcttcgcccatgccggaaatcaccgcctgttcatgctccggcggagcgtccgaccccaggagagcggcaacatccgggggggtattttcctgtgggttcgtgtttagtttgtcatctgccatgtactaacctccttcgtgatggcatgaaaaaagccagcccaacggctggcctgtgagagagtatcactcctttctgatatgaatatatgaaaacgctgcttcttgtcccaagtggcagtgcttcttactatctgttatgacaaaactattgtaagaaatcttcggttttgatataattttactattcgaggggttattaacgatttggggtgagactatggaatatgaaatgcgaattttgaaaccatccgatattcgtaaggatatagttgcattttttagaagcgagagcttagtgcctattgttggagcgggattgtcatgtaatgttccaacgcttcgtggaaaagttccttctggtacaacatataaagagcatatgttgcaggctctattaaaaaactcacaattcacaccagaggagcatgatcaacttaaaagtgagaaattctcgactctgtgtgattactatgaagatgatgaaaatgtgtctgctgaagaacgcctttcttatttaaaagagaattttttcaatgcaaaatttgatgcaatggatatgcgaaggaagttctttgaaatacaatggccatatatttactccttaaatatcgatgatgcaatagagaactcaagccaatataataccattatcttgcctaaccgagagtttagagatgatctttttaccgaggaacgatgcttgatcaagttgcatggagatataagagaaattgtttcatataagcagagtgataaaattttcacatcaaaagaatacgcattgagcctaaacaaaaatacaccgttacttaataagctcaaaaatgattatgcaaatcaaaacattctttttgtcggttgtagtcttgatgatgaagtagatttaaaaaccctaaaagatgcgtcggtggattttcagcttaaagatacactaagcaaaactattatatttacaaaaggagttcctggaaaactacaaaaatctaaattcaaaacatatggaattactgatgtagtttgttttgaaacatttgattctatttacaagttcttatacgaagtatgggaagaatcaactagcataccaaatgacgaactatcgaattattgcaatgttgctatgagaacattgaaagtttctgataaagagaaaaatcaaaactatttcttttgggggaaaagtttatttgaccctggcaaaagcgaactgtgttacccttattattttatttctcgagatgtaaccgcagatattgttaaaaatatttctaagaacaaattgcatcttgtgtatggaaaccgaatctcagggaaatcttacttgctcgccgatctatgtcgcacaattcgtgatcgagaagtttacttatttgatggaagatctagaatttctgatgattcgttaaactacttgctggggcacacagattcagttgcgctttttgatgttggctcaattcgtcgggaacagtttgagaaaatactactaagtgcgcgagatataaataaaaaccgaaataatttcattatatgcgtaaatataaatgacagcgattcccttggtataattaagtggaaacttaggctggatactcaactttcagattacatcaaaaaatatactataaaaaacaaattgtctactgacaatgaaatcccagctatcaatgagctattgccggcaatcaatcttcctacatataacaataaacgcacgctgttggatcagttagtatatgtagaaaaaatacttaaaaaaagaggacagtattctaacatcaaaattaaaattgataatgaaaagcagctggcgttactcattatgttagcagtcaaagagcatctgtactcttctgatgttgttaactttgctttagatgaagaaatttctgtttctgtaaaacggtatgcaccgtttattgaaagatcagaaacagcactctttgagaaagatccatcggatttatccaggataaagtattctttaaattctaaatattggctgcaaagagaattgggcacatatgcgagggtggagggatgtaaagaaagtgttgcaggtgcctataggtatattattcaaaaaattctagatttctctggcagtaatctttttctgcgccgtcgtctaagccgaaactttataatgtttgatgtaatgaatggcacatttttggatgaacacggtggaaatttgagtattatagtatatatctatacaaaactgcacgaatatttggctactgattatcattttttgcaccaagaagcgaaatgctatatgtactattcttatagcttagatgatacagagtccaaaaagaaatatttgaatgatgccaaacaacttgcattggtttctaaatctatgattgaaaatcaaaatgaaacatcaccaaatgagcgcctaatgatttcaattgctcatgtacagtatacaattgctactattttaagtgatctttctagaatcaatgagtttactgatgaagtcctactgaaagaaagcatagacgctgtatatgaagcgcttaagtctccttataatgacgatgattatctacgtgaacgtaaacagcgtgcatctaggggtgtcgtgaatttcctgaaatatttcactacgaataccggaagaatgaaagagtatccggattatcatcaaaaggtaagtgatctagtaaatatttatctgaccgggaaacaacttaaaagtcgtagctaggttagtgtagagacaaatagcatagacaaggaattagaatgcccatataaggtcaagattctctgcgtaccaaaagcactctccccacctcttttagagggttcgctacacgcttgtatggggagagcgcttgaatggcattcaagaggtcagcggttcgatcccgcttatctccaccaagagacttgcttttataaggcaagtctcttttttgctaaaaagggaggcgttcgtgtatacgcctcccttttggtgaaattattttctatgtatagggttctggaacagagtctcacttcgttgcaaagcagttcataaaaaattctgtaaatgccgccagttccttctcctgagacacatagacatacaatgtttcgtcctccaaccagtcataggcgtggatgccaatatagtttttcttatcaggatagataatgaatgcgtcagtgggatatttatttcgatatgccttcaaaatttcggagcggcggtaatagaccggctcgccgcagccggaaagatccgggaccgtaggaacgactacaattgtctgactgtcctcattccaaccgaccagcagattcccaatctttgttttactcccgtggacgaacccatagttgaaccggcttacatcctcggtatagccaaatatcaacctgtaatcctccccgccccctactgcttggtgaaacagcgcacgcattttctttgcatttgcatcgctcttttccatatcaatttccggtcccttgaacagtttgctaaaaaaccccattgcatactcctcctaaacatatatcatataaagaacactcaaataaggattaaatttataatttatctttatctatagcagacttaaatccgcccgaatttgacatcgtacttcaatattcggacggattttccaattccatcagtcctgctctttcaatatctccaaggcatctgcgatcgcgttgatctgaaactccaccgtttcatcggcggcctccggcacaaacagcggaagcgtgtccgggatcgccctgcgtatgaccattaccgtgaggctcagattggtaaacaggctgatatttgcccgattcgccctgattccaaaactctccagtatggttccaaacaggcgggcctgcttttcgcggaacatctgataactctctttggacaggcgcttaaaaatgagctgctgctcctcgatggtcagaaccgcgatcccattcttctcgccatagcagcaggcatggaggaattgcctcaccccatcacgccagctcagagcaggatctgccatcagctttcgcgcatatgccacaattttgggctgctggaggtacagcgtctccacgatcagatcctccttggtcgggaaaaaggagtagaaaaacgtgcgtgatatcccaacccttctgtatatctgctcaacggttgtatgctgaatcccctgctttgtcatcagatcgagtgccacccgaaccaatgccacccggatacgctcccgttcctcctccgaataagcgaccctaggcatcccgtccacccccaataaagacaaattaaatagtttatttttattttaacacactgggagtccgttctcaagagtcttttgggcctttgtccgttcggtcgggccactttccacagcaaatccccttttctgttgcaattacaacatacattcccccgcgcctccgctatacttgcggacagttccaatacttccgcccgtacaaggaggactttacatgttttgttatcagtgtcaggaaaccgccggctgcaccggctgcacccgggcgggcgtctgcggcaagagtgcccgcaccgccgcgctccaggatttgctcatctatgtgacccgcggtctctgccaactcacaaccgccctgcggaaccagggcgaggccatcatcccggaggacgaccggctggtgaccgaaaacctgtttgtaaccatcaccaacgccaactttgatgatgacgcacttcaggcccgcatccgcgccactctggagcggaatgccgccctgcgctcccggctggacggggcggggctgtccgccgccgcgcgctgggacggctccggtgactgggacgacaaggcccaggccgttggcattttgtccactgccgacgaggacatccgctctctgcgggagcttatcacctacgggctcaagggcatggccgcctacaatcaccacgtcaacgcctacggcaagtccgcccccggcgtggacgcctttctccaggcggccctggccaagaccctggacgactccctcaccgcggaggagctgaccgccctcgccctggagaccggcaagtacggtgtggacgtgatggccgccctggacgaggccaacaccagcgcctacggccacccggaggtgacccgggtgaacctgggcgtgcgggataaccccgccattctggtctccggccacgacctccacgacctggagcagcttctggagcagactgtggggaccggcgtggacgtttacacccatggcgagatgctacccgcccactactaccccgcctttcagaagtatcccaactttgtgggcaactacggcaacgcctggtggcagcagaaggaggagttcgaggccttccgcggccccatcctgctgaccaccaactgtctggtgcccccgaaggacagctacaagaaccggctctataccaccggggcagtgggctttcccggctgcccccacatcggggccgaccgccagggacacaaggatttttctgccctgatcgcccatgcaaggcgctgcccctcccccattgagctggagcggggcaccctggtgggcggctttgcccacaaccaggtgctggccctggccaaccaggtggtggaagccgtcaagagcggtgccatccgcaagttcgtggtcatggctggctgcgacggccgggccaagagccgcgattactacaccgagttcgccaaggccctgccccgcgacacggtaatcctcaccgccggatgcgccaagtacaagtataataagctggagctgggcgacatcaacggcatcccccgggttctggacgcgggccagtgcaacgactcctactccctggctgtcatcgccctcaagctccaggagatcttcggcctggacgacatcaatgacctgcccatcgtctataacatcgcctggtatgagcagaaggcggtgattgtcctgctagccctgctccacctgggcgtgaaaaacatccacctgggccccaccctgcctgcctttctctcccccaacgtggccaaggtgctgacggataccttcggcatcgccggcatcggcacggtggaggaggatctgaaccgctttttcggctgatctccctcctgcggcggataccttctcggtatccgccgtccttttgcttgacaatatcgctcttcgatattacaatatccacaagcgatatcgaagttcgatatcaggaggtgagacgatgggccgcaaaactctggagaccctgacagagtccatgttctatgttctgatggccctgctgcggcaggcgcggtgcggcacggagatcgccgaatatatctccgcagtcacccaaagccgggtgcggctggggccgggcaccctctacaccatcctggccaaatttgaggaggtggggctgatccgggagaccgccgtagagggccgcaaacgcacctatgccttgacggacgccgggctggagcgctacgaagaagagcttgtccgcctgcggagctgtctggcggacgcggaggaggagaggagggcgatggactatgaaaccgaggacggtgcgcagactgtgcctggttgacgggatggacctggatcacatcgagggctggctggagtccatggccgcccggggcctacactacgaccacagtgacgccttcctctttcacttccggcggggggaaccggcggcggtacgctaccggctggaaccccgtggtaccctggactgcccggagggtatggagcactgccgcaccctgggatgggagctgaccggatacatgggcaaaggcttttccctgttcagaacctgggaaccagacgccccggagctgcacaccgacccggtggtacgggggtacgggctggacaagctggcaaggctggttcggtggttcgccacccccatgctaatctgcgccctggtcattcttgccctccccctatggctccttttggcctgggatgagccggtactgtccctggtcaccggaagcggggacaacctttttctctgtatcctgtccgagtggatcgccatttatatgtccttccgctccttctcctccttcttcgcccttcggcggcggctgcgggccggaaaggaaccccggcgctccggctggcggtgttccgcccgcatcaacgccgcctgtctggccggctcctttatcttggtggccctcagctttgccgtcctggcagccgggcgtggcatgcgctgggagggggagactgcgaccgtgaaccgccccttccccgacttcgccctggaggagctggaggggcggcccaggcttgaggccgccccctccgtctggtcggtggagcggcggggggtggacttggacaactatgtccgcttcgactggtctgtcctggccccggaacagtatgaggtggaacggaacatggcggacggagactacgagaccagtttccggctggattggtaccgtctctccctccccgccctagcggagccttttgcacgggatctcttttcccggcacaccttctatgccgaaatcccggagcggtacaccgtcgcgcccctggacgtgccggacaccgacgcagttctgatcaccgaggagggcggcttcggacaggacgtccttctgtgccgggggactgtggtgttctatctgcgctactatggggatcaagatctgtccgcccaccccgagctgctggccgagctggcccaatttgacgggaggtgagtccatggcgcaccataacaccgtccggcggtatccgccggtggactactatgatgtggtggcggtggatcgctggctggagcggatggccctcaacctccacgacggcccctatgcggcctgtctgctctacgacgggtcgggagaactgggccgcttttccgcccgctccgcccggtggtctcttggggattagaacatgtgtttgacttctctcgtcccttcccttataatggagctgcaaggaggcggacggtatggaccgggtgattctgcactgtgatctgaacagcttttacgcctcggtggaactgctggaccacccggagctccgggacagaccggtggcggtgtgcggcgatccaaattcccgccacgggatcatcctggccaagaacgagcccgccaagcggtacaaggtgcagaccgccgagaccatctggcaggcccggcgcaagtgcccggagctggtgctcctccccgcccaccactggaagtaccgggactactccaggcgggtcaacgcggtgtacgagcggtacaccgacctggtggagcccttctccatcgacgagagctggctggatataaccggctccctccacctcttcggcggagacgccaaggccctggccgacgagatccgccgggtgctgcgggaggagctgggcctgacggtctcggtgggggtatccttcaacaagatcttcgccaagatgggcagcgactacaaaaagccggacgccaccacggtgatttcccgggagaactaccaggagctgctctggcccctgcccatcacctccctgctctttgtggggcggtcggccgccgccgcgctggagcactacggcgtgcacaccatcggggatctggcccgcctcgaccgggaagccgctgcctccatcctgggcaggcagggctgcaccctccacgactacgctactggggcggagcattcccccgtggtgcccgcccgggagcaggccggccccaaatcggtgggcaacggcctcacgttcccccgcaatctggtgggctgggcggagctccacgccggagtcaccgagctggccgacgaggtggctgtccgcctgcggggccacggcctcaagtgcaccaccctccaggtaaccatccgtgaccccaatttcaaggacatctgccgccaaaagcggctgagcgcccccacctatgtggcccgtgagctgtcggaggcggctatggagctcatccgcgccgcctggagggagaacgcccccgtgcgcgccctcaccctcaccgcccaggccctggtggaagagggcgaggcgggcgaacagctcgatctgttcgccgccggcgccgccccccgccgggacaagctggagaagctggaaaaggccatggacggcatacgggacaaattcggccgggatgccatcgctccggcctccaccgtccaccgggacagggccgaagtcaaagcggagcagcgcctgcccccggtggactgaatatctggatgccgcccggcagaggaggattcatcatgatcaaggccatcttttttgatgtggacggaaccctgctctcccaccgaaccggccggatttctccgcacacaagggcttgtattcgctcgctgcgtgccggtggaaccctggtgtttctgtccaccggcaggcacattctggagctgcggagcctcccggtgggggagatggcatttgatggctatatcaccctgaacggtcagctctgcctggacagcagccaacggcagctctccggtactccgctgccgccgcaagccgtgcaggcgctggcagacctattctgtgcggatggcccgcccctcgccctggtggaggaggaacgcatctacattaaccgcgtcaccgacgccgtccggcaggcgcaggcggaaatctccacccctgtcccggaggtcgccccctataccggccgaccggtctatcaggccacggccttttgctccagaaaagaggaaccccttctgagggctctgctccccacgggctgcaagctggcgagatggagtgagggcggcgtagacatcatcccagaggccggaggaaaggcggctggcatgcggcgctttctcacgcgcttcggtctctcgcggctggaatgcatggcgtttggcgatgcggaaaacgacctcgacatgctggcttacgcgggaattggagttgccatgggcaacgcctcggaagcggtaaagcatgccgcagattatgtcacggcaagtgtggacgaaaaagggattgaacaggcgctgcgccattttcggctcatctgaaaaagcgccgggactgccgatacctctttaatggttcaaagccaggttcaaatgtaaaataagtcttgtctaaaagtcctcctgctgtcatgaaaccggaaatttaaacagccagagccagcggccctttttggcgcgtcagctctgactgtttcctctttcctatggttcttatgaatgcgctgaatcgctcttgtctctgttgcccttttgctgggataccctttcacggacgtattttttgagcttccgccccgccacaggccacaccagggccaaggccagaacaaccaagctgagccactgagacgtggagaggggcccgtacatcccccgggccggatccccccgaaaccactccaacacaaaccgcaccggggcatagcagaacacataggcccggagcatctgccccggcccggcggcccgcccggcataccagagcagaaaggcgaaaatcaccagctccgcccccgcctcccaaagctgcaccggcagaagaggcacgccgttgggcccggcaatggcgtgagtgaatgctatgccccaggggggcggagccgcccgtccatagcaacagccggcgcagaaacagcctacccgccccacggcgtgcaccagaggcagggcgggcaccagcaccgggaagaagtcggacaggcggagccttaaatatttggccgccccccaggccgccgccacaccgccgaaaaagccgccgtaaaacaccatgccgccggagagatagcgggcatagaactcccctggctcctcccagagcaggggcagctccacagccagccggggcaggagggggagcaggtagagtagcttggcccccaccagggcccccactgcccccaaaatatacaggtaggcgcagtcgtcccgggacagtccgaagcgcttgcagcgcagcagagcagccagcaggccgaagcccagtccggccatccccagcacgccataggtgggcatcaaccgcccaaagagagacagatatgggagcatgatcgcatctttcctccaaaaaatgcggcagccacaccggctgccgcatttcgtttccccttcttagtacagagaggcgcccagaatacccaaaccagccgtacaggcaatgcaggccaccagggtaatgccgcccagaactaccgacaggacagagagcacaaagccggccgtccgcaagctgtcgttatagcccatgctcttggagcgcgaggacacaacaaggccggcgataccaagaatcatgccgaaaataccgttgacgaacagggcgaccaccaggcccacaatacccagaatcagggagatcagagcctcattttttccagggatattaccttcattcatcgtgccgttctcctttcctccacacaccgctctcctgcgcccggcctgccgggcgcaaaagcgggatatcccgcttttcgacgtgtttcgttctctctcctattctaacttccgcgctgtggatctgtcaagcacatctttcagagatggaaccttctgcgcgcctcctcccggagggcggggacgcggcgaataatgatgagcggaatcaccattccgatgcagatggtgagcaccaccagggaccaggacgggctccacagttggtgcagccagcggtccacaaaaaactccattccgaacacaaagactccaatgctgccgatcagaatcgtcagcgtagtgagggccgaccggcggtagacccgcagcaccagccccagcaggagaaggatcgccccgccccacaggatgatgggggctgccagccccaggtaccagtcccccccattgagatccaccgagatcagatagacgtacagggccaccgccgcgatgtccagcaacagccgcagcagcaggtgcatcccccgggccagcagcggcggcaccagccacagccacagcatggccgccgcgccgatgacgtacagcgaccaggtcctgtccgcccgcagaaacagattgagtacgccgcagcacaccgccaccgaggcgagcatggcggtaatgagcagcgccacctcctgtttggccgccggcgccacctccccccgtcgggtgggaaagggcttgggggagacggtatccaccggttggccggggtccagaacccgcgtatggcacagagggcagaaggacgccgtggcgtccagctccacgccgcaatgaacacagtaagacatatgtgggcctcctttggcttattccgtccggttgctctccaccttcaccggaatgccctcccgcaccagaaagcggaaaaaatcccgctcggtatcgctctccttttgggtacccgcgaaggtgatctccatgatatccccatagctcatggaggcacagtggggccggggcgtggtggcctggcccagaatcacctccatatggtgtatgtgcggagccatctcctccggcacggggaaggggcctgggttggtataggtgcccgagtaaggcagtacacccgccagcttgtagcccagggacataaccggattcttcagcacgatggggacgagctgcagcagcgggtttgtggtgaatttcacattcccggcgatggccgcctgcatctgttggcggttgatgttcagccggagatagtggtgcacctgagagagcacctcttcaaaggtatactcccccagagaggggtcgatggagggccgcaccgtcaaaatgaagttgcgcagggtttccgagggaaaccagccccgcaggttgataggtatggccagcgccaccggcctctcccgccgggggcgctcccggtgctgcttgtcggcgatcaccttcagcaggacggcagtcaggtactccgtgatggacaccccgtagcccctggccttctccttcagccgggccaccgagcaaaagcccatggtgacgttgaaggtatagaaaggctctgccgtaccgttgttctggtaggcctttttcccccgcttctcccgccggggacgcacggtggcgtagcggccgtaggcgtcctcccgttccgcccgccggggctcctccgccacgtccagaatgccgtgggtgtttgggatggaataccccagctcccgcaggtagaccgccagcaaagtcttgaaaaataccagcgccccgccgccgtcactgacggcgtggaacacctccacggagatgcgcttctcataatagtaaaagcgtaccagccagccgttgtcctcccggaagcgcaccggctggcaggggttggagatatcctccttcacaaagggcccgggggcgctgtttggctcgaagtagtaccagaaagcccccttcttgatgcgcaccccgaaggacgggaaccgtggcatggttttgtccacggcccgctgcaaggcatcccggtccacccgctccgccatcacggcagagaagcggtagatggccgaatatttctccttctggagggcggaatagagcacacccgcattgtccaggggataccactccggcttttcgccccgcttgtccctcggcatactccgccccccttccggtcaacataatctaggcctatcataccacgttccatcctccgcggcaaggggaatacgggcgatccaccctttcttttccggcagccctgtggtataatcagaacagttgacaaggaggacttccactatggaacaggaccgtatccacatcaagctggcccgccgcacaccggaagagcgccaggccgacgagacccgccgcctggaccccttcatgcgcgccctcaaggccattcacaccgccgccacgccggagaccatgaatgtggaggatctggagaagcagcgcaaggggcaggagctgctgggccgtttggtggcccccatggcgggcatgagctgggagccctttgagctggacggcatgaactgcgcctgggtgcgtccccaccggggccacgaccgccgccgggccatcctctactgccacgggggcggctataccagcggcaacctgggctattcccgtattctggcctccaagctggccaacgtcaccggctggcaggtgctctccttcgagtaccgcctcgccccggagcacccctatcccgccgcggtggaggacgccgtgaaggcctgggactacctgatgtaccagggctacggcgcccgggacgtggtggtggccggcgactccgccggcggaaacctggccctggtgctcacccacctgctcaaagaggccggacggcggctgccccgggccctcattctcctctccccgtggacagatatgaccgccagcggcaagtcctaccaggagcgggccgccatcgacccggtgctcacggtcaactatattcacgccgttcgggacgcctacgcccgggaccaggactggtccgacttccggctctcccccctgttcggcgatttgaaggactttccccccaccctcatccaggcgggaagcagcgagctgctgctttccgactctatccgcctgcgggaccggctggtgcaggccgcggtgccttgccggctggaggtgtggacggatctctggcatgtattccagatgttccccatgaaaaaggccaccgaggccatggagagcatcgggcgtttccttctggagacactataaaagaaacgaggtttttgctatggcaattctagtgaccggcggcgccgggtatatcggcagccactgcgtggccgccctgatcgagcggggggccgacgtggtggtggtggacgacctgtccaagggccaccgggaggccctcaagggcggccgcctctatgtgggcagcgtagccgaccgggccttcctggacgatgtattttccagggagcccatcgaggcggtcatccacttcgccgccttctccctggtgggagagagtatgcaggtgcccgagcagtatttccgcaacaacgtcactgccgggctgaccctcatcgagaccatgctggcccacaaggtgccctatctggtgttctcctccaccgccgccaccttcggcgagccggagtatgtgcccatcgacgaggcccaccctcagaaccccaccaacccctacggcgagagcaagctcatcgtggagaagatgctcaagtggtgcgacctggcccatggcctcaagttctgtgccctgcgctacttcaacgtggccggggcctggcacgacggctccatcggcgaggatcaccggccggagagccacctgatccctctcatcctccaggtggcccagggcaagcgggagcagctctccctcttcggcaccgactaccccaccaaggacggcacctgtatccgggactacatccacgtggaggatctcatcgacgcccacttcctggccctggactacctgaagcgcaccaacacctccgccgccttcaacctgggcaacggacagggcttctccaaccgggagatcatcgaggccgcccgccgggtcaccggccaccccatccccgtccgggaggagggccgccgccccggcgaccccgccacactgatcgcctccagccggaaggccatggaggtgctgggctggcagcccaagtacaccaatgtggaggacatcatcgcctccgcctggaggtggcatgcctcccaccccgacggctacggcggttaaccctgaaccggcggcggacacagctccgccgccggtttttcacaggtgcaaccgccggttgcgcaagtttcaaggccggttgctggcctcctttccccgtttctgttatactggaagcagcaaataaaaggaggttccgccatggaattgggtgaacggctctaccagcttcgcagggagcgcaggatgtcccaggaggcactggccgacgcgctgggcgtatcccgccagtcggtttccaagtgggagaacggcgccagcacccccgacctggataaactcgtccggctgggggagctcttcggcctctccctggacgagctggtgaaggggcaggccccgcccaccgccgaggggacggaggcggccgtccgccccccttgctccaagggacgcatgatcgcggccgttgtgctgctggtgtgcggcgggctggccgcccttctcctgttcgctaccaccctgctctatttcgcagtgtggctgttactggcgggggtgctctgcctgcgggcgcgggagcaccttggaattctcctggggggcacagcgtggctgttcgcgctcctctttttcgagactggtaccgttctttctccctgggatatcttttcccccgcagcctaccggttctacccgcccttttatctgctgctggactggctggcctttcttccttttctgctgctgctcggcttggccgtcagggccgcctgggggcggttcgaccggagcagtctcatgcggcttgggctggcggcggccctgtttttcgccgccagagttgtatgcggcttgctcaatcacagtctgctggcatccagtcttttggagctggattttggattttactttccctggccttatcagctctccaaaaccgctctgcttctggccctgttccctctccccttcggcggttaccgtcgccggccctttgtggtgctggcaggctgggtgctctcctttggcctggatcgcctggccgctgcggcttttccctactccacgtttctctactactattggccgcttttgcttctgctgttctacctggctctggcctgggccggggcggcttgggagcggaggcgcccgccgcaggcataaaacaagcgccgtcccggcggggacggcgcttgcttgcttgttatctctttcggccggagagcagcagacccagaacgacgcccaccccggcagggagcacccagcccagacctacgtccgccaggggcagggcgtccagaaagtccagaggcaccttcagacccttcagggcaaagagtacgctgaacactccagtgcacagtaccgccgcgggatacacccagcggcggccctccagccaccgctggaagaaggacagggcgatgagcacgatagccaccgggtagatggcgctgagcaccggcgcggacacttccaggatttgggtcaatccagcattggagatggccatgctcaccaaagcgaagagcaccgcccacccctggtagctcagccgggggcagatgctgtggaagtactcgccgcaggagctgataagacccacgcacacattgaagcaggcaatgaggaagatacccgccagcaggacgctgcccacggtgccgaacagcaggcccaccacattggtgagggcctccgccccgtcggccgggttggggagtgcgccgccagacagggcgccgatgtgggccagcatgcagtagaccgccagcaacatccctccggcgaccacccccgcccggacggtaccctgcaccacggcgccctcctcctccaccccccgggcgcggatgttcaccgcaatgacaatgccgaaggccagggcggcgatggtgtccatggtctgatagccctcgatgaagcccttgaccaccgcatgggtcgcgtagtccccggtggccggaccgtagccctccagcgggttgaccagacagcccacaaaggtgacggcgatcagcgccaccaggatggggcagagaatcttgcccagtcggtcggtgagcttctccggccgcagtgcgatgaacagggcggcggcgaagaacaccagggagtagaccagttgatacaccccgatgggggcgtccgctcccacgaagggagggacggccatttcaaaagaggtggtggccgtccgggggatggccaggcaggggccgatggccagataggccacgatggtgaacacccgggcaaaggcgggatgcacacggctgcccagggcatccagcccgccggagcgggccaccgccaccacccccagtaccggcagccccaccgcgctgagggccagtcccagcatggcgggccaggtttgggtgcccgcctgggccgcaatattgggcggaaaaatcagattgcccgccccaaaaaacatggagaacagggtgaagcccaccagaagcagatccctgccctccagccgtctctctttctctctcacggtcgtttcctttccagcaatttaaaaacagcggcataccgcacggcatgccgctgtttttcacttacgtaccaaaatcagccctgggagatggcacccgtggggcaggtatcggcgcaagaaccgcagtcgatgcaggaaccggcatcgatgacgtagtgctcgtcgccctgggagatcgcgcccacggggcagttgccctcacaggcaccgcagctcacgcaagcgtcgctgatgacataggccattggatacacctccaaacactcaagctaaagtcattgtaccataactttttaaaaatgcaatgctaaaatgcgccgactgtgggtatattttttcacagtgggaaaaaatagaatccagccacccgaaggaggcgtatttttccatggacaaatcctctcaatttcacatggaggcggccgggagcctaaccccggagctggatggcgcgccgcgcagcggcctgcaccagcacagaacaaaagaaaaggggcgtggcacagcggatgaagcccgtcaaaaggcagtggaggctcctcttttggagacggagcaaacgaggtgaacacatgagcgaaaccagatttaccgagcgggcccaggccgccctgcggctggcccaggagtgttcggccgagctgggccacggctatgtgggcagcgagcacctgctgctgggcctggcccgggagggcaaaggggtggccgccaaggtgctccagtccgccgggctggagccagagagcctgaaggccgccatcgcccgcatggtgggggtgggcgcccccggcggcgcgccgtcccaggggctcaccccccggtgcaagaagatcatcgagctctccctcaccgaggccgcccggctgggccaccactacgtgggtaccgagcacctgctgctgggcatcctccgggagggggacggggtggcggtgcgggtgctctccggcaccggcgtggagccccggcggctccacgccgacgtggtggccgccatggggggcgaggcatctccctcccccttccggggcggcggcaagacacgggagcgggagtacggcggcgacaccaagctgctggaccagttctcccgcgatctcacccggctggccgccgggggcatgctggacccggtggtgggccgggacagggagatcaaccgggtcatccagatcctctcccgccgccagaagaacaatcccgccctcatcggcgagcccggcgtgggcaagaccgccgtggccgaggggctggcccgccgcatggtggccggggatgtgcccgacgagctgcgctctaagcgtctgctttccctggacctgtcctccatggtggcgggcaccaagtaccggggcgagtttgaggagcgggtcaagaacatcctggcggaggtgcgccgggtaggtggcatcatcctcttcatcgacgaactgcacaccattgtgggcgccggctccgccgagggggccatcgacgcggccaacatcatcaagcccgccctgggccggggcgagctgcaggtcatcggcgccaccaccaccgacgagtaccgcaagtatatcgagaaggacgccgccctggagcggcgctttcagcccgttctggtacccgaacccgatcaggacaccgcccgggccatcctccggggcctgcgggaccgctatgaggcccaccaccgcctccagatcaccgacgagtccattgacgccgccgtggccctctccacccggtacatcggggaccgccacctgccggacaaggccatcgacctcatcgacgaggcctgctcccgggtacggatggagcggctggccaccccgccggacctgcgggagctggaggagaaggtggagcacacccgccgcgagaaggaggaggccatccggggccaggactttgagaaagccgccatgctgcgggacgcggaggaggacttccgcaaggagctggagcagcagaagaccgcctggcgctccggccagaacaccggcgcggtgaccgccgaggacgtggccgccgtggtgtcgggatggacaggagtccccgtcaccaccctcaccgaggcggaaagcgcccggctgctcggcctggaggaggccctccaccgccgggtggtgggccaggaggaggcggtacgggccgttgcccgagccgtccgccggggccgggtgggactcaaggagccggggcggcccacgggctgcttcctctttctgggccccaccggcgtaggcaagactgagctgtgcaaggccctggccgccaccttatttggcagcgaggaggccctgctccgcttcgacatgtccgagtatatggaaaagcacgccgtctcccgcctcatcggctcaccgccgggctatgtgggccacgaggaggggggccagctcaccgaaaaggtgcggcggcggccctattgcgtggtgctctttgacgagatcgaaaaggcccacccggacatctggggcatcctgctccagatcatggaggacgggatggtgacagacgcccagggccgcaaggcggatttcaaaaacgccatcgtggtgctcacctccaacgtgggggccgcgcgtatcaccgccaagggcagcaagctgggtttctccgctaccgagcggcgggacggcgagacccgccccatcgaggagctgaaggccgcggtgctggacgacctgaaaaaagtgtttcgcccggaatttcttaaccgcctggacgagactatcgtctttacccagctcggccggacggagattcaggccatcgcccggcgcatgctggaacgtgtgggagagcgtatgaaggctctgggggtgaccctccgcttcactgaccgggctctggagactctggccgaccagggctttgaccccgactacggtgcccggcccctccgccgcaccatccgcgcccaggtggaggacgtagccgccgagcagcttctcagcggcgcgctccaggccggggacacggcactggtggacggcgcggaaaatggcctgcgtttgtatgcccagcccgccggaacccaggccctgaacacaaaggagaacgaactatgaaattgcagcgcacactccccctgttgctgctcctggccctgctggccgggtgcggtacgtccagccagccgagcgccctcaccgccgaggagcgcacccagctctaccagaccgccattgagagcgcccgggacgccgagatgaacgaagccattggtattctcaccgacgccggggacgacatggccgacgtgatctttgagctgctgggggtcaccgccgccgacatgagcgccttcgccctgtcggtctcccccatgaatatcaaggcctacggcatcgccgccatctaccccgccgctgggaagtcggacgccgtactggagggtctcaacgccttcatcgaccggcagaagcagagctttgagcagtatctggcggatcagtatgaaatcgccggcaacgcccgtctggagactctggaggacggcaccatcctgctggttatgtgcgaggaccaggacgcggtgtttgacgccatccgagacacgatcgagggcgcagcctgaaccaaaaagtcgtttgattcaacccgaaagggaaccctggcggttccctttcacactatccttccctccgaagcctttggcaggagggttttcgacagcctgacagctccgccaggcaggggttgcggcggccgcgctggtggattataatggagcatactacagtccgttccacattggaggttttggtatgcaagcgcgcgcaagcggtatcctgcttcccgtcttttccctgccggggccctacggcatcggcaccctcggcgctcccgcccggagcttcatcgactttctggcccaggccgggcagaagttctggcagattctccccctggttcctcccggcggcggtgattccccctacatgtccccatcctctttcgcgggcaacccctttttcctggatctggaggagctgacccgggagggcctgctcactcagaaggaactggacgccgcccggcgggccgaccccgaccgggtggactatgcctggctgcaccagacccgcatccccctgctgcggcgggcatgggaacgcggcagggtgtgctacgcccagccactggcggaatttatggtggaggaggcagactggctgcctgactacgccctgttcctcgccctgcgtgagcgctttggcggcaaggagctgaaggactggcccgacgagatccgcctgcgccatccgtcggccctggcccgttatcgggccgagctggcggacgagtgcgccttccacgccttcctccagctcctgttcttccgccagtggaccgccgtaaaagcctacgccaatggcaaggggatctccatcatcggcgatctgcccatctacgtctcccctgacagcgcggaggtgtggagccgcccagagctgttccagctcaaggaggacatgactccttccggtgtggcaggagttccacccgacgccttctccgacaaggggcagcactggggcaatcccctgtacggctgggactatcaccggcagaccggcttcgcctggtggcggcaccgggccgcccacctggcccggctgtacgacgtggtgcgcatcgaccacttccgggccttccacacctactggtgcatccccgacggggcgtccgacgcccggggcggccactgggagcccggccccggcatggagctggtgaaggccctgcgctccgtccccggcctggccttgatcgccgaggatctgggggatctggacgccgacgccctccgcttcatcgcagacagcggcctgcccggcatgaaggtgctggtctacgcctttgatcctgcgggcgagagcgcttacctcccccacaactgcccccgggacgcggtgatctacaccggcacccacgacacccccacctttgtccagtggctctttgagcaggccgcccccgccgagcgggactatgccttcgactacctgcgcctgcgggaggacgagggcttcggctggggcgcggtgtgcggggcgtggatgtccccctgtcgtctggccatcgcccccatgcaggatctgctgggcctgggtggcgacgcccgggtcaacaccccgggcacagccggcccccggaactggagctggcgggtacggcaggaggccctcaaccccagtgtgtccggccgcctggcccacatcacccgcacctaccgccgatagcataatccgcccgccgcaaaacccaggctttaagaaaagatgttttcttatctttcagcagagggagtatcttgaggtgctccctctgcatttttactccaggttgccgatgcagttaaaatagaaatcgacccaatccttttttcttccgcccttcggaacgctcatgcaccaggatgcgctccacgaactcatggagaatttccggcgtcaactcttgaatattcaggtaacgatccacgacctgcaagagctgatccactccctgaatgttttcctcctgatcctccagttctgtttccatctgtgggatgtgcgcttcacactcctcctgctctgcatggcacggaaccccttgtgctgctgagcgagatgttacacgatattcaagaggggcactgctgtcttttttgcttcggaacatgttctatgatttcgcagtccaacagagtcgccaggcaagctgctcctcggctgtaacgacgattgggaagtatgccaattcatgtggagtaatttgaagaaagaaactccggggcagctttgactgcctagtttcttatttttcggtccctgattctatctcactccaacccttgctgagatagtccgcagccgtgccgcggggatctgccgccctgcctgccggtaatcccccctcctcatctaagtacactcagcagatgccagggttccgcaaacagaatcgtctttttcacctctatttcatccgaccaaagcctctgtatctggtttaggtgaagcccataactccaggataacaatggtttgcatgtcataaacagtccgtggaccggcgcaaaaaacggcgccggtccacgcgctgtcatcccatggccgtgccgctgtaagaggcgcatggccaattttgttatgcttgtgcatagcaaaacaccccagtctgaagaatgacgattatttgttcagactgggtagggtcgttcgaaatttagttgaaagtatttccactgttttgcaaagcctgcgcctcctataataaaaagtatcacttaagatggaggtcctctatgcaatcaggaaaaatatatggttacgcgcgcgtatcctccaaacatcaaaatgaagaacgccagcttattgcgctgcgggcctttggcatcagggacagggatatctactgcgacagacagtccggaaaggatttcgaccgccccaactatcaaaggctgctgctccggcttcaggctggcgatgtatttgtggtaaagagcattgaccgtctgggacgaaactacaacgaaattctgtaccagtggcgtctcctgaccaaggaaaagcaggtctttattgtcgtactggacatgccgctgctggatacccgcagcacacgagatctaactggtacactgattgcagacattgtgcttcaactgctctcttatgtagctcagacggaacgtgaatttattaagcaacgacaggccgaggggatagcggcagcgaaggagaggggggtacggtttggcgtcccccccaagacgcggccggaaaaatttgaacaaataaagcagtcctggcagtcaggaactctatccgcgcgggaggccgccaggcagttgggaatttgtcacaagacctttttgcgctgggtacgcagttaaatgcgagaaatcgtgaccgttaaagctatgctgcatattctacaaacaaaaaaagtaatgaagcaaaaattttggttataaaggttgagattttgcaccggtcaaaatagggggaagaatgaacgcaaagccaccttaactattcatagttaaggctgcctggtcacaatcttgaagctccggtaaaacaaaagaaacagccgggttgtcaggcattacagcagggaaatacatctttcttttccgcccaagattgcggaattatctgggagcttggaaagcttctttattttagcaccaggtggggcataaagtcagctttatgccccacctttttatttatgtaaaagggcatatctgctccgtacacaaacggacagccgggtttgaaggaatttgcttgtgggaatacaggggcaaaatgaagagcagaaggagttgtatgcaatgagtggaaaagaacagtgggaagcagaaaccgtcgcaaaagcactgacgaagggcccggagagacgaaccgtctttgaaaccaccagcggcatcccggtagaacggctttacacgccggaggatgcggcaggcggctatgaggagcggcttggctaccccgggcagtatccttttacccgcggaatccagcccaccatgtaccgcgggcgcttctggacgatgcggcagtatgccggctttgccacagcggaggagtccaacaagcggtaccgctatctgttggagcaggggcagacgggcctgtccatcgcctttgatctcccgacgcaaatcggctatgactcggacgaccccatggcccatggcgaggtaggtaaggtaggagtggccatcgactccctggcggatatggaggtgctgttccaggggattcccctggacaaggtaagctcctccatgaccatcaacgcccccgcggcagttctgctggccttctatattgcagccgccgagaagcagggagtgccggcctccgccctcaagggtactatccagaatgatatcctcaaggagtacgcagccagaggtacatacattttcccaccggcgccctccatgcgtctgatcacgaacacctttgaattctgctcccagaacgtgccgaagtggaacaccatttccatctccggctaccacatccgggaggccggctccacagcggcgcaggagatcgcctttaccctggccgacggcatcgcctatgtggaggccgcgctggaggccgggatggacatcgacgaatttgccggccggctctccttcttcttcaatgcacacaacaatctgctggaagaggtcgcgaaataccgggcggcccgccggctgtgggccaaaatcatgaaggagcgcttccatgccaaaaaggaccgctccatgatgctgcgcttccacacacagaccggcggctccacgcttacggcacagcagccggacaacaacattgtgcgcgtggccatccagacattggcggctgtgctggggggcacccagtccctgcacaccaacagccgcgatgaggcgctggccctcccgacggaggactccgtgcggatcgccctgcgcacccagcagattgttgcctatgaaagcggtgtggctgacagcattgatcccctgggcggcagctactatgtggagcgcatgaccgacgagctccaggccgcagccgaggcgtacatcgaaaagatcgacgccatgggcggagcggtcaaggccattgagcagggctacatccagcgagagatcgcggagagctcttaccagtatcagcgccaggtggagagcggcgagcagatcgtggtgggcgtcaataagttcaccatcgaggagccgccggccaaggggctgctgcacattgacgcctcggtggcggccaaccagatcaagaagctgcaggagatgaaggcggcccgggacaacgtactggtgcgccagcggctggacgccctgcgcacggcggcggagggcagcgacaacctgatgccctatattctggactgcgccagggtgtactgcaccgaaggagaaatctgcggcgagctgcgcaaggtgttcggcgaataccgtccgatggaggtgctttgagatgagtgaaaagaagatccgggttctgattgccaagcccggcctggacggccatgaccgcggagccaaggtagtggcccgggcgctgcgtgacgccggctttgaggtgatttacaccggcctgcgccagacaccggagcagattgtggaggcggctgtgtccgaggacgtggacgcggtaggactctccctgctctccggggcccacaactatctgttcccacgggtgatcgagctgctgaaagagcaggaggctgacggtattttggtgttcggcggcggcgtcatcccggaagatgatattccagagctgaaaaaggccggtgtgtccgaggtctttacgcctggcacacccactgcggagacggtgaagttcctgcaggatcactgtggtgccagggatgacggatgacttcgcagcactgctggagcggggccggacgggtgataaacgcgcggtggcccgcctgatcagccacatcgaacagggtggggaaatggcgcgctccgtcctcacccaactctggccccacaccgggcgggcccgcatctttggcatcaccggtcccccgggggcgggcaagagcacgctgaccaacgccttgaccaagtgctggcgggccaagggcctgcgcgttggcatcatcgcggtggatcccacgagtccctttaccggcggcgccatcctgggcgaccgggtgcggatgggggatttgaccctggataccggggtgttcatccgctccatgggcacacggggacagctgggcggcctgtcgcccgccacggcgggagcggtccacgcactggatgcctgcggctatgacctgattttgctggaaaccgtaggcgtagggcagtccgaggtggcggtcatggagatcgccgacctggtgctggtgctgaatgtccccggattgggggacgatgtgcaggccattaaggccggtattctggagatcggcgacctgttcgcggtcaacaaggcggatcggcccggcgcggatcgaacggccaatgagctgcgggccatgctggagctgggagaggaggagaagcgcccgctgccagtgctcctggtctcggcctctcagggcacgggtgtgacggagctctgcgaggagctggagcgccagtacctcctcctggacgggaacggagagctggcccgccgccgcgccttgcgcctgcgcagcgagcttctgaccctggtgcgggagggcatcgagcagcgcctgctgcgtcccctgctggacagccccatgttcgctcagagcctggagcggttccagtccaggacagagagcccctatcgttgggcggaaaaatttgtaacacaaatcagtggaggaggtcccggttatgaattgcacaagagttgatcatgtcggtatcgcggtcaaggatctggcggcttcggtgaagtggtatgaggagacgctgggcctgcacagcaagggcacggaagttgtccaggagcagcaggtgactgttgcgttcctgccctgcggcgacagtgagctggagctgctggagagtacctccccggagggccccatcgcccgcttcattgagaagaacggcgagggcattcagcacatcgccatccgggtggacgacattgacgccgccctggcggagctgaaggaaaagggcgtccggctcattgaccagacgccgcggtacggcgccggcggggcccggatcgccttcctccaccccaaggctacccacggtgtcctgctggaattgtgtgaaaggaagtgaggacaatgactacggcggaaaagctggctcagcttgacgcgcattcggcccgtgtgctgcggtgcggcggccctaaagcggtggagaagcagcacgcgctggggaagcggacggcccgtgaacggattgaattgctgatggataccggcactttcacagaggtggaccgctttgtgcgccaccgctgtacctccttcggtatgggggataaggacatcccggccgacggcgtggttaccggttacggcaagatcgacgggcgcacggtttttgtatacgctcaggactttaccgcccagggcgggtctctgggcgagatgcacgcggccaagatctgcaaaatcatggacatggctctggaggcgggctgccccgtggtgggcctgtgcgactccggcggcgcccgcattcaggaggcggtggacgccctatccggctatgggcagattttctaccgcaacgcctgctcttccggacgtatcccgcagatctccgtcatcatgggtccctgcgcgggcggcgcggtctactcccccgccctgacggacctgattgtcatggtggaaaaggagagtcagatgtttatcactggtcccgcggtggtagcggccaccacgggcgaggagatctctgcggaggatctgggcggagcggatacccataccactatgtctggagtggcacacctttccgcgcgcagcgaagaggaggccctgggagcggtccgatgcctgctcagctatctcccctccaaggcaggggatcggcctcccctaatgaattttaccgagcatgaggaattacagcctctgctggacacggtgattccagacgactcctccctgccctatgacatgcacgatgttgtccgcatccttttagatgaagacagcgtaatggagttgcagccctattatgccgacaacattatcacctgcttcggccgcctgggcgggcacagcgtgggcgtaattgccaatcagcccttttctatgggcggaagcctggacatcaacgcttcagacaaggccgcccgcttcatccagctctgcgatgccttcggaattccgctgatcaacctggtggatgtaccgggcttcctgcccggcgccgaccaagagcacgccggcatcatccgccacggagccaagctgctctatgtctactcggtggcggaggtgcccaagctgaccgtggtgctgcgcaaggcctatggcggctcctatctggccatgtgctccaaggatttgggcgcggattttgtatacgcctggcccaccgcggagattgcggtcatgggcgcggccggcgcggccaacgtggtcttccgtaaagagatccaggcggcggaggatccgaaagcggcccgccgggaaaagattcagctctattccgagcagtttgccacgccatatatggcggcctcccgcggcttcgtggatctggtcatccgcccctcggagaccagggcgcggctgctggaggcgctggagctgctgatcaataaggagcggcagccccatccccgggggaatatgccgctgtaaggagttgaaacgagatatgggtattattccatacacagccatgacctacggtctgacggcggtgatttccctgctggtggtggccatcatcgtgggtatcagcaagctgaccagccgcccgggccagacggacgacggagagggggagccgtaacatggagttctttatgcagctgtttcccggcatcggaaccttctttgcggtggaacccgtaatcgcggtggcccgtattgtcctcattatattcggctttgttttggcctgcctggggttcaagcggactctggagccgctgatcatggtgccgatgggaatcggcatgatggcggtgaactgcggcatgatgttccttacttccggaaccgtcggcaatctgctgctggacccgcttgtctccgatgcttcggctattgtggatgccatgcaggtcaattttctccagccaatctataatctgaccttttccaacggtctgattgcctgtctggtcttcatgggcatcggagcacggagcgagatcagctttttgctggcaaagccctggagctccatgattatcgccatttttgctgaaatgggaacctttgccgcgctggcggcgggcgtactggcctttgggctgacgccggagcagtctgccgctatggctacgatcggcggtgcggatggccccatggtactcttttcctctttgatgatggctcctgagctgtttgtgcccatctccatcattgcatatctgtacttaagcctgacttacggcggatatccctacatcatcaagctgatggtgcccaaaaagtaccgcggcattgacatgtatgttgaggttcccgaggtctctcaaaagtccaaattcctgtttatcatcatcacctgtaccgtcctctgcctgctgctgcccgtagccgctcccctgctgctgtccttcttcatcggcatggccgtaaaggaggccaaaatcaacaagtacacggagctgctcgaggagggcctctcctatttcggcaccttcttcctgggcctgatcctgggggtgctgtgcgaggcctccaccattctcaatcccactgtgatcattattctggtcatcgggattcttgccctggctatctccgcggtgggcggcctgctgggcggctggctcatgtatttggtgcacaaagccaagcgcgaggactttaaccccaccatcggcatcgccggcgtttcctgcgtgcccaccaccgccaagctggcccagcacgccgcccaggatgaaaatcccttcgccgttatcctgccggtggccatgggtgccaatatctccggcgtcatcacctccgccattgccgccggtatcttcgtcaccaccataggcatggtgtaaaaacgatgcacagtgatatttgattaagggaggaacttattatggaaatcaaagcacgcatccccggcaccatcgtcgccatcaacgtcaagcccggcgacaccgtaaaggcccgcgataacctgggcactatggaggccatgaaaatggagcagcccatcccctgcccaaaggatggagttgtcaaggacgtactggtctccgtcggcgacaaggtcaagtccggcgccgtgctgctgtccatcgagtgaccgtccggcgccgcccctgaggaagagaaccccctctcaaatctatcagaaaggatgccaggagcgcctttgggcggcttccggcgttggtgattcaaatgggagagatttttgagctcatcatggtcatttgcttcggcctgtcctggccgctgtctgtctataagtccgcaaagtcccgcaccgccaaggggaaaagcctgttctttgaggtgttcatctggacaggctacgtcagtgccatcattggcaagattgtcacccagaacctgacctatgtattctatttctacatcctcaacatcgtcatggtttccatcgacatctgcctctatttccgcaatcgccgcctggacgcgctggccagccgaaaggcgtaatgtatggaggcgtgaaatatggaacgtattgctgcatccctgcgcgataagatcaagagcgtggaagaggccgcggcactgatccagtctggaagtgtgattggctgctccggcttcaccctggtaggcgagcccaaggcggtgccccacgagctggcccgtcagaaaaaggccgaccacttgaccattctgaccggagcctcagtaggggatgccctagatggtgagctgaccagagcgggtctgctgtccatgcggtatccctatcagagcaacaagtccatgcgcaacgccatcaatgcgggcgaagtgggctactccgatatgcatttaagccatatgccggagtttattaaccgaggcggtctgcatattgactttgccttggtggagtgtgccgctgtcacggaggatggcgtgatcccgtctgcggcagtgggcgcttccgactgcttcttgtaccaggcggatcagattattctggaggtcaatgaggctcttcccttggagctgtacggcatgcatgacatctaccgagtaggacatgagccgatcccgcttacggatgccacacagcgcatcggaaccgctgcaattccgtgtgacttccgcaagattgccgccatcgttgtgaccaatgatccgggcgactgccctgtgtttaaagagccggacgaggtcagtgcggctatcggggcgcacatcatctctttcctgaaggaggaggtggcagccggccggcagccggcctcgttgtcccccatccagtcgggcgtgggcagcgtggccaatgctgtactggccggtctgggaagcagcggctttaccggcctgcgcatgtataccgaagtcgtacaggactctgcgctggagctgatctgggagggaaagatggcaggggcctccactacggcggtttctctctcccagaaaaagctggaactgttttatgaaaacattgatttcttccgggagcggctggtaatccgcccccaggagattgccaacaatccggagctggtccggcgcctggggctgatctccatgaatacccccattgaatgtgatctgtacggcaacgtcaactccactcacatcatgggaaataagatgatgaacggcattggcggcagcggagactttgcacgcaatgcgggactgaccatctttgccacagcctcggtggcgaaagaaggggcgatcagttgtatcgtccccatgtgttcccacatcgaccacacggaacacgatgtgcaggtaattgtcacggagcagggactggcggatctgcgctggaaatcgccgcggcaaagggcggaactgatcgtggaacgctgtgcgcaccctcaatatcgtccgcttctgcgcgaatacttaaaggacgccgcaaaatatgggggccatactccccataatctccagcaggcgctctcctggcacacgagatatctggataccggaactatgctgcccgggtaggatacgtgccaaagtttgcagcctgtcaggcagccccattcggagctgcccggcaggctgcaactgatatctcgagaactgccgggtgtgcggaatgcagatgcaggaaggcggtgaggaaatgatgacgaaaaatgcggttcagcaaatcgaggaggctgaacacaaggcgaaagaataccaagctctggctgtggagcaggcaaagaaactgctctctgatgcggagcggcaggggcaggccgcactggagcaggcgctccgtgaggcggaggcacagaggcgggaacaggatacacaagcggaacaagctgcgcagcttcgtgcagacgcgattatgacggaggcgcggcgcgcctgtgacgacctgcggaggcaggcggaagaacggcttgcagacgcggccgcacttattgtcagaagggttgtgggagactcatgtctattgtcaaaatgaaacggctgcgtatcttcggcatggcatccgactgtgaggaactccttcggaaactccagcatcttggctgcgtcgaacttcgtgcgccaacacagccaagttcagatccaggctggcagggttttaccgcaaagagcgacggggcgctggcaaatgcacagctcaggatggacgagtttcgcaccacgctggagcggctgaagcgctgttcccctacaaataaaaaaggtcgcttcccctcccggccccgaattacggagcgggaactgtttgaccgacagatagttctggaggcggaggaaacggtcgaacgcgttgccgcgcttgaaaaaaagcgcgacagcatctgtgctgaacagaacaagcttatcgggcagagagaggccctgacgccctggctggggctggacgttcccctggataccgtttctacgaaacatgtattagtgctgttcgggacgctctccggcctggcaagtcatcaggcggtggaggccgccctggccgagacgaccgagctctgccaggtacaatgggcgggccgggccggagagctgcaatatgtactggtactctttcaccgaaaagcaggggatgccgcgcgggatgccttaaaaaactttggctttaccgccacaagctttcgaggttggaaggggaccgcccggtcaaacatcgatcagattgaggatcggcagaggatactttcacaggaactagaggcatgccgggctcggctggcacaggaggccggccaccagacagcgcttcagatctgcatagaccgcatgacgcaggatatccaacgtatggaggcgaaagagaaactgctctcctctacatccacgttttttctggagggttgggttccggcggaacagctttccgacgtagagcatctgctctcgcagtactccgccgcctgggaggccactgatccggagccggacgaataccctcaggtgcctgtcaagctcaaaaacaaccggctcacccgccctctcaatatggtcaccgacatgtatgtctatcccgcctatgacggggtggatcccaacccgcttatggctccctttttcatcttcttttttggaatgatgatggccgatatggcttacgggcttctcatgctcgccggtggcatttttatgcgcagaaagctgcggccgagcggaacgatggagcatatggccgggcttttgatcctgtgcgggatcagtacgtttgtgatgggagcgcttaccggaagcttcctgggtgactttctcccccgtctggcgaagctgatccgcccggacacaacctttaccgctctgcccgcgctctttactccccttacggatacgctggctatcctgattggttctctggccttggggctgctgcaggtactgaccggtatggccatcagtgttgtgcggaaggtacaagcgggcacctgggctgatgcgctgtgggacgaaggaacttggtggattattttggcaggggtggccctggcggtggtgggcatcggaaatttgggcggatatcccattgtccttttgattgggcttctcatgctgctctacgggggaacccggaatgcaaagggcttcgggaagctcactgctttgattgggacggtatacaatggagccaccggccttttcagtgatatcctgtcttacgcgcgccttatggcgctaatgctggctggcagcgtcatcgcgcaggtgtttaataccctgggtgaggtaaccggctcggtggcaggcttcgttatcatctccctggtaggaaacgcgctgaacttcatgttgaatctgctgggctgctatgtccacgatctgcggctccaatgtctggagttctttggacggttctacaaagaaggcggcaagcccttccggccgctgctcatcaacacaaaatatgtagatatcaaggaggaagattgatatggctgactttattgcgcagtttggcggtattggcctggcgtttctgggtgccgctcttgcggtaggactttgctgtgtaggctctgccagaggtactggaatggtcggcgaggcggctaccggcgttttaagcgaaacccctgagcacttttccaaatgcctgattcttcaagttctgcccggcactcagggcctgtatggtttggttatatggttctttgcgctgtttaccatgggcgctttttccggcggcattaccgacctctccgtgacggacggactgaccatctttgtttcctgtgtccccatggccctcggcggctggctctccgcgctctatcagggccgtgtggccgcagccgccatcaatgtggttgccaaaaagccggacgactgggcgaaaggaattattctatgcggtatcgtggagttttacgccatcctgtccctgctggcctctgtattgctgctgatgaacgccctgtaaggagcagcacgcgggagaaaggtgggagcaaatgaacggaatccaagcgattacagcgcagattatcgctgatgcacagactgaggcagatcggattttggcccaagccagggccagagcgaaggaatgtctctccgcttatcaagaacaggcgtatattcagagcaccgccctgttggagcgcaacgagagggagtccgcccttcgggaagaacgcctctcccatgctgcaatcttagcggcgcgcaatttacggctcagtaccgagcaggaaatgagggagcgtgcctttgtcgcggcattaaatcaactgtcggaattgccggacga

SEQ ID NO: 340 - DNA, 398830 bp, Flavonifractor plautii
  source 1..398830: mol_type = genomic DNA
cgaggagcgcagagaggaagatgctagagccacaaggacttttgggtcttccggtaaagcgccccgggaggtataaaggacggttttacccaaatttaccgctactacgatggaacaaaaaggaacaggcggtatcccatgggactacatgggataccgcctgtttttatttattattgtctcttatttgatgttttacccgctggttttgtctcgtacaagcatctttattgaataggccgcgattatgcggcgggcggcttttttaggggtatttatgattcccattgggcggtgaaggccccaccgcccccggcggcggccacggccatccaggtgctcccctccggcacctccaccgtgttctccccctcctccagctccaccacagtgtcgtcgggcagtaccagcaccacccggtagtcgccgcactcctgctcggcataggtcacgtgcaccgtccgcgcttcgtttcccggcagggtccagaggtactccaccccgcggaagctctcccagctcgcctcgcaggagaaggtatcgctgtagctctgccagagaaccgccgaatatcccatctcgtttgccacgatatccgcatcggtgatatcctccagggcatgcacccccatgtgccccaccccgcaggccgtcagcagcagaaacagcacggccagacagggaagcagccgctttttcatggattctgccccctctcatattctgtccaaagaatagcagccccagctttaaccgttctgaaagagagattaaaatcttatgaaagccccgtctgttcggtgagctggccggtaatgtactgttccccgtagagcatgtcataaacgatgttgcgccacgccgccaccaggggttcgcaattctctggaggcgtgtgggagggggtgccgtcggcggctacgaaaagccgctcccggtagagggtcatctcctccatagcggcggacacccactggaaatacaggggcttgggcagccccgcccaccccagcagatacgtccccaggccggtacagctcacctccgccggcgcctccagttccgccccaaagttgttccacaccaggaagtcggtgctgtgcatccgcttgagctcctccgcgtcccagcttccggtatccgccgaggacgcatagccgaggcgggtatagagcgtatcgtccccgcccagtgacagtcccggcagatgatcccccagaaagaccaggatagtgggctcctctgcctgggcgaagtagtctgtcagcttgcccagggcggcgtccgcgtcggtcaggccgtgaaccagagcgtccagcacccccgcctcctccccgctcaggttgtccgccgacgccgccaccggcgccggggtgttaaacttgccgccgaagtagggctggtgattttccatggtcaggccgtagagaaacaccgggccgtcccccttggcctcgaagcgggcaatcagctcgtcggccagggtgtcgtcggagacatagcccccggcataagtcttgtccacaaggaagtcgtcctgataaatgatctggtcaaagcccagggcggggatattgcgtgcccggtcatagagctcgtcgttgtaggagtggacaaagagggtctcataccccgccgccccgaatacccgggccagcgaaggcacacggcggtaggccgacgtatcgcccaggccggtgagggactcccccgcccccaggaaggcggaagggatgccggtgaacagttccatctccacgttgccggtacccccggcgtaggtgttggacaggaagacgccgctggggaacgcctccgccagggtgtggaagttgggcaccgggtcggcggaaaaggacacgcccggcaggcgggtggggtcaaagaagctctccgacaccaccagcaccacattgggcttgaccgccggctccgccgactgctctgcctccgcccggagctggagcaggatgcggttcatgccgtcctcgctgtagctgtccggctcggccatggcgctctcccgggcggcgctgtaaagcccggccagaaggcccagccggtcgttgcgcatggactggctctccccctcctccccggccagcagcacggcggaggccggactcagcagcacccaggccagcagggcggccagaagtcccagcacgcccagccgccgccggccgtccaggggccgggccgggcgggaccagacaaaggccgccaggaacagaagcgccgccagggctatgcccccccaggtgccctcccccagcaccatgccggggcggaggaaacccgccacctgccccgcctgccccgccatggccaggtcgctgaccagcagggggacaccgttgaccgcctgcttcagatggctggcgacggacagcagcaggcagggcaggagggtgaggagctggccgcagagcaggctgtcggtcagggtggtcaccaggagctgggccagcagcagcaccagataggtgtaccccgccgcaccggcgtggctccccatccacgcccacgccgccgccggctcctggagggtgaccagttggcacaggtagaccccggccaggggaagcagcagggccagcaaggcccgcccctggggatcggtgcgccggtaccaccggctctgatgcggctgcagcggttccattctgccccactccctcctttcgcgttctttctactatagcagaaacgcggccccgccgcaagggcggggccgcgttttgaaacagagagcgctatccgccgaattccacccgcacatcccccatatcactggtcaccttcaaggaatgagggccgccggggctggtcatgaccgggcgctgttccgagccgttcagggtcagctctcccatggacaggtgcatgtccaggccgtagtcgtcgatgggttctccggtatacagctccagatcccccatggacagggtgcactccgtattcccccggaaattcccatccagatagacgtcgcccatagcattctccacggtgcaagagctgcgggtggtcaggccctccgccgtcagatcgcccatggaaaccgcgagcgcggcatccgccgcctccacgccatagagcgccagggaccccatttcactccccgcagccagggtcccggcggtcacccccgtgagcgtcacatctcccagagcggtgcggatgtccgccgactccagggcaaccccctcgggcagcgtgatcaccgccgcgacctcgtgctcccagtcagacagctcccaggcacccgacccgctgcgtaccttgagggtatccccgtccagctcatactccaactgaattccgccccaactggtcagggaaattccgtaatccccgccgtactccacggtcacgtccccaatgctcacatccacgtccagccgggagaaggccggcagcgccgtcccctcctccacatggggagcgccggtatccaccggcgtttcgcttttatgtgccctgccccagtcgagatccaggtgggtctgtgcccccatggcaaagcccgtgatggccagcagcccccccgacatgaccaggaaggcaccagcccccaggcatacctttgccggcatgttcatgcccgcacctcccttcgattcagccagcggcccagcagcgccgccatgccgcggaagcacagcccggccagcaggaagctgcccgcgataaggagcagccccacgccgctggacagcaggccgacgccgcagaagaacatcatggtgggcaggcccgcgctgaacagcactgaaaagcccgcgcaggcggtaaagacccccgccccgatggccaccaccccgcccacggccactccggccaccagggcgaggatcaggacgacaaggcccaataccatcgccaccaccacgaggatcagcgggatggcgatgggggcggcgcagatggccagcagcaccttccacagtgtacccaggccgtgccgctcccgggcggcgccctccggcgggcaatcccgctccgccggaaccgtccggctccgctgtgctcccaggacgcggcccaccagctcggccggggtgcccagttcccggatcacccgtccctccccctgggggcccgcctcgtcaaagtattccgtgtagtaggccagaatgcgctccagctcgtcgggcggcgtccgccccgtgagcagggcccgcaactgggccagatactcctctcgtgtcatatgctccgtcctctcgttcgagtctggagagatcataacacgtttttcttaatccgcaaccgtaaaaaacattaaaattccatgaaagggctattcgtctgtaaagtccaggcacacgtcccccgtgccgctggagagagtcagtgccctgtcccccgcgccgccggacgcgaagaaggggcccgctttctccccgtccacctgaagttcgccggtgcctgtggtcagctggtaggcgtagtccgccccgcttcccgccgctctcagggtcacgtcgcccacaccggagatcagctcggcctcccccaccggagccgtcacatccagcccgcccacgccgctctcggcccgcagcaggccctccacggcacagccgctccagtccagcgcgcccacgcctatggagatctccgcccgattgagcaccgttccctccgggacggtgagcaccacctcgcccttcgggctgccgtcacccgatatattctccggtgtgctccagatctccagcgtgtcaccgctctggctgtggttcagccggtaaggcgtgccgtctccgtcctggccaccgctggtcagactcagataccagccgtccccctcctccatgcggatatcaccaatgcccacatcgatgtccaacgcggtaaagggctccagctccagcttgttttccggcggtgtggaaaccgggtcctgctccaccaccacaggctcctgtcctgccgcaaccggctgccgttcccctgccaccggtgtgccgggcatccgttgggccagaaataccagcctgatgcccacgcccaggagcagaagcgcggcggcgcagatgccgagtacgacgggccaaagccgcctcggccgccttccggcggacgctgcggagggcgcctgccccgtccgcccctccagcacctgggccgccacggaggcaggggaccccagcccctcggccgcctccgcctcatgctcctcacccgcgtcggcgaaatactcctcataataggacagcacgtcctccagctccccggacgggagctttcccgccagcgcgtcccgcaggcccgccaggaattccgccttattcatgccgctcctccttttcgtccagcaaaagttcctcaatctgcccccgatagcgcgcccactcctcccggtaccccgccagcagggcccgccccgccggggtgatggcgtagtacctccggttgcgcccctggaagggcttgtcatacaccgtcaggcatccgctctgctgcaagcgccgcagcaccggatagagggtggactcggacagttccaccacctccttcatccgctgggtcaggctgtagccgtaggcgtcctccttctccagcaccgccagcacgcaggcatccaacaggggagcacccaatggaaaggtcatgacgccgcctcctttcatttcaccaatattatattctgtataatattatttgtcaacagcattccagaatccgacggagattccttccgactacggaacatcctgtatttcgccgctttggggttgtaaaaaatcaaattttgatatattatgtacggtacgaattctgataaaggatataaggtgaaccgaatgagccttcgtattggcattgatattggctccaccactgtcaaggtggtgctgctggacgaacaaaacaaactgctgttccgctcctatgagcggcactactccaaggcccgggagcgggccgccgagactctgcgctctctggcggaccggctcgccggccggcaggtgcgcatcgtcatcaccggctcggccggcctgggcgtggccaaggcggcggagatcgacttcgtgcaggaggtgtacgccaccgccgccgccgtcaaccagtacatacccgacaccgacgcggtcatcgagctgggcggcgaggacgccaaaatcatctttttcggcggcgcgctggaggagcggatgaacggctcctgcgccggcggcaccggcgccttcatcgaccagatggccaccctcatgaacgtgacggtgaacgagctggacgagctgagcctgaagcacgagaagatctaccccatcgcctcccgctgcggcgtctttgccaagagcgacatccagcccatcctcaaccagggcggccggaaggaggacgtggcggcctctatcttccaggccgtggtggatcagacggtggccggcctcacccagggccgggagctcaagggcaagatcgtcttcctgggcggccccctccacttcctcatgggcctgcggcagcgcttcgtggagaccctgaagctggacgccgaccacgccgtgttccccgaggacggcgactgctttgccgccatgggcgcggccctgtgctcctccgactacggcgagcgctcctttgacgaggtgctggaccggctggagaagagcgtggacagcgtgggcctggtggacaccatgccccccctctttgacagccaggaggagtacgacgccttcctgacccgtcacaacgccatgcacccccccgaggtggacatacacacctacaccggcgccgcctggctgggcatcgacgccggttccaccaccaccaaaatcgcgctgattaccgccgacggcggcctgctctacacctactaccactccaacctgggcaatccggtggccatcgtgctggagcagctccgggagatctacaagctgtgcggcagccgcatcaccatcaagggcgcggccgtcaccggctacggcgaggatctcatcaaaaacgccttctcctgcgacgctggcctggtggagacggtggcccactacagcgccgcccgccacttcaaccccgacgtggacttcatcatcgacatcggcggccaggacatgaagtgcttcaaaatccgcaacggcgcggtggactccatcatgctcaacgaggcctgctcctccggctgcggctccttcatcgagacctttgccaaggccctgggctacaccatcgccgactttgccaagctgggcctgctggccaggcacccggtcaacctgggctcccgctgcaccgtgttcatgaactccagcgtcaagcaggcccagaaggacggggccagcgtggaggacatctccgcgggcctgtccatctccatcgtcaagaacgcggtctacaaggtcatccgggccgccaacgccgacgatctgggccagcacatcgtggtgcagggcggcaccttccacaacgacgcggtgctccgggccttcgagcaggagctgggccgcaacgtcacccggcccaccatctcgggcatcatgggtgccttcggcgcggccctctacgccagggatctgcatctggagaaaagcgcactgttgagcgaggaggctttacagtccttctcccacaccgccaagcccaccacctgcaacctgtgcaccaaccactgctccctcaccgtcaacacctttgacggcgggcggcgcttcatctcgggcaaccgctgctcccgccccctgggcaaggcaaaggtggagaaccccgatctgatgacctacaagtacaagaagctccgcgccctccagggcaaggggagcggaaacggcgtccggggccgcatgggcatccccttcgggctgaacatgtacgaaaacctgcccttctggttcgagttctttacccgcctcaacttcgaggtggtgctctcccccgagtcctcccgcaagctctacctcaagggccagcacaccatcccgtccgacaccgtgtgctaccccgcaaagctgctccacggccatgtggaggccctggtggaggagggcgtggacgccatctggtacccctgcatgtcctacaacaacgacgagggcatcggcgacaaccactacaactgcccggtggtggcctactaccctgagctgctggccgccaacgttcccctgctcaagcagaccaaattcctcaacccctacgtgggcctgtggcggcacaaggactttgaaaagcgcatcgcccagctcatggaggagcatttcagcattcccaggcgggaatccgcggcggcggccaaggcggcctacgcggcctacgacgcctacatccacgacgtgcgggagaccggcatgaagtacatccgccacgcccgggaccaccacatgcccatcctcgtggcctgcggccggccctaccacatcgatccggagatcaaccacggcatcaacgatctgatcacctctttcggtttcgtgctggtcaccgaggacgctctgagctatctggagggctatgccccccggaaggtgctcaaccagtggaccttccagagccgtatgtataacgccgcacgctatgtatgcacccagcccgacatgcaggtggtgcagctggtctccttcggctgcggcaccgacgccatcaccaccgacgagctgcgggacatccttgaaaagggcggaaagctctacacccagctcaaaatcgacgacattagcaatctgggggcggtcaagatccgcatccgctccctgatggccgccatggaggcccgccaggcgcaggatgcccggggctgaccatcccgactttttatagcacaacaggagtttgatgccgtcattgacggccagctcgccgccggcccgcgagtcggtgggggccaattccctttgagcgcgcggcgctcccattgcaagcgaaaggaacacccgttatggcagaattagtatacgacgaaaacggacggctgctgttcaccaaggagatgaaggaggagtacaccatcctcttccccaccatgcttccggtgcacttcggcctgatggcccggattctggagaccgagggcttccacgtggagatgctcaccaccaaccaccggggcatcgtggatgaggggctcaagtacgtccacaacgacacctgttaccccgccctgctggtcatcggccagctcatcgacgcggtgaagagcggcaagtacgacatgcataaggtggcgctgctcatcacccagaccggcggcggatgccgggcctccaactacatccatctgctgcgcaaagcgctggagaaggcgggtctgagctatatccccgtcatctcggtcaacctgtcgggcctggagcccaaccccggcttcaagctggggctcaacaccctgcgcaaggcggtgttcgccatgatgtacggcgacatcatcgtacagaccgccaaccaggttcgcccctatgaggtcagccggggccagactgacgaaaccattgaggcggtggagacccagcttctggaggccatgaaccagggcaagggcctctctttccaaagcatggtggccaactttgaccgcattgtggccgctttcaaggccatccccgtggccggggagcccaaggtacgggtcggcgtggtgggcgagatctacatcaaatactcccccctgggcaacaacaatctggaggagtttctcctgtccgagggggccgagccggtggtccccggcctgaccgacttcatcatcttcaagatctacaaccgcgaggtggacgtgaacatctacggcggcaagtgggtgaagaaaaaggtgtgccaagtgctcaagggctacgtggagaagtgccagcgggccatgatcgccgccatgaagaagggcggcttccgcgctcccggcaccttcgaggatctccgccgcctcatccagggctatctgggcgagggcaacaagatgggcgagggctggctgctcaccgccgaaatgctggagctgattcactccggcacccccaacatcgtctgcacccagcccttcggctgcctgcccaatcacatcgtgggcaagggcatgatccgcaagctcaaggatgactaccccttctccaatatcgtggccatcgactacgatcccggggccaccaagatcaaccaggagaaccgcatcaagctgatgctggccaacgcccggggcttggccaagcaggaggcggagcgccgggaggctggggaggccgctcatgtgtaaggccctctcctttgtggacgcctgcacggaagagcacttcgcggccatgagccgcagttccccacccggcttccgccgggcgggggccccgattttttatctgcgcgggcgaactgaattcgcccggcatcaaggttttgcctccggcaaaacgcttgtacgcgccacccggcgcgggcggctcatccactcgctaaacgaggtctgcttatgaattcactgcgcatcatagacgcctgcacggaggaacactttgcggccatgagccgcattcacgcccggggctggcacgccgcttaccccggccacgtgcccgacgactatctgagggacgtgatcaccgaagatcactggattccctttttccgggaggactacgccaccgggcggtgccgggggctgctgctctatgacggggagaaccccgtctgctgctgcacctgcgggccggtgcggctggggcccagtcctcgccagagcgaggggctggtgatccacggggaggcctaccggggctggggggagatcatctccttctacaccgaccccgcctgcaccggccggggctacggctcggtgctgatggaggaggcgctgcgccgtctccgggccgacggctacctcaactgctacgtctttgtcctgcgggagaacgagggggcccgccgcttctacgcccggcacggctttacctgggacgggacggaggagcacattcccttcccccacgacatgatctgcgtggatctgcgctacaccaaacagctatagccgcacgggctgccacgccgtgcggcagacgggtatcgaggcgcgtcctcggtacccgtcttttttgatcaggaggaattgttttgcaggaaaacaagatggcagtcatgccggtgcgccggctgctgctgaacatggcctggcccatgatgctgtccatgctgatccaggccctctataatctggtggacagcatgttcgtggcccagctcagctccgacgggtttgtagccctggcgcttgtctacccgatccagaccctgatgatcgccgtgtgcgtaggcaccggcgtgggcttcaacgccttgctggcccgccggctgggggagggccggcccgacgaggccaaccgggtagtggccaacggctacttcgtctatctggtctgctgggtggtctttctggtcctgggggtgggcctggcccccgtctttatggggctcttcgcccccgggcagccccaggtgatcgactacggcatccaatatctctccatcgtcactggggcctccgtcggcatctgcatgcagtttgccggagagcgcacccttcaggcaaccggcaacactgtgggccctatggtcatccagggcatcggcgcggtcatcaatctgattctggaccccctcctcatcttcggcatcggccccttcccccggatggaggtggccggcgccgcgctggccactgtgctgggccaggtggtgggcatggtggtggggctgtgtatggtgcggcgcagctccatcgtgcgcctctccttccggggcttccgcccggacagcgccatcatccgcaccatgtttcgtgtaggcgtccccgccatcctggtgcaggccctggccacggtgatgaacctgggcatgaacctgatccttcccctgttcaccgcctccggcgtgttcattctgggggcctatttcaagcttcagtccttcctcttcatgccggtcaacggcctgaacaacgccctcatccccattgtcagcttcaactacggcgcccggcagcgcagccgcatcactggggttatccatttcgccctggtgctctccgccgccatcatggccgtgggcaccgtggtttttctggccatccccggccctctcctccgtctgttcgacgcagatgccgccgtgctggccgagggtatctccgccctacgcctcattgccctctccttcgtatgcgccggggtgtcggtgatcctctgtgccgccctccaggccctgggggcggccaattccagcctggtggtttccctgctgcgccagcttgtgctccttttcccgctggccctgctgctgggcgcgctccggccctctctggtgtggctggccttcctcctgtccgagggggccgcctgcctcaccgccctgctgctctaccgccgcaccgcacggggccggctggccggtatggaggaataaatgccccctccccactgggccggaagccgctgcttccggcccggttttttcttttaagagggattttgaccccactctattgacagtatagtcccatcggttataataagcagtacaaaagccgacacaaggaggtcattcgattggcaaaagcccccaaggaaaagacgaaggtgatcgttaaaacctccacccgcatgtccaaaaagggccctttgacccccgacatgctccgcaagctggacgcctactggcgcgccgccaactacctggcggccggacagctctacctgctggacaaccctctgctgcgggagccactgcgccccgagcacctcaagcgcaccctggtgggccactggggcacggtgccgggccaaaactttatctacacccacctgaaccgggtaatcacacgccatgagctgaacatgatctatgtctccggccccggccacggcggcaacgcggtggtggcccagacctatctggagggaacctacagcgagttttaccccaacgtgagccaggacgaggagggtatgcgccgcctgttccgccagttctccttccccggcggcatcggcagccactgcgcccccgagacccccggctccatcaacgaggggggcgagctgggctactccctggcccacgcctttggcgcggtgatggacaacccgaccctgatcgccgcctgcgtggtgggtgacggggaggcggagaccggcccgctggccactgcctggcattccaacaagttcctcaaccccgtcaccgacggggcggtgctccccattctccacctcaacggctacaagatctcctcccccactctgttctcccgcatcacatcagaggaggtagaggacttcttcaagggctgcggctggaccccccgctttgtggagggggacgagcccgcccagatgcaccagaagatggccgcggccctggactgggcggtgcgggagattcagcgcattcagcagggggcccgggagttcggcgagaccgcccgcccccgctggcccatgctcgtgttccgctctcccaagggctggacctgcccgaaggaggtggacggcctgcccaccgagggcaccttccgcgctcaccagcttccggtggcggtggacgccgcccatccggagcacctggaggtattggagcgctggctgcgcagctaccggccggaggagctctttgacgccgagggcgcgccggtgcctgccctgcgggccgtggccccccagggggagcgccgcatgggcgccaacccccacgccaacggcggcatgcttctgcgggatctgcgcaccccctccttcacccgctacgcggtggaggtgcccgcccccggcgaggcggtggcggaggacatggcggagctgggcaagtatgtccgggacgtgctcaagctcaaccagaaggcccgcaacttccgcatctttgcccccgacgaggccctgagcaacaagctctccgccgcctttgaggccagcgaccgccgctggaacgccgagctgcgctccaccgacgaggggttgtccgccgacgggcgcatcatggacagcatgctctccgagcacatgtgtcagggctggctggagggctacctgctcaccgggcggcacggctttctcaacagctacgaggccttcatccgcatcgtggactccatggtgagccagcacgccaaatggctcaaggtggcccggcagctcccctggcggcaggacatcgcctccctgaactacgtgctgtcctccaacgtgtggcagcaggatcacaacggcttcacccaccaggaccccggcttcctggaccatgtggccaacaagaaggcggacgtggtgcggctctacctgccccctgacgccaactgcctgctctccgtctttgaccactgtatcaaaagccggaattacgtcaatgtgatggtggcctccaagcacccccggccccagtggctcaccatggacgaggccatcaagcactgtacccacggcatcggcatctggcagtgggcctccaatgaccagggggcggagcccgacgcggtgctggcctgctgcggcgacacccccacgctggaaaccctggcagcggtgaccatcctgcgccgccacctgcccgaggtgcggctgcgggtggtgaacgtggtggacctgatgaagctccagccccacaccgcccacccccacgggctcaccgacgaggattacgacgtgatctttacccgggacaagcccatcatcttcgccttccacggctacccctccctggtgcacgagctgacctaccgccggcacaacaagaacatccacgtgcttggctaccgggaggagggcaccatcaccacccccttcgacatgcgggtgctcaaccgcattgaccgcttcaatctggtcatcgacacggtaaagcggctgccccaattgggcaaccggggggccttcctcattcagctcatgaaggacaagctggtggagcacaaggagtatatcaccgcccacggccaggacatgcccgaaatccgggactggaagtggaacggtggaaacggtatctgacgcgcaaggggccaggcttctgtccggccccttgcctttttccatcattttgggtatgatagatgggaaaaaaggagtgaacgtatggaatttcgactggacagccacacccataccttggccagcgggcacgcctactgcaccctgctggagatggtgcgggcggcggccgaccgggggctggagctcatctgcatcaccgaccacgcccccggcatggagctaaccacccacaaggactactttctcaacttccgggtcatcgaccgggagatctacggcgtacgggtcatgatgggcgcggagctcaacgtgatggactttgacggcacggtggatctctcccccaagctgctgaacaatctggacatggccatcgccagccagcatatctggtgcatgccccagggcggcggaccggaggagaatacagcggccatggtccgcgccatggacaactgccccaagatctgtatcctgggacacccggacgacggccgctaccccctggactatccggcgctggtgcgggccgccggggagcgcggcgtgcttctggaggtcaacaacacctccctctcccccgcctgttcccgggtaaactccaccgccaacgtgacggagatgctgaagcactgccggcgggagggcgtaccggtggtggtgggcagcgacgcccactttgtctccgccgtgggcggccatcaatatgcccaggccctgctggacgagctggacttccccgaggagctggtgctcaaccgggagcccgccgccttcctggcccacctggagcgccggctgagccgcacataaaaaagaggattccgccccgcggaatcctctttttgtcttattggaacagggacaggctgccagtgaggcggttgatccgcttttggggcccacacagggtcgacgccgtaacagcgcccctactccccgcgggcagaagcactcgtccggcaccagggcgcacttgagctcactcaactccgcccttgctcccctcctttcgcggctcccactccgacagtgccagtccggccaccgtcagcgccgcgccccccagggagaggggcgtcaccggctcacccagcaccagcgcggaggtgaccagagtcaccaccggcaccaggtagatgtaggcgctggttctgaccgcccccagccgccccacggcaaagccccaggtgacaaagcacagggcggaggcccccagccccagatagagcaggttgagcaggtaaaccggctccgtcaaagtcccgagcccgggccggaagcccaacaccggcaggacgggcagcaggaacagcaggccccaggcaaaggtacggcgggtggtctgcaccaccgggtagccgaaggcggagagcttgcgggtcagcagggagtaggctgaccaggcggcggccgccagcagggccaggagatcgcctctggggttcagctccagcacggcggcgccgttatacgacaccatcgccaccccggccagggccacggccagccccgcgaaaaagaggggacgcagccgctcccgccgcaggaggaagtgggagagcagggcggtcagcatcggactgacggacaccagcacccccacattggaggccagcgtgcaggtcagggcgatgttctccagcaggaaatagagggtgacgccgcacaggcccgccgccgcgaaccacagctcctgccgccgcccggccaaccggagccgccgggggtacagcaggcagagggccacaaagcccagggcgaagcggaggaacagcacctccacgggccgcaggccggtcaggagcaccttcgtggagataaaggtggtgccccagaggaagatggtcagcagggccgcggcgtgccccgtcaggcccgcccggctcacggctccccccgttccgccgcaaacacggcccggtactggctgggggtgagtccggtcaggatcttgaaaaagtggttgaagtggctctgatcggcaaagcccgcccgcagggccgcgtccagcggggcggccccctgctccagcagggccctggcccggttcacccgcaccgtttccagatagcggtagggggtgatccccttctggcgggtgaagcagcgcagaaggtggtacttgctcagccccgccagggcggagagctgctccagcgtgatgcgccggtcacagtgggcctccagatagtcacacaccgcccgcacctcaggccgaacctcctccggcggccggggacagccgccgcatcgctccagcaggcggcccaccagcaggagaaaggcctcctcccggcggagctccccctgctcccccgccgccagctcccatacctcccggaacagactggtcagttcgctcccgggcagcactgggggcgtgaaatggggggcaaaccggcggccggtgacggcttcagcggcccgctccatgacctcctgcggcacgtggagcccccgccagtccaggcgctcctcccccaccggacggcaggcgtggggctcgccgggctgaaagaataccagctcaccgggggcaaggcggagggtctcccccgcgatggtcacctcccggctcccccgatccatggttccaatgacataataggtgtgaaaatgctccggaaacccctggtcgatgccctgaaagagacatgcctccactcccagctccggatcgtagtacacgcgccgcaattcctgttccatagggtactcctctgtctgagataaaagcagtatagcacgtccctccgcctgtttcttgcatgatattgcgcatttcccgcacagggcggcctcgccgcccatatgctgatccagggggtggtgggatgcaggcgagctccgggccgtccggcgaggcgctgctggccatcgccgcactggccgccatccagctcaccgcggggaagagcgacgcccaggcagcggtgctcggcgccttcttcaccatgctgggggacgccatcgggctgctcctggcccagcgggcggcgctggaaaatccatagcgggcggcgcagatgcgccgcccgccgcttcttgtaagctcaggagccgctcaggaagtcctgcacctcgtccagccgctccatgccctcgtcatagccgtccttccacagcgcccgaatcttctccacgtccttttcggtgcggtgaaagccctccgtgctgtggggggcgaacaggagggcccgcccctccctctcaagctgaaacagccgctcccgggaggtgttgtaggcgtccgcccggcggcgcatggtatcgcagaacctggggtacttccggtaggccgcgtcgatgaggggctggagcttttccggccgccggacgtagctccgctcccgggtcagcaccacgatcacccgctcgcaccccctctccagcgcccgctcataggggatagcgtcggccgctccgccgtccatacacggcttaccctggatatcgaaaacagggaagaggaacggcagggcgcaggtggcctgcaatagcttaaaccggtcatcccggcgctccaccggaaaatactccgcctttccagtgtccatgttagtgactaccgcctccacctcgccgggataagcggcaaacgtgtcatagtcgaagggaatcaactcgtttggtatggtaccaaagacgaaatccaggccaaaataggcccggttgtcccgccggagcaggttgccgaagcccatataccgcttgtcgttgatgtagtttaccataatgtccaggttgcggcggctctgcttggacacatagctgacgccataggcaatcccggctgagacgccgatgacataatccggcagcagatcccgcgtcagcagggcgtcgcagacgccggtggagaaaatggtgcgcaccgcgccgccctccagaacgattccagttttcatgtcggctcacttccttgttgctcccattatacggcagcggacgccggcctgtaaaggaattcttgacaacataatatttcgcattataataaattaggtatacaaaggaggccaagtcatgctcgtcaagttcatcgtctgcgtcgtcgccggcctgggggccggcatcggaaccggcctggcgggcctgtccgccgccgccgtcatctcccccatgctcatcaccttcctgggctttcctgcctatcaggcggtggccatctctctggcctccgacgtgctggcctcagcggcctcggcctatacctatggcaaaaacaggaatctggatatccgcaatgggctggtcatgctggcggcggtgctggtattcaccctgatcgggagctgggccgcctccctggtgcccaacgccaccatgggcggcttctccgtgttcatgaccctgctgttgggcatcaaattcattgtgcgtcccgtgatgaccaccaaggagagctccgcccataagagccgcgggcgccgcatcgcggagtccctggcctgcggcagcgtggtgggcttcatctgcggctttatcggcgctggcggcggcatgatgatgcttctggtgctcacctccgtgctgggctatgaactcaagaccgccgtgggtaccagtgtgttcatcatgaccttcaccgctttcaccggcgcggtctcccacgtggccatcggcggcgggctggatgtatttgccctgacggtgtgtgtggtggtcacgcttctgggcgccagaattgccgccgtctttgctaaccgggcttccgccaaggcccttaaccgggtcaccggcgtggtgctcaccatcctgggcgcagtgatggtggtggtcaacctcctctcctgaagcagtggcacagccccctccggtcggagggggctgctttttgcctgcggctccggacgcccatcccagctctattgaagatttccttgacataggtagacaatctatctatactatacatagataatctatctatgaggtgaggaatatggcaaatgaccgcaccactccgggcggcatgggcatgctgctgctggccttgctggagggccgggacatgtacggctatgagatgatcgaggccctgcggacgcgctccaacgaggtgttccgcctcaaggcgggtaccctctatcccctgctccactccctggaggcccagggctgggtaacctccagcgacggggttgccaatggccgcacccggcgctattacgccatcacccgggacggccgggccgccctggctgaacagcaggcgggctggtacgcctacgccgacgcggtacgcggcgtgctggagggggggaatccctgtggcgcgtgagtgcgtgaacgaatatctggagacggtgggcggccagatccgctggcggcgggcccggcgggttctcctgcgggagctgtccgaccatattgccgatcaggccgccgcctttgaggcggagggccggagcccagaagaggccctggccggcgcggtggccgagatgggggagccggaggcggtgggccgggagctggaccgccttcaccgcccccggaaccgctgggggctggcgatcactgtggcggccctctttgccgcgggcgtgctgctccagctcttcgccgccgggctcatgggggacgccaaggacgtcttctacttccggcggcaggttttgggcctgctgctggccgccggggttttgaccggactctggttttccgactacaccctccttctgcggcggaaatgggctccggcggcggcgctgctccttctctgtctgggtcctattctctgcactccacttctccccttctactcctatcccggttatcagcttgcgctctattccactctgctcctccccgtcccctacgccacccttgtggcctccctgcggggcaaagggccgcttgccgtcctgctctgcggggccgccgtcctggcgctccccctcttcgcctggctggctcccagttccgcctcctggctggtcagcgaggccagtatgctgctggtactcctggcggccgtggggctgggctggttccggggaaagcggcggtggaatctgctggctgccctggggcccgctctgactatcctccccctgctcttcctgcggcacctggagtacgctgcttggcgcatagacgctttcctggggcccgacctgttttacgagcgactgcgcatgggggaattgccctccctttttgtaggctcctcctcggagctcctgctggcggaggccgcccagggcctgggccggtgggtgttctgggccgccgccgggctgatcgtcctctttgccgccctgctgctccggcgcatccgcgccctccacagccgcacgggcaagctcctcgccctgtcggccttccttcccctgttcctccaggcggccatctactggctctataacctgggctggtggccgctgggcgtgctctccctccccttcctgtcctacggcgtcttcttcctgttggtggacgccgccctggccggggtgctcctgtccgtcttccgcatggacgccctggtgcgggacaccgcctgggcctccagcgccccggccccccggccctccgctctggacatccccctgggccggggacagctccacatcgaataccgcaaaggggcgcaacacttttaaacatacaaaggaggcctgcggtaaagccgcaggcctcctttttctattcctcgtccgcccggtaggccatgagcacatactcccagtgctccacgcccccctcaggcacgctgtgggtgcggaggtagccgtcaatcagtcccagcagctccgcccgctcctccggtttgagatggagcgcgccgaacaggaactggagatcctcctgctgttccggctcgccgcactggctggcggcgtgcagcacgccccggaaggtgccgtccaccagttgggcggccagcgcctcccgctccccctgaaagccgtccttccggcccaggcagagccggatctccacatcggccagccggtaataggtcgcctgccggccgtccggcgccgtatatactcccagctctaccacgcccagctcctccagcttgttcaggtggctctgggccgcgctgggtgagagcagcattttctccgccacggtgttggccgtcatgggccgtcccgcccgccgcagcaggtgaatgatatcctggcgtaccgggttgagcagcacgcgaaattgtttccgttcctccagatcaatggttcttgccaccgttgtccgcctcctctgttccggccatgccgcctatctggtccgttccatgtggcgcctctgcacctcgtagtcgaaatcgccgccgtactgaatttttccatcccggaccacatggggcagccaccactttccatgctcctcctccggctccacatagccgtggctggctaggaacttccgccgggcctctaccgagcggtagagcacggacagatccccgtcccagtcatggaagcactccggcccgcagtccggccgggtgaaggggcacaccttggcgcagcggccgcaggtacagccgtgggggttggccgccccgtgggccacacacctgcgctcgtcggtccgccagagcatgtagccgcggtactcctcctgttccccagtggagatggcgtgcatggggcactgctcggcacagattttgcatacggaacagtagttctgtagcccgaagtcgatggggccgtcgggcaccaggggcaggtcggtcagcacggcggccgccttgaaagccgcccccacaaaggggttgaccacgatacccagccgggaaaactcccccagcccggccagggccaccagccggggcatgatggtcacgtagttgttaaaagcatcgctgcgggctggccagcccaggcggcggatatagtcggccaaggtgttggacatgcaggccagccgctgatatgcctgataggcaacggtgtcatccagccactcgtccccgtgggaggccgcaatggtgggcagctgggtgcgtaccagaaacaccaccgcgtatcggtaaacccgctccaccggcgtgccgtccaccttggtggcgtaatacacatcccggggcacctcgcacactcccaccatctccgccccagtgaaataggccatctttttaatgtgccgtgtcacgatacgcgtatcctccggcaggggcgctttctccggcgcgacctcgttttcctggtagtcgttaaggtacttctgaaagtggtaataggacgccccaatgggcacgcgaaccgtaaaatcctccatcctcttcttaagtacatccccgaagccccccaggcggcacttggcgaatgccatctccttctcatccacccggggtgaatcctccacgatatccacggtcaggcgctccacccgcttgagcttttccagtggatagggccccaactgttcgtcattcagcaacaccccgcgccgcgacagatccaacgtctccattgctcgacacctcttgcttctcttatgttaggtttcctcccactcgttgaccaccagcatatccccctgctgaagaaccgtcccgcccttgggcactacagtggtgccgtcggcacggcgtaccaagacgatgagtacctccgccgggatacccagctccttgatcggcctcccaatccagtccccgtgctccgccacaggcacctcccgcaggctgaccccgtcatcgtcatcatagagcggcgtgctgagcaccataagatcccctgcctggattgcggtatctccgtttggaatcacattctcgctgccccgccggagcatcaccaccagcgcgtcggcgggcagctcacactccccgatggtccgccccacccacgggtggcccgcgccgatagggaagcgggtcaggtggagctgccgctggtcctggtagtcgttgaaggtacggctgatgctctcagcactgtccaccatgtccagcttccgcgccgccagaggcagtagtgaaccctgcaccgccactgagagcagggcaatgcagaacacgatgtgaaagaggtcgtagccgatggcggccccgctggccaccgccatgatggcaaacacgatagatgccgcgccccgcagccccgcccaggacaccagcagacactgccgcaccccgcagcggaagggggccagcagcaggaagaccgcagcaggccgggccacaaaggtgagaaacaccataatggccaaagccgggagaaaaaccgccgggagctgccgtgggaaggagagcagccccagcaggaaaaagatcaaaatctgcgccaggcccgtaagtccgtcgaaaaagtggaccagggccgccttatggggaattttggcgtttccgatcaggatgcccgccagataggcccccaggtagccgttcccccccaccacggcgggcagggcaaaggagagcagggccgcagccaccacgaaaatagtatccagcccgtcggagagcgtgagcctgcggagcaccagaatggacagccccgccaccgccgccccaaggcccagtccaaagacgacctgcgcaaaaatcatccacgggattgccccgccgccgcccacccccatcagggagagggcgatcaccgtcagcatataggaggccgggtcgttgctgccgctctccacctccagcagggaggcggtgtggttcctcaggcccagcttcttggagcggaggatggaaaacaccgacgcggcgtccgtggagctgatgaccgccccggtcagaaagctctccagagcagaaaaacccagtgccaagtggcagaacagcgctgtgagcagcgcggtgaccgccacgcccagggtggacagcaccaccgcccgggccgccgccggccgggccgcctcccagcgggtaccgaaaccaccgtagaacatgatgaaaatcagcgctacggagcagatacgctccgccgcctcaaagttatcaaacgggatgcggaacagcccatccgagccgaacaacattcccaacgccagaaacagcagcagggcgggcacacccaggcgctgagacaggcggctggcgacgatgcagatgacaatgaccaccgcacaaagtaacagaattgattccatgaaagccccctctcacaaataaaacaggcggccccagtccgaatgactggggccgcttcacccggttgtattgattatagcacaaaacaggccgtgttgaaaagaaaatcctgctatttccccgtatggctgccatatttggggtccagcgcgtcccgcaggccgtctccaatgccctgaaggcacagcacggtcaggatgatgcacagccccggcggcacccacacccatggccgaccggtgaggacgggcaggctggcggcgtactggatcaggttgccccaggacgcctggggcgtgcggatgcccacccccagaaagctgaggctggattcggagaggatggcccgccccgcccgcagggggagggcgcaccacaccggcgcgatcacgttgggcagcacattgcgccgcagaatccgccccgtccgcccccccagggcgcgggccgccaggacgtactccttctcccggaccgagagggtattgccgtacaccagccgggcgatgcccgtccaacccagcaggcccagcaccagcaccagattgagggcggacggccccaccagggacaccaggcagagcaccagcacgatgctggggaagctctggaacacgtcggccagccgcatgaggcagaactcccaagccccccggcggtagccggccagcaggcccaggggaatccccaccagggcgctgagggcggcggagcacaggccgatgagcagggacacccgccccccgcagagcaggcgggccaggagatcccggcccacatcgtcggtgcccaggggatgggcggcggaggggggcgcccagaagcccgcctccagatcgctggcgttgggctccagccccagcaacgggggcaggagcagcaccgccagcagctcggcgcacagaatcagcaagcaggccacggcccgccggtcgctccggaaccgctcccaggggctccgggacagcatacaacgctccaccggcctaccccctcccatagcgcacccggggatcggccagcccgtaggccagatccaggagcaggttggtcaggagcaccgccagggcgatgaccaccgtcacccccatgaccaccggatagtcccggttctcaatgccccagaagagcaggctgcccatgcccggccagccgaacacctgctccaccaccaccgagccgccgatgatgtgggggatgtgccccagcacggtggtgagcaccggggtcagcgccccccggaaggcgtggcgcaccatgacggcccgctcccccaggcccttggcccgggcggtgaggatgtagtcctctcccagggactccaggcaggcggagcgggtctgcttgaccagctcccccaggccgctgacgcacaccaccccggccgggagggccaggtggcgcaggaaatcccccacgccggtgaacacgccgtactcatacatgccctgggagggcagccagcccaagagcaccgagaagatgagcacccccaccaggcacaggaaaaagccgggcacgccgaagctcaccaggctcagggcggaggccgcccgatcccagcttgagcggggccgccaggccgccagaatacccagggggagggccagcagaatggccagcagcactccggtgccggtcagcagcagggacggccccacccgctgggccagcatgccggccaccggccggccgctcaggtaggactgtcccagctccccccggagcagcccccccagccacgccagatagcgcacgggcaggggcttgtccagccccagcgcctcctccagcgcggcctgctgggcgccgccggaggccccctctcccaagtcggttacatcggcgggcgagagacttaaaagtacaaaaaccagaaaggtaatcccgaaaaacacggggatcgccgtcagcagacggcggcggaaatagcgtcccatcttcttcctcctgcacttccggccgcccgtgggcggcacgggccggatggtacggccctacggaggttttctcatttgttcggttccgtcagccccggtacacccagtcccacacgttctcgttggagaaggcggaggaggggtagtcgatgccgtccaccgtgggggactggacgtggagcgtccgcccaaaccacagggggatgaagggccgctccccggccagcagggcctggagctcctccacccgcgcctgccgctcgtcgtgctctgccgcccccttgacggcggcgatggcctgggtgtagggcgtcagctccgccacgtggaacaggttgttgtcggcggtaaggcggctctcggtgaaccacaggggcagggcgccgggggtgtggctggcgatggccatgtcgtacttgccgtccgccatgccagcgaacagggtggccgagtccaccgtctcgatggtgacagtgatgcccgcctccgccagctcctgctgcattagggcggccaggccggagcggttggcagtgcaggccagggtgtaggtgcgcccgtcgtatcctccctcggccagcagggccttcgccccgtctacgttcctggcccaggtcaggccgctgtcataccccgtccccggggtcagatcggaggccgccggctcccccaggccctgggcggtatggaggcacagggcctccttgtccagagccaggtcgatggcccggcgcaccgcggcgctggggatggtctcgttgttgagcatcagctcgtagaaggagttgggcaccgtgccctccagcacctccagcccggcggcccgggccacctcggcgtcctccacggacacgttgcctccaaaggcgtagtagtccagatccccggcgatcagggaggtgagcaggttggacttgtcaatgaccgtgatcaccagccggtcaaagccgggcgccccaagctggtagtccgggttggcctccagcactagctggctccccggcgtctcggagacgaatttgcaggggccggagccaacaggctcgtcccacagcgccagctccatcacgtcctccggcgctgtcccctccagcagatgggtgggcagaacgtagtactcccggttcttgtccagcaggaagtcctccggcgtggtgggggtcttgaaggtgagcttcagggtgtacttgtccaccgcctccgctcccagggcctccccaggcaccgccgcgccggtgtcgtcggtgccggagagcaccgcaaaggccgaccgccccagggtggggcaggccgggtcggtcaggagggcaatggtatccgtccagtgctccgccgtcaccggggtgccgtcgtggaaggcggccttctcatccaggtggaacagggcggccgttccgccgtcggcgctctcccaggaggacgccgcgcggggctccagggtgccgtcggcgtggacataggccaggcggtcgtaaatcttgtcgtaaataatacgggagtagttgctccccgaggggctgttgtagggcatcagagcgtcccaggcattggataggccgtagcggacggtatccgccgctttgccctccggcccgcaggccgccagggacagggccagagccgcggccaggagcagagcagtgagccttttcattccgtcccccctcattccacggtcaccgacttggccaggttgcggggcttgtcgatgtcgcagccccgctggagggccacgtagtaggcaaagagctgcatgggcaccacgtccagtgaggggagaagcagggggtgggtgtcggggacgggaatcacgtggtccaccgtcttggccatgtccgccgcccgggcgtccacggtgaggcccagcacgtcggccccccggctcttcacctccaccacgttgctcatggtcttgtcaaagagcttgacatagctggccagggccaccaccagggtgcccggctcgatgagggagatggtgccgtgcttgagctcgccggccgcgtaggcctccgagtggatgtaagagatctccttgagcttgagggagccctccatgccgatggcgtagtcgatgttgcggccgatgaagaagatagaggggtggttgaagtagagggaggcgaaatactggatgtccgcccggttgtccagaatctgctccagcttggtggggatcagcagcagctcggacacaatgcggtcgtactccgcctcgtccagggtgcccagggcctcggcgcagtacaggccgatgaggtacaccaccgcaagctgggtggagaaggccttggtggtggccacggcgatctccggcccggcccaggtatagagcacgtcgtcgctctcccgggcgatcgtggagcccaccacgttgacgatagagagcacccgggctcccaggcgcttggcctcccgcagggcggccagggtgtccaccgtctcgccggactggctgatgaccagcaccagggttttgtcggtaacgatggggtcgcagtagcggaactcggaggccagcgtcacctccaccggcttgcgcagcagccgctccagggtatacttggcggccatgcccacgtggtaggaggagccgcaggcgatcacatagagcttgtccagctcccgcaggtagtccggctccaggttcagctcatccagcaccacccgcccctcctggatgcgtggaaacacggtcttgcggaatgcctcgggctgctccatgatctccttggccatgaagtgctcgtacccgcccttttcggcggcggagatctcccagtccacgtggcagcgctccttctccacgggccggagataggcgtcatagacccacaggtggtcggcggtgagctcggcaatctccccgtcatccaggtagcacacctcccgggtgtacttgatgagggcggtcacgtcggaggccagatagtgggccccctccccatagcccagaatgagagggctgtccttccgggcggcgatgagccggtcggggcagtcggcgcagacaatgcccagggcgtaggccccctggatgcggttcagtgtcttcaccaccgcgtccaggatatccccgtcatagtagtgttccagcagttgggccaccacctcggtatccgtctgggagacgaaggtaatcccctccgactggagaaactcccgcagctccatgtaattctcgatgatgccgttgtgcaccaccgcaaaccggccgctctcgctgacctgggggtgggagttgacatctgagggctccccgtgggtggcccagcgtgtgtgtcccagccccagtgtcccgtggaccgtcctgcccccctgtaccagatcttggagtacctggagacggcccttagccttgaccacctgcaggccctcccgcctgccgtaaaccgcgatgcccgcggagtcatagccccgatattccaaccgggagaggccgtccagcagaatgggggcggcctcctcccgtccgacaaatccgacaataccgcacatgggatttccctcctgtttctatactctaaagtagtagtataccacgtccccccctctcctggcaacctcaattccccttgcccaggcggctgaggggaggtgtctccaccagaatggtgtccgcgccgaagcggcgcaccgcctcccagggaaagacccggtcctcctcccggcccagcaggccaaacagccgcaggcgccccggcaccaccagcgcccggacctgcccgctatccagatccacctccacatcccccacccagccgtagcggctgccgtcggacacattgataatctccttataccgcagctccgaaacccggcactccatggcacactcccccttcggcacactctatgtgccgcccggcccgtcctatgcccgcttacctgccggtaactttcttgcactgccggaacaatgcgtctataatagagaaaacgaccatgccgggaggagaattccatgctggagaatctggcctactgcctcaacgctaccgcccccatctttctgctgatgctgctgggtctggtgttccgcaggctgggctttttcagccaggcctttgcggacaagctcaacgatttcgtcttcaaggtggggctgccggtcatgctcttcaaggatctggtggaatccgacttcttcaccgtgtgggacggcccctttgtgctcttctgctttctggccaccctgggctccatccttctgaccgcagccctcagcttgttctgccgggagcgccccctgcggggggaattcatccaggtgggctaccgcagcagcatcgctctgcttggggccgcctttctggagaatctctacggcaccgctggggcggccagcctggtaatcatcggcgcggtccccctctacaacgtggcagcggtgacggtgctctccctcaccagtccccagcagagcggcctcaaccgggccgcgttaaagaaagccctcaagggtattgtcacgaaccccatcatcctgggtatcgccgccggtctggtgtggacgctgctggacatcccccagcctcagattctgcaaaagacggtgtccagcctctccgctaccgccacccccctgggcctcatggccctgggcgcctccttcgatctgaagaaggccctgggccgctggaagcccgccttcgccgccaccgccgtgaagctggtgcttctggccgccctctttctccccatcgccgtggccatgggagtacgggacgacaagctggtggccgccctggccatgctggccagccccaccaccgtcagcagcttcgtcatggcccgcagcatggggcatgagggcaccctcaccgccagtacggtgatgctcaccacctttttcagcatccttaccctcaccctctggctctatctgctccgcacgctggggctgatctgacacaaacggcttgggagccgggctgaatgcccggctcccaagccgtttgttcggttacagtacgcccttgcagacattgaccacaaagtcctgcacgttggtgacaatggtgcgcaccgacaggctgccccggtcgcggagcttgttcaccgcaaactcagacacgtccaccgagtagaaatacaccgggcgcaccaccccgtccaccacccggtaggagggggtcatgttgccggtggccacggtatggagggtggaggccatgcagataaccgtggtggcctcccgcaccagggtgcgcatggcgtcctgcccttcatacacgtttccatagacctcgggcagagggccgtcatcccggacggagcccaccagcacgtagggaatgtggttgcgcacgcactcgtagataatgccgtccttcgccttgcccgcctccacgaaggcggcggtggagccgcacaggcggatggcattgagggtgtcgatgtggttatagtggccgtttggcatgctcttctgggtgtagatgtcctggcccagggcggtgccgaggtagctggcctccagatcgtgggtggccagtgcgttgcccgccagcaggccgtggacatacccgccccgcaccagggcggcgaaagccgcccgggcgtcgtgatcgaaggcacaggcggggcccatgacccacaggatgcggccatgctccttctcgtggcggagcagctcatagatggagtcgtagtccatggagtacgcggtctcccgggagcggccctggcggaatgcaaaggtctccgcctcccccttctcctcggcaaagccgaagggatagacatagatgccctcggaggcgtcctccgtgcggcccaccgccaccggctcgccggccttcaggttgcgaaactccaccgcggcgatcttcccgtcccgcagggcggccacgcagtccatgcggctctcctcagccagcagccaccgcccccccaccttgaaatactccggatagatggtggtggcgtggtagccctccggagccaccccatccttgggggccggctcaaaccgggcctccggcgcgctctggaaccgggtctcctggaagtcgggcgcatggtactgcggcagggtaaagctcataaaaaagaacccctttcgtcatttttctgtcccattttaccatgaaaggagcaaaactgccaacccccgcccggaaaatagttccgtacggggattggcagtttgctgcctctttttatgagattttccctgctccctgcctttccgccggggcggcgctggaaaagagcgcctttcccacctacagatttttcttaatctggttaatcgcgctctttctcccatccgcacatgcggcggatggggcccgaattttattcttccccggcggaagtaaattccgccggggcaaggttttgcttcgcaaaacgcttgcgcgccgcacctgcggcgctggaaaagagcgcctttcccacctacagatttttcttaatctggttaatcgcgctcttttccaggcgggagacctgggcctgagagatgcccacctcggcggagacctccatttgggtcttgccctcgaagaagcgcaggttgaggatgtgccgctcccggtcggagaggcggttcatggcctccttgagggcgatgtgctccagccagctctcgtcggtattctttgagtccttcacctggtccatgacacagatggtgtccccaccgtcggagtacaccggctcatagagggagaccgggtccagaatggcgtccagggcaaagaccacgtcctcccgcttgagctccagcagcttggcgatctcctcgatgctgggctcccgctggtgctcgctgatgaatttctccttagcctggagcaccctataggccgtgtcccgcatggagcgggacacccggacggaggagttgtccctcaggtagcggcggatctccccgataatcatgggtacgccgtaggtggagaagcgcacgtccaggtcggtattgaagttgtcgatggcctttataagaccgatgcacccaacctggaacaggtcgtccagattctctccccggttggagaacttctggatcaccgaaaggaccaagcggaggttgcccgcgatgagctgctcccgggcctccatgtccccctccttggtgcggcgcagcagctccatggtctcctcattcttgaggaccttcagcttagatgtgttgacaccgcagatctctacctttccctgcatggccgctgcctccctttgaccgactgaatctgtgttcagtatgtccgtggcgtggcctttcatacggctgcagggcgggctatattttttattgtgggacggttttcgatggactttgccgcccctcttgcgctttggcccggttcatgatacgataattaacaagaataatcaggtcagtttggaggtgtctccatgtttacgcctattttggacagcagccagcgccgccccctctacgaacagctctaccgctatatccggggggagatcgaggcgggccgtctcgccgccggagagcgcctgccctccaagcgggcgctggcagcccacctgaaaatcagcgtggtaacggtggagggggcctacggccagctcctggcggagggctacctccgctcggagcccaagcggggcttttttgttcaggccgtacaggaggagcaccgctctcccgctccggcccgcaccctgtccgtgccggccccgcccacgccggccctcccctatgacttctccaccagcgcggtggatactgccctctttcccttcgctacctgggccaagctcatgcgggaggtgctctccgagcaggccgcccccctcctggcctccccccacccccagggcctccctgccctgcggcgggccattgcggagcacctgtatcgcttccggggcatccgggcagacgcggagcagatcgtggtgggggccgggtcggagaccctgattggccttctggtacagcttctgggccgggaggggggctatggcgtggaaaatcccggctacaccaagacccagcgcatccttacaagctgcggcgctgccgtccgccccctcccgctggacggccagggcctgcgggtggatgccctggaggaggccggggtccgggtggttcacgtgaccccctcccaccactacccactaggcatcatcatgccggtagcccggcggcaggccctgctgcggtgggcggaggccgcccccgaccgctatattctggaggacgactacgacagcgagttccgtttctccggccgccccatccccgccctgcaaagcctggacggcggagagcgggtggtttacctcaacacctttgcaaagagtctggccccttccctgcgcatcagctacatggtgctgcccccccacctgctggagcggtggcggcgggatttctggttctactcctccaccgtcccctcctttgagcagtacgccctggcccgcttcatggagcggggccactttgaacgccacctcaaccgcacccgcacccgctacaaagcccggcgggaagcgctgctggccgccgcccgggacactggactgacgcgggttgggtccttcgccggaggcgacgcgggcctccatctgctcctttggatggacggccgctggagcgaagccgagctggtggcgcgggccgtggatgctggggtaggggtggcccccctctccgcctgtgatctcaccccgccgccccccggccgacctcccgccctgatcctgggctatacccgtatcgccgccgtggacatggccccggccctccggcggctgaaagccgcctgggcattctgagcagggcggctctgaaaaggctccccccgggaatgttatacgtttcaaccactcccgcatgtgaaatccggcacacgtttcacttgaacaggctcagttgcacccctaggggacgcggcaccggggcgtgggccggatcctgacggagtggtagccccgccaggaagcgggagggttctccgccgctgaggagcaccagctcctctctggcgcgggtcatacccacatagagcagccgccgctcctcggcctcatcggtgtccaggcccttccgctccagcggaatgcggccctccccaacgccgcacaggaataccaccggccactccaggcccttggccccgtggagggtggagagggtcaccgctccggcggcataactcagcccggcccggcgcagcagatccccctcctgcccgatggtcagattgcggagaaaggcgggcacatccccaaaaaacaccgccatattacgcagccgctccaccccgccagagggggtgtggtgggccgtccactcctccaggagggcggtgggggactttccctcctcctgctgcccctccagccaggccagcgcggcctgcacctccccgtccaacagaaaatcctcccggccggtgaccacgcagggaatgccgtcgtgggccagacactcctccagcagggccgcctgccgccgggtacggtagagcaccgcgatgtccccgaagctccgcacgccccgggcggcccccagcacctgggcctccagcatgccgacgccgcccaccatccgggcgatctccttggccacgaagatggcctccgcccggtccccctcggcggtgagcaggcgtacctccgccccgtgggggctgtgggtctccatgcgccggggcgcgccgtcgatggcctccgccaccggcagggccgcggcgagaatctccggggtggagcggtaattctccgtcagcctcaccgtccgctccgcccccagggcggagaagcagccggcgtccgccccgcggaagccgtagatggactggtcgggatcgccgatggcgaaaaaggtgccgccctcccgccgccaggcccggagaagccggagctggaggcggtcgatgtcctggaactcgtctaccagcaggtgggtaaagcgccggtccgaccggccgccctcccactggcgcagggtctccagcaggaggtcgtcaaagtccagctttccccccagcttctcctgatagagggcaaaggccgggtcgtccccgccgtccgctccggtcttgtgccgggagatcgcccggaggaaggccccggggctccccttccggcccagctccgccagagcggcggccgccgccgcccgctgctcataggggccggccaggggcacggcccccagcagctccaggcagatggcgtggaaggtgccgatggtcatggcgcgggccgcccgcttgcccagacgcccctccagccgcgcccgcagctcccctgccgcccggttggtgaaggtcacggcggtgagctccgagggcttggccccccgctcctccaccagccaggccacccgctccaccagggtgtgggtcttgcccgtgccgggtccggcgagcaccgccaccgtggcctccgccgccgaggcggcggtgcgctgggccccgttcagtcccccggtgggggccgccccctcctccccgctccgtgcgggtttcgccaccctgcccctggcggtcttggccgccttgggggcctccgcgccaaagaggctcacctgccccttgaggtcctcccgctcggcggggctgagcagctcgatcacgccgtaggcgccatcgtatcccggcttgcgcaccacctgtcccgcccgcaggcggcggatgccctccgccacgcagggcccggccgcggcccggatgtcctccagcggcacctcccgcagaatggtgaactccggccccagggccgccagcatggcctcgtacttggcgcccaccttcttgcctgcggcagagcccccctccgaggcggcgatcacctccggcaaaggcaccaggctctcaaagggcctggcatccgggcggacatagccctccggccggtccgccaactgctccacccggtggagcacgccggtggtcagccgcttgccgcacaccggacacacccctccggcggcctccgcctccaccggggagaggcacaccccacagttccggtggccgtcaaagtggtacttgccctcctcggggaaaaactcaatggtaccgtgaaagccctccccggtctcgatggcccgggccagctccgggtaggacaggcccgtgtccagcaggttggcctcccgccccagtttggacggcgagtgggcatcggagttggacaccagggtatacccgtccagggcggaacagcggcagatcattgtgggatcagaggagagcccggtctccagggcgtggatatggccggtgagatcgccgaagcactcctcaatggtgtcaaagccggagaaggccccgaacagggaaaagtggggcgtccagatgtgagcggggatgaacaccgcatcagggcaggactccagggtgatctccagcagatcccggcagtccaggcccaggatgggcctcccgtcggagtggaggttgccaatggcctccaggcggcgggagagggtctccgccgcctccagatggggcaggagaatcagggagtgaaccttgcgcaccttgccgtttttcttgtagatggagctgatctccccggtgattacgaaccggggcgcgtccggcccggctcccttcagggtatagagtccctcctccgcttcggccagcttgtcccgcagctcggcccgccaggcggggtgggtgaagtcgccggtgcctaccaggccgatgcccttccttctggcccaggcatccagcggctccggctccagctccttgctggtggcccgggagtatttggagtggatatgcagatcggcgatatacatgccgcttcctccccttcgcgttttttccccattttacccccttttccccatggacgcaagcggaaggatatgctacactggagtggacaggagggattgctgtgacactgctgaagcagtttttggagctgggactggactgctcccccatcggccttgggccgggccccagccagggcggctatttttgtacgccaaagggcctgaccgtgctgggctgggaaggcgttgacggcatccactacggccgcatccgcggctatggggatatggtgtttgccgtcaaccccatgcctgccggagagcagcatgtccgccccctggcaggcagcttccgggactttctgcgcctgcttctggcctgcggctccactaccactttggagcaggcaggagactggacgcgggagcagttcgacacctatctccgcgccccggaaaacgccgtcacgccggatgcacaggcggtgctggagcgcatcgcctccgccttccgtctcacccccatggaagaccccttttcctacatcaagggcgtacaggcatcctttgacggcggcaagctgcactataccgacgaatattacgacacgctgggcctggcccgcccggacaggcgcgaacccgcttcccagggctttgagtttgaggccgttgtgtttgcattggaaaaggagtgacctctatggacaccatgaacgctctggtctggaagggggacggcgcgctctccctggagcggcggcccatccccgccctacaaggcccccgcgacgccattgtgcgggtgacccgctccaccatctgcaccagcgacctgcacatccgcagcggcgcggtaccccgtgcccggcccggcgtggtgctgggccatgagttcgtcggggtggtggaggccgtgggaaacgggatttccaacctccgccccggcgaccgggtggccgcctgctgcgagagcttctgcggcgactgctggttctgccgccggggctatgtcaacaactgcatccacggcggctgggagctaggctgccgcatcgacggctgtcaggccgagtacgtccgggtgcccttcgccgataccggcctcacccccatcccggacgccctcagcgatgaggacgccctctttgtgggggacatcctggccagcggctactggggcgcggagctgtgcgccttccagcccggcgacacggcggtggtgctgggcctagggccggtggggctgtgcgcggcggagtgcgccgccctgctgggcgcggcccacgtcatcggcgtggagccggacccctggcggcggcggatggcactggagcaggggctggtggcgctggccctcaaccccgtcgatcccgagctggagtccgccgtggccgccgcaacggagggccggggggccgacgcggtgatcgagtgcgccggcaggcgggacaccttccaggccgcctggcggctggcccgtcccaacggcaccgtggcgctggtcgccatgtatgaggaaaaccagacgctccccctgcccgccatgtatgggaagaatctggtcttcaagaccggcggcgtggacgccagccgcggcccggagctggtgagcctgctggcccaggggaagctgcggacggatttcctcatcacccaccgggggccgctgtcggagatcctggagggctaccgggtctttgagtcccacgagggccactgcctcaaatgggtggtcacgccgggataacgcgcgccgcgcacagcaaaggggcgggccggaacactcgggcccgcccctttctgttcttagagctgctccacaatgatatccccccgggggacgtttttccattcaaagcagcccgccagctccgccggagtcaccagctccggccggtcggtctgccccgcccagaaggccagacggccggtcagctccgccggggtgaaccgctcccgcagggcacccatgtccagatcgtgttcccgcttggacagccgccgcccgtcgggggccagcagcaggggcacgtggtaaaactccggcggcgtcaggcccagcagcccatagagatagagctgccggggggtggagtccagcagatcccgcccccgcactacctgggtgatccccatgtccccgtcgtcacacaccactgccagctggtaggcgtacaccccgtcggagcggcggagaatgaagtccccgcagtcgcggagcaggttttcccggtacgtcccctgcaagccatctgtaaaggaaatctcctggtcaggcacgatcaaacgccaggcgggacagcgggtctgggccagtcgggcgcgctcctcttctgtcaagtgtctgcacttgccagagtagaccacctgtccgtcggagcggtggggggcgctggccgccaggcgctccgcccgggtgcagtagcaggggtagaccagtccgcgctcctccagcgcccggaaggcggcggcgtaccgcgccgtccgctcgctctggaggtaggggccgtgggccccgcccttctgatagccctcatcccagtccagccccagccagcggagatcgtcggccaactgctcggcgtacgccgcccggcagcggtcggggtccagatcctccatccgcagcaccatgacgcccccggcccgccgcaccgacagccacgccagcagggcggagaacacattgcccaggtgcatccggccgctggggctgggggcaaagcgcccccgtacgactccccccacgccttacaccttgcccagctcttggttgcggcggaaggcggcctccaccgcctggatggcggcggagcggaagccccgctcctccagggcggccaccccggcgatggtggagccgccgggggagcacacctcgtccttgagctgtccggggtgcttgccgctctccagcaccatggccgccgcgcccagcaccatctgggcggcgtaggtcaccgcctgcccccggggcaggcccacctttacgccgccgtcggccagggcctcgatgaaggggtagacgaaggcggggccgcagcccgccaccgccgaaaaggcgtccatctgcccctcggcgatgcgctccacccgcccggcgggggccagaaggtcctccactccggccagatactcctccgccgtgcccgcctcggcgcacagggccagcatcccctttccgatggcggcgggggtgttgggcatgacccgcaggagggcaggccgcccctgcgcccccgccagccacccccgcagggttccacaggtcaggccggcggcgatggacaccaccgcctgcccctcccccagggcgggagccagctcggagagcaccccctccatcatctggggcttgacgcacaaaacgatgtactccgcctgggcggcggccgcccggttgtcctgggctacggcgcaccccagctccgccgccagggcctccgctttggcccgggtgcggttggcgatgaccacctgctccgcccccacggcccggcacgccgcctgaatcaggggcgcgcccatgtttcccgttccgataaatgccgcttttttcatcctgctccgcctttccgcatagtccgaaatcaatgcttccttttccgcccgccggtactttttgatggccgcctcccgccggagggccgccccccggtcgggacacgcctcccggtagaccaccgccagcggcccccggccccgggtatacttggctcccctcccccggcggtgggccgccagacgccgctccacatcggcggcggtgccggtgtagagggttccgtccccgcagcggaggatatagacccaccagctcatggcctcaccactccggccgcagctcgggcaacagctccagctcccggaagaccgccgccacggcgctctcgtactcgccggtgtcccgtgccttccggatggccttggcgtgccgctggctgtccccgaacaggtggatgaggtagaaccagacctccttcatccgcagcatggcgttgcggcggctgccgaaggccccggcgtagccctcatatacctggtcgtgaaaggcccgcagctcctcccggcccgccgccgggccgccctcggccttccgggccagggcggggtcgcccgccagtccccggcccagcataatccgctccgccgccgggaactccgcctgaaaggcctccagcgccgggacggtatagagatccccattgtagcacaccgggaaggggctgtccgccagcgcccgggcaaaataggcccggcggggggtgtttttatacatgtccttctgcacccgggggtggacaatcagctccgccaggggatagcgctggaacagcgccagcagggggccgaactcctccggctcccgcagacccagccgggtcttgatggagacggcgcagggggcggcgtcaaagaccgtgtccaggaaccgctccagttcctctggcagccccagaaagccggagcccttgcccttggccaccaccgtgccggaggggcagcccagattcaggttgatctccgggtaacccatggccgccagctcccccgccgcccacaggaagtcctccgccctccgcaccagcagctggggcacggcggtcagccccccattgtgctcgggcagaatctcccgcagctcccgtttggtgaagcggtgatcctgggtgggggtgatgaaggggataaaatagcggtccacgccgccgaaccagcggcaatgggcctgccggtacagggctccggtgagtccctccataggggcgaatgcaatcttcacggctcttgtccactcctcacgcgcagggcggcaggaggcggagcggcctgccgccccgcctcccagtgctgcttatctggaaaaattgtagcctattttgccctattctgtcaagggtgcggcgttttgccccccatctcccccaagtgcaaaaatttgggttgacaacgggaggcaggcgtgttattgtttgttatgcggttagtaattgctaaccgtcattctcgggctttaaattagctataactaacctagagaggagccacacatatgacctttgaagaggcgctgatcgagcactgctcccccactctggccggggtaaagcccgccagcctgttccgcttctgcccgagggacagcgcccttttcgtgcgccggttccttgcgctccggcagcagttcgccgcccgtggactgcggctggtcatcctcaagggctgccgccgcacgggctcctacctgctctacctgtaccgggagcgggatttggcggaggtgctgggccgcagagaacaccgggattttctgcgcgctatgggctacaccccgtgggaggcgcccggcgactgcctgcggcagctggccgcccgcctctgtctggaggaggaattcccccacgagatcggcgtctttctgggctatcctctggatgacgtgaagggattcatccgccataagggcagggactacaccttctgcggctgctggaagtgctatggcgatccccaggcggcccgccggcgcttcgagcgctaccgccgctgtaccgcggtcctccgccgccggtatgcggagggaaccccgatcacccagctcatcgtggctgcttgatacaatacgtactttcattcagaacggtattcagaaaggatggttcaatcatgggtaagatcgcaatcgtttactggagcggcaccggcaacaccgaggccatggccaattttgtggcggagggcgcgggcggccaggccgacctgttcacccccggcgagttcagcgccgatttgatttccagctacagcgcgctggccttcggctgcccgtctatgggcgccgagcagttggaagaggccgaatttgagcccatgttcgaggcggtaaagccccgcctgagcggcaaaaccatcggcctgttcggctcttatggctggggagacggcgagtggatgcgcacctgggccgaggactgcgagagcgccggctgcaacctggtctccgagcccgtgacctgcaacgaggccccggacgacgccgctgccgagagctgccgtgcgctgggcggcgcgctggccgcggtataagtacatacaaaacggccggtgacgcgtgtcaccggccgttttattgtctgacgttcctacccttccatttcgggcagctttccccccaaggcgtgctccttcatcttctgaaaggtctcttcgctcaggtcgtgctccaccttgcaggcgtccgccgcagccacctccgggtcgacgcccagccggatgaaaaactgggtcagcagcttgtgccgctcataaatacgccgcgcaatctcctcccccgagggcagcagggagataaagccgtccttgtccatctcgatgtacccgctctcgcggagttttttcatggcaacactgacactcggcttggaaaagtgcagttcattggcaatgtcgatggagcggaccagcccatggcgctcatgcaggctgagaatggcctccagatagttttctgcggactcataaatgttcataagtctttcctttctgcagcagttcctttgctacagattaacacaatccatgtgtttttacaaggagtttcacaaaaagggcatcggtcagctcaactcaaacatgccacggtagagctgatagtattcgcccttctgcgccagcagggcctcgtggctgccccgctctacgatctggccgtgctccagcaccatgatcgcgtcggcgttgcgcaccgtggacaggcggtgggcaatgacaaagacggtacgcccctccatgagctggtccatccccttctcgataagggcctcggtacgggtgtcgatggaggaggtggcctcgtcgagaatcaggaccgggggatcggccacggcggcccgggcgatggccagaagctgccgctggccctgggacagattggcgccgtcggaggtcaccatggtctcatagccctggggcaatcggcggatgaaggagtccgcgttggcgatgcgggcggcccgctcgatctccttctgagtggcatccagcttgccgaagcggatgttgtcggcaatggtgcccgtaaacaggtgggtatcctgaaggacgatgcccagggagcggcggaggctgtcctttttgatgtcccgcacgtctatgccgtcgtaggtgacgccgcccccctgcacctcgtaaaagcggttgatgaggttggtgatggtggtcttgcccgcgccggtggagcccacgaaggcgatcttctggcccggctcggcgtagaggctgatccccttcaggatgggctgcccggcctcatagccgaagtccaccttctgaaagcgcacatccccccgcaggggcgccaggctgccgtccggcctgcgccacgcccagcggccggttttttcggcgcaggcggtcatggttccgccctcctccttcacgttgaccagctccacctgcccctcgtcggtctcaggcggctgctccagcacctcaaagacccgctctgctccggccagcgcggccagcaggaagttgctctgctgggtcatctggttgatgggcatggcggcctgccggacaaagaccagatagctggccagactgcccacgtcggtcatgcccttcagcgccatgatgccgcccagcaccgccacaagggcgtaattgacataggagatgctgaccaccgccggaatcatggtggccgcgtagctctgcgcgccggtgcccgctttccgcagggcctcattcttctcccggaacgcccgcaggctttcctcctcgtggttgaacaccttgaccaccttctgcccggccatcatctcttcgatatagccgtccagctcccccaggcagtcctgctgcttcttgtaataggccttgctccgcctcccactgaagcggacgtagaggaacatgaggacataaaacaccgctacgacgagggtaagctgccaattgagcagaaacagcatggtgaaggtgcccaccacctggatcgtactctggatgagcatggcaaagctgttgttgagcgcctcagagatcgtgtccacgtcgttggtgaagtagctcatcacatcgccgtggcgctgggtgtcaaaaaagcggaggggcagggtttggatgtgggcgaacagatcccgccggatgtcgtagagcaccttctgggccgccttcaccatgatttgggtatagcccaacgcagagagcacccctgcgccgtagatggcggcagtgaccgccacgcccagcaccagggtgttgaggctgccggccgccagactgttgaccaccggccggatcatataggtgccaagaaggttagccagggcgctgagggccaccagcaccgccacggccaggaacagcagcttgtgccgtcccaggtaggacagcagggtgcgcagcgtgtggcccaggtccttgggttttttagcactcagttgccgggacgccatggtcctcccctcctttcatctgagatgcgtagatctcctggtagatgggatcgcccgccagcaggctctcgtgggtgcccaccgcgtgcacccggccgtcctccaggatgacgatctggtcggtgtgcatcacggaggtgatgcgctgggcgatgatgagcttggtcacatccctcagctccgccagagcggtgcggatcttcccctcggtggcggtgtccacggcgctggtggagtcatcgaagatcaggattttcggccgcttgagcagggtacgggcgatgcacagccgctgcttctgcccgccggagacgttcacgcccccctggcccaggtcggtgtccaggccctttggcatccgctccagaaattcggcggcgcaggccgcccggcaggccgcccacagctcctcgtcgctcgcgtccggtttcccccacctcagattctcccgcacggtgccggagaagagaacgttcttctggagcacgatgcccaccgcgtcccgcagagcccggagatcgtactcccgcacatcccggccgcccacccggactgtcccctcggtggcgtcgtacagcctgggaatgagctgcaccagggtagtcttggccgagccagtaccgcccaggatgcccaccgtctgccctgccgggatatggagctccacgccggagagggcgtactcccgggcgccgctgtggtatttgaaggagaccccttcaaactccacgctgccgtcgggcacctcctccaccgcatcctccggcgaatccagcacaatattctcgtccagcacctcgctgatgcggcgggcgctggccagggaacgggtgagcagcaggaacacgttggaaatgagcatcatggagttcatcacctggagcacatagctgagaaagccggtgagctgccccacctggaggccgctattgagcaccatgtttccgccgagccacatgatgagcacaacggcggtatacatgaccagttggaacaccggcaggttgagcacggcgaggcggaaggtccgctggctggtctccatgagctcagagttgaccccctgaaacttctcctcctcgtactccccgcggacaaacgccttgaccgcccggatggcggtgaggccctcctgcaccacgttgttcagccggtccaccgccttctggagccgaccgtacatgggggccacccggcgcactatgacaaagaggacgccccccagaaccggcgcacacaccagaaacaccagggccagcctgggattcatccagaaggagaggcccacgcccatgaccagcatgacgggactgcgcaccagtgggcgataaccgccattgaccgtgttctggagcacggtcacatcggtggtcatgcgggttaccagtgaggaggtctcaaatttgtccaggttggaaaaggcatatttctgcacccgctcaaactgggcctcacgaatgttggcgccccagccataggcggcccgggcggtaaagcgggcgtacagcagccccgtggccagggccagcagggcgcagacgcccatctgaattcccctctggaggatcaccgccacatcccggttggccactcccacgtcgatgatgtccgccatgaggacggggatcaccatttcaaatgcagtctctaggatgatcatcaccgccgcgatcagcagatcccgccggtacggccccagatagcccagcagcagcctcaactccctcattccgttccctcctcccgctctgcccgaagattccggtaggcccgggacaggtaatcggcaaactgccgccgttcttccgggttgaagccgctcagcatggcctcctccatgacccggcagcgcctctgccagtccaggttgatctgcctgcccgcctcggtcagctccaccacgtctctccggcggctctgcccatccgccctccgggtcacaaagccgctcttttgcaggcagtccagcatccggcacaccgcagcggggtcaatctcaaagtagtccgccagttcccgctgacggcagggcccccggttcatcaggtagttcagcagcttgggctgcccaggccccagccccagctcgcccaggctgggcctcaggaagttgcgctgggcgtgaaacgcccggtacagcagcatatggaaggttcgctccacgttccgtcgtcccctttcttgatatatcaataattgatatatcaattatataaagttctccccgattgtcaaggctgcatttgttccctgcaaattttccctgggtagccgcacctccactggtacatgctatgcgggaggtgatttcatgcgtccggtctatacggatctctacgcgctcttccgccgcgatcccggcgcggaggaatacttcaatcagctccccgcctatgtgcaggaccagctcagcgcccgctgccgggccgtagactctctggagcgcctgcacgcctatgccgatcagttccaggccaagggttctccggagctggtggaggagaacggcggaaaggcctttctccctccgccgttccgcccgtgagcggtatatggcggggtgatctccccgccaaaacaagcaaaatgcctgctgctttcgcaacaggcatttcaaaaggcttatttccgcttggccagctctttccaaacggcctgggcgaccacttcctgcccctcaggggaacggagcacctccagcaccatggcgcggaactgctccctggcctgtcggcccccgaacagggcgtccagcatggtggccccctgggcgggcgcctccgctttcatcttctttggggctggggcgggccggtagaccggctcctcgtctgccccagagtacccctcactcatccagtcctcctgccgggtacggtcgttgctctccccccggaggtaaaacagggacacgccgaaataggaggccagcttttcctgctgctccttcgtgggggtctggcggcccgtttcaaacttctcaaaggcgtttttgggaaatcccagcgccagagaggcgggcacccgggccaagccggcctcggtgcgcagcgcctcgatcctctgtgccattgtcaccatggtggactccttctttcctgtattggattatttacttattataccgccccggcgggcgggccgcaagccttgacatatgctccgcccggtggtatcctagcttcataccaaggaggtgtgtggatgtccgtataagcgattcgccgttttgcggcgcagcctggagaggggcggaggtctctctgtttgtgttgcccaaaccggagaactgcggtacggaccgccccatgcgcccctgtccttatgggggattttccgctcgcggggaggtgcccgcgcctttggcgcgccggttctccgcgggcgttttttgtcacctggaaaggagtatcagaacggatgaaccgtgattctgtgcgcggcgcctgagcgaaggcttcggcgccgtatcccacccgctggtagcctttgctcattccaaatgattccatcaagtttggaggagcaccatgcgctatcaaaacgcagccgagctgctgcccgccgagctgctggaggccctgcagggctacctggacggcggttatctgtatatcccccggcgggcggagcaccgccgggcgtggggagagcgcacccggcggaaggaggagaccctggcccgcaaccgggccattttccgggactacaccgccggtctgggcgtggacgagctgtccgcccgctattttctcgccccaaagagcatccagcggattctcaccctgggccgccggggcctgctggagccatagtcctgcgccggagcgaagcacgctccggcgcagctttttttcggtaccgtctttgcggttgcctccgcgcggcccgctctgctacaatgggcgcgaaagcgaggcaagatacccatgaaccaatccaaccttctcaccgtccgcgtggcgggcgtcatgaaccggcaggccgtcgtgctccacgcgggccgcaccctcccctgcctgctgtctggccggctgctccggcagaaagatagcctggccgtgggcgaccgggccgaggcggaggtcctgggcggcggccagtaccgtctgacgcgcatcctcccccggaccagcgccctgcgccgccccagccgccgcggctccggggatgcccttctggccgccaacgcggattttgtgctggccgtgtgcgcggccccctccctgcttcgcgccttcgccctcccggagtgggcgctggaggccgcccgggcggcgggcctgcccgccgggctctttgtcagccactgggaccggctggccccggaggagggagacgccctggcccgccggctggagccgctccgcgcggagctggacagcctggcctggggctccgccctggagcctcccgccgggcttctccccgccctgcgcggaaaatccgtggccgtgctgggcggcccggggtgcggcaagaccgccctgatccagcgtctggccggggtgcaggcccccctccgccccaccactgccgtctctctctcccaggggccggacggcacactctggctggacacccccggtttccggggcgcgtcccccgccgccaagcccgccccggactaccgccgccaaccctgcggggagtccttctcctgcaaggcctgcggcgcgctggtcaccccagagggggccgccagccggcaccgcaaccactgcccccactgtctgtccagcctccacgtagacgaggagcccggcgaccgggcctgtacctgccgggggattatggagccggtgggcgtgtgggtgcgcaaggggggcgagtgggcgctcatccaccgctgccgcgcctgcggggccctccgctccaaccggatcgcggcggatgacaacccggccctcctcctctccatcgccctgcgccccctggcccagcccccctttcccctgtcctccctgtccggggtggattctttcccgggaaatgcggcataatgagggaaacgacagacaggaggcagacgcatgacacaggactggacactggaggaggccctcgcctattaccgccgccagggggcgccgggggagcagggggcgctggtggccctgctgcgggaggtgcaggaggagcgcggcggcgcactgcccgccgccgatctggcggagatcgccgccgccctctccctcagagatacctttctgtccgccatcatcaggcgttaccccggcctgcgcaccgaggaggccccccaccgcctggagctgtgcggcggcccccgctgctccggccggggcgcggcccgtctggccgcctttgtggaggagacctacggcgtgcgcccgggcggcgtcagcgccagcggccgcttcacctaccgcatcaccggctgtatgaaaaactgccccaacggccccagcctccggtgggacggcgcgctccactcccgcgctgacgaggccctcatccgcgccctggtggacgagggcggcgggcggccctccccttgacagtttccctccgctatgctacgatcggttagtatctgctaacaaaatattccggcacagcggagcggaaagggcgcggttttatgacaaagtatactcttgtggtggacgggatgatgtgcggcatgtgtgaatcccatgtaaatgacgccgtccgcaaggccttccccgtcaagaaggtcacctcctcccacagcaggaaacagaccgtcgtggtggcggaggaacctatcgacgaggcaaggctgcgccaggttatcgacgcgaccggctacacggtgcagtcggtgagctgcgagccctatgagaaaaagggcctgttctcctggggaaaatgagcgaaacagaggggcggagcgccggccggcgctccgcccctctgtttcgcagccgcttcacgcgcccggaagcccgcactccagcaggcggcacgtcccctccgccgtacactggtaggaggccacgccgtgggggacaaagagctcctcgcccctgcgggcccgcagggaaccgccctcccactggaactccgcctctccctccagcaccaggagcacctggaacccacggttgacacagagggcgctcccataggcctcccggcgcagctccacctcatccatatagaagcggggggtctgctccggcgtgatcagccgcttcctccagggctcctccgccccgggggcggggcggaaccggtgccgggccagcagctcctcccggggcaggcagtcaaaatggaagcagtccagcaggccgtccatgccggcgggtccatacatgctctccaccggcaggcgggagccgtccgggcggatgtactccgcccgcagggtgatatccaccggctcctgcagctcggccaccagggaatcgctccccatggcgtgggccgtgcccgccgggatgaagtacacctcccccggacggatggggatctggtgcaggcagtccagcagggccgccgtgtcctgccgctcgatcagcccccggaaatacgccggcgtgacgccgggccggaaccccagccagatgcacgcccccggacgggtgtccagcacgtaccacgcctcatccttcccggagggcaggccgaaatacttccgcgcccgcgccccgtccggatgggtctggagcagcaggcggtccctggagtggagcagcttgagcagaaagcccaggctggccccccagcgcgcggcgtgagcctcccccagccaggccgcagggttttccgccaggcagtcccgcagtaaaacgtccgtccccgccacccgggacagccccgtggcagtgccgggctggagggcggaggtcaccagggaggcgatccacatctgggaacacacccgcgcccccggcccctcccccagaaactcgttgatcatctcgcccccggggatcaggtagtccaccttgttgggggccagtctgagtatttggttcggtgataggttcattcgtcccagcctctttcccattgtgatactggggccagtatatcacaccgcagggccctgttccagcgtttctttttccagggcctcctggagcatctcccggagctccgcctggcccggtacgcggccgcaggacaccacccggcctcccaccaccagggccggggtggtcatcaccccataggcggcgatctgcatgaagtccgtcacatgttcaatggcggcgtccaccccaagctccgccaaagccgcacggacggccgcttccagggcgctgcacctggcgcacccggagcccagcaccttgacgctggcggcggtcttgtccgctcccacccgcaccgccgtttcaggggtacggccacagcagggcgggggcgtaccctttttcttttttccgaacagtcccatgtttcgttacctcctaaatggaaatcagatagaattggaacacgttgaacagatagccgatgaggataataccgcttgtgcagatggcgataaacagccccagcagtctgggcttcaccgccttgcggagcatgatcatcgagggcaggctcagcgtggtgaccgccatcatgaaggccaggactgtaccgagctgtgcgcccttggcgagcagggcctccgccaccgggatcgtaccgaaaatgtccgcatacatcgggacgcccaccagcacggccaggacaacgccgaagggattgctgccgcccagaacggtctcaatccatgactcgggtatccagttgtggatcaccgcgccgagccccacgcccaccaggatgtagggagctactttcttgaaggtggacacagcctgctcccttgcgtaccgcaccctctctcgccttgtcagctcgggcgactcaatgtctatactgccggccgaaaagacgaattgctcaacatgcttctccatgtgcagccgctccagaagtgtaccgcccgccacggcaagcgccagccctaccaccacatagaaaatggccaccttagtcccaaagatgctcatcagcagcaccagactgcccaagtccaccatcggcgaggagatcagaaaggaaaaggtgatgcccaggggcagccccgcgccggtaaaaccgatgaacagcgggatggacgagcaggagcagaagggcgtcaccgtccccagcagggcggacaccagattggcgcccacgccgtggagccggcccaaaatgtgcttgctccgctccggtgggaaatagctctgtatataggaaatagaaaaaatcagaacacagagcagtactgtaattttcaagctgtcatacaggaaaaactgtacactgccgccgagccgtccatggatatccagacccagcgcggacaggccgcgtccgagccactcgttcagccacttcatgcccaaaatctgctcctgaaacaggccccatagctccatatcgtttcgcctccctttatgtattatagatcaaaatattttgatgctttgctcgaaaacacgccatctactgtgacggcgtgttccgctcccgctattcaagcggtgtcccctgttctgtaaccggcgtagtcagctccagcagcagcttcaccgcgtactccctgcccgtcctgctcagctggtagtgggtccacttgccctcctgccggctctccaccaagccggactcgcacagcaccttcatgtggtaggatagcccggactgggtcagctccatgggctcctgcaagacacaggcgcacttttccccgccgcgcagttcctccaaaatggccaagcgcttgggatcgcacaacgccttgaatacccgagccgccgccctataatctctttccataaagccctcttcatatcaaatatttttgatattattttatatgacttttcttcactcgtcaaccctcaatttttaagcaaaagccatcccagcaggaaagccatactgctctgcctccgaaaacaaaggctgtataaaaactctgtatgtcaaatccctttccagcagaacatcggcagagtggacagagaactcttcgtaactatatagaacaagcggcacactgtgcccgataccgtataccttgtgtcctgccacagtacagcggcggggccggttcgcctacaactttgtagctgatatgatcacaaaaagtattttcagataagttgacaccctttccgctcaatggtataataacaccgttatataacactgttataaggcggtgaagtttgaatggaggagcggtccactgctacactggaaaaaattcagcaggcggctttggcggaatttctggacaagggatttctgggagcctccctgcggcagattgtaaagaacgccggggtgaccaccggggccttttacggctacttttccagcaaggaggccctgttcaacgccatcgtggagccccacgccgcggccctcatgggccgctttatggaagcacagactacctttgccgagttgccggaaaaggagcagccggagcacatgggcctggagtccggtagatgtgtggactggatggtggactatatctgcgcccaccgggagccggtgaagctgctgctctgctgtgcggaggggaccagctatgagcacttcgtccataacatggtggaggtagaggtggagtacacccaacgctacatggaggtgctccgccgcctgggccgggacatcccggtgctggacaaatccctgtgccatatcatcgccagcgggatgttcaatggcatctttgagatcgtggttcacgatatgccccgggatcaggcgatgcgggatgtggatcagttgcgggcgttttacaccgctggttggtcaaaactgatgggggaataatcccctatctttttgaaatgcggttagtttatactaactttaagaggaggttttttcatgaagcagaagagaaagagcgatgtggccgtcctgctggactacgcgggcagccacaaagggctgaccttcctggggctggccctgtcggcggtgtccatgctgctgagcatggcgccctacatctgcatctggctggcggcccgggatctgatcgcggtggcgccggactggacggcggcgcagagcgtcgcccaatacggctggctggcgttcgcctttgcggtggctggcatcatcctgtacttcgcgggattgatgtgtacccatctggcggccttccgcacggcgtccaacatccgtaagcagggcgtggcccatgtgatgaaggccccgctgggctttttcgactccaacgcctccggcctcatccgcgggcggctggacgcggcggcggccgacacggagaccctgctggcccacaacctggcggacatcgtgggcaccatcaccctgttcgtcgccatgctggtgatgatgttcgtctttgactggcggatgggggcggcctgcctgctggcggcggtgatctccattgtggccatgttctccatgatgggcggcaaaaacgccaagattctggcagagtatcaggcagccctggaccgcatcaccaaagcgggcaccgagtacgtccggggtatcccggtggtcaagatcttccagcagacggtctactccttcaaggcgttccaggaggctattgaggactacagcaccaaggccgagcactatcaggcggatatttgccggacaccccaatccgtcaacctgaccttcaccgagggggcctttgtgttcttggttccggcggccctgttcctggcgccgggtgccctggccgggggcgactttgcggggtttgtcacgaacttcgccttttacgcggtgttctccgccatcatctccacggcccttgccaaaatcatgtttgccgcatcgggcattatgctggctggcaccgctctgggccgcattgatcaggtcatgggcgctcccgagctgaaagtgccggagcatcccaagtccccccagagcagccgtgtggaatttgaggatgtgagctttacctacgacggtgcggagacgcccgccctctcccatgtctccttcacagcggagccgggacagactgtggccctggtggggccctccggcggcggcaaaactaccgccgccagcctgatcccccgtttctgggacgccgcctccggcgcggtgaaggtgggtggcgtggatgtgcggcagatcgacccccatgtgctcatggaccagatcgccttcgtgttccagaacagccgtctgttcaaagcctccatcttggaaaatgtccgggccgcccgccccgacgccacccgggagcaggtgcgcgcggcgctgatggccgcccagtgcggggacattctggagaagctgccccagggtatagacaccctgatcggctccgaggggacctatctctccggcggcgagcagcagcgcatcgccctggccagggccatcctgaaggacgcgcccatcgtggtccttgacgaggcgaccgccttcgcggaccccgagaacgaggcgctgatccaaaaggcattctccgaactgacccggggccgcaccgttatcatgatcgcccaccgcctgtccaccgtcgtgggcgcggacaaaattctggtgctagacgagggccgtatcgtggagcagggctcccatgaggagctgaccgccgccggtggcctctatgcccggatgtgggcggactacaaccaggcggtccagtggaagatcaccagcgaaggggaggcaaaataaatgttctctaaaaagtttcagcggaaatacgccctcaccgaccagggcgtgagaaacaccaaaaagggtgctttctggacggtcattgtcaatctggttgtcatgggcggcatgggcatcctgtacctgttgatgtacggcctgatggggaccctgacggacggagcgccgctgcccggcccggcgctttttcttgggctggtaatcgcattcgtcatcctgtccttcgtgacccacctgcagcagtaccacgccacttacggcctggtctataacgaggtgaagtccacccgcctcagcctggcggagcggctgcgcaagctgcccttgggctacttcggcaagcgggatctggcggacctgaccgagaccctcatgggtgatgtgaaccgcatggagcacgtctggtcccatgtgctggggtacctgtacggggcctacatctccacggccattatcgcggtgtgcctgctggtatatgattggcggctgaccatcgcctgcctgtggggggtgccggtggccttcagcctgctgttcggcacccggaagatctccgcccgggcctcggagcggacgaaaaaggccgcggtccgtgtctccgacggcatccaggaggcgttggaaaatgtccgggagatccgcgccaccaaccaggaggcgcgctatctggccgggctcaaccagaagatcgacgaccatgagaaggtcaccatccagggcgagctgggcaccggcatctttgttaatgcggccagcgtcatcatgcgcctgggggtagccaccaccatcctggcgggggccagcctgatcctctccgggcagatcgacttcatgctgctgtttttgttcctgctggtcatcacccgtgtgtacgcccccttcgaccagagcctggccctcatcgcagaactgttcgtgtcccaggtgtccgccgaccgcatgaatgagatatatgatacccccgcagccgaggggacggaaaccttctctccaaaaggccacgacatcgtgttcgaccatgtgggcttcgcctacgacaagaagaaggtgctggacggcgtgagctttaccgcccgggagggggaagtgaccgctctggtggggccctccggctccggcaagagcacctgcgcccggctggccgcccggctgtgggatgttacggagggcaccatcagggtaggaggcgtggacatctccaccgtggacccggaggcgctgctgaccgactactccatggtgttccaggatgtggtgctctttgacgataccgtgatggagaacatccgcctgggcaagcgaggagccaccgatcaggaggtgcggaccgcggcggaggccgccaactgtggggagttcatccgccgtctgccccagggatacgacacccccatcggagaaaacggggcgaagctctccggcggggagcggcagcgcatctccattgcccgggcgcttttgaagaacgcccccatcgtcctgctggacgaggccaccgccagcctggatgtagagaacgagaccaaggtgcagggcgccctctcccgcctgctggcaggcaagacggtgctggtcatcgcccaccggatgcgcaccgtggccggggcggaccacatcgtggtgctggaaaatggccgggtggccgagcagggcacgcctgcggagctgatggaaaaaggaggactctaccgtcgtatggtggagctacagagccacagtgcccagtggcaactcaacgggaacgaataacataggaccccgtagcagagactaggtagttttcctttatcagaaatttggccgctgatctgttactggtttttcgtttggaattatgaaagaatcaatcataaaacataaaaaggtcttaccgatttgcaaaaatcggtaagaccttttgttattaataagctatgcgttgcacttaaagacctgtgatgatctgactgaaatccaagaggtgtgaattgggaaagtattatcagatacaaaaaattttttcttaaaagcaccgttttcccggctaaagcaccgcaagagccggagacagaatgaaatctcctcattcccactcgctcctgttagatgttttctaaacagatttgcttatgggatttagctcagagtattggcattcttttcattattcagatagtaggggctatctgattttttgttgccatggtgttgccaccaatgaatttttctgatgattattctgtcggagtccatgtttcaataattgaattaccaatatcagaaatttgagtcaacaaattatttctgacatcagcatcattctcattgtgtgcttcccgcaccaattcaactaggtgcatatgctggtggtttctttcatcaaattcaggcaaccgcatatgtttgaaaatatcgcccacttgtatcatgatgtgaaaactggcaataaatttttggacaagactgcatgtaagcaagccacataagtagagtgcagtggtttcatcgtcaaactctgcaaagtaaattttgtgatccggaacaacaattttctcgccgacaccttgcagtgttctcgtattaactaccgctacagggagtccgctattaccaggctgttcaggccaaactactttccatggcgcaaatgtatagccacccacattatataccgcataatatggagcggaaggcattcttgtccgatatgtggagcgactccgcagctgctgttcaaatgcacggaaataatcatataaaagccgattgttttgctcaacttccgtttctgcttgggatagccatgtggatgtaattccgcgatttgggacgattgcatataactcatgctgcgggttatactggcaggccttcaggtcggaagctcccttaatcaccggataaagcaaattgtgttctacccaaaaacgacgtttagggccaatgtttgtgcgacctgcttcaggccttgtttcgatttgtacacgggtgccatcgtacgacacattaactacatttacaaagtatacaccattaagatcacatgtaattcccttacgcccctccgtccatgtacatttgccaactaattttttgcatatgtcaaaatcaccggaaggcaggattgcccaaggggacgagcctccttgaactggatttgcttcaagaaaagtgcgagtagtccgatttaatacctcttgttttgtggcatgctccggaattgtgcgtgattttccttgggcactactccatacagcatagtcaacggggaaagacggctgtactccgcctttttttgcgacaaaaatcacagttttatttgccgcatcaggaaatggttttagggctttcaaatcctctacgctttcagggaaaaggaaattattctcatcaatgcgaaaacgtctaaatccctccgaggatgctgactggaagtgtgtttgtgtaagcaagaagatcagttgcccaccacttctgagccatttgtcagagactgtgtaggtgataagtccagaaatgtccaactcattcccgccgtaataaggtgtacgtgagaaaatatcatatttacggcatgtaggagccactctgttccgatacagttctggtaactttgaccagcggacccacgggggattgccaactattacatcaaactcacccgcggttgatgaccagaagtaattgcggacaattcggaaccaaatcccgttccaatttcttctatgaagatctaagacacgtgcataagttgatgaaagtatagactcccaagattctctttcttctacagttatcgcattgtgcacaaggagtccatctatcatacgaacaggctccatatcattttccacacattcacccatgatagaaaacaccgtatcaagccgatctctactttgtgacaatactgttggcaaggtaattgtcaaatcagctacgttgcttcctatgacatagttcactacgctagtatctccctcatcgggagccggagcatagattgcatctgccagtaatataggaatctcaatatgtatccctggagcttcagcaatcaggtcagaaagcgcaatcagataatttacacgagctgtttgcaccgccagtgggtttaaatcaaatccccacacattttgagttattctttgtaacagatctacagcagacaaatttgagcattctcgaatcctttttataattgctaatagaaacgaagcagagccacaagtagggtcaaggaattttagctcatcaaattggccttcaactttatctaaagtcacgtctacaagccaatctggcgtatagaattctcccaagctctttctcaacacttgcggcacgatattctgatagaatcgtttaagcacatcatttgtctgagcatgggacaggtcttccatttgatacaaagaaagttttatcagaacctcttttaatgatgtaacaatatcatttacaacttcaggatatacattgcttgtacatgcatcaatataccaactaaacaacggctcttccacgaaaccgtgtatatttgcccttgtataaagttgtgagcgttcgatatccaaatctagcatcgagataagctcgtaatcacttacagacacagcattttgggcaaaatcagaatatgatgttaactcggtaagatgagaaacaatctcagcagataagagtttaataataattgaatcaaatgtgtgaatcacgaaaaggatacgagacaacttatcagttgatgtgctagtacaagtaaaaccaatagagtttataattgcttccacttgaaaagaactaagatcagctacttgcccatataaagctttccattcttggtaaagcatcttgactttgttgttattaggatcatcaagatatagcattaacgcagtagcaagagcctgcatgagattaccaccagcaactgaaccatgaccaaaatcttcaattaaattcgttgctgttactgctctacggcaagactggcggcatgcttcgaacaccatttgcacactatctggagagagtggcataatggggccaggaatgggctgtccattttcagatgaaatgtgaacaaaagcaatcgattcaccatcgatggcaattccttgataatgacgcacatctaaaccttcaataccagcctttgcagggatatatcttgagagttcctctaatgcttcctgaaatttagcactattttgattgccatgaaataggcctacattcttaaactcaataataacttgattgtagtcagcatcagatcgccctctctctgcatgaaatgtgatcgcgagcgtattctgtaaaatggtaagccaacctagtctaacttcctcttctgtttgccaatctacgcgctggcgattgagctgattgtattgttcggtatacattatttttccctcatgacacaattatttctcttacagcaggcttcaatcgaaaccgttgaacttgttttacttggtcgtttcctgcgttaattccattatatctccaatgtcacactgtaaagccgtgcagatttttaccagcacatctgtagtaacattttcattttttcctaatttcgccatcgaagcatggctgattcctgccgccgcacatagatcttttttcttcatatctctgtcaattagtaatttccaaagctttttataactaacagccatcttccacacctcagcaacaagttatatattctgaaaacgctgagcgctattcagtgttcgcaaacttttgggttattatatcatatttgccttagtgcttcaataagggattgtgaaagatgaaaggctaacagttaaagtttttaaatagtgcgcgacacaattaagtgttaaagtatttatggttagtaattactttcaaatacctgtccggctcaccatttaaaattagattgacatactccaacggagcgttatagatcaaccagtccagttctgacccgctggtgcatactgtttgccacctcgttcgccacggcggtgcagtcgatggagagcagcgtcccgtcttctaggcaaagttccacgcaggcggtgtccaggtttaactcacaggacaaaatctttctcatagtcgttacctcctaatacttaaatttcggttgattttccgcagcgacacaaggttcgtttcgctaattttagaatctggcaagcaatgcgtgtggctatccacacacaaatccagcaagcaatgcgagtgttaatacacactcacatttcctgccgtctgcttgttgagggcagtgccccccaagccccctttgaacacaggatttcattctgtggctacgcgttctgcgaacgctttgaaagggtacgccaaagcgccgtcccctttaagataccatggaacaaatcgttccacccttacgcctgatggctactgcgaaacacagtagccctcgctagatgcgtaggcaaagtattttcccatcgttcgcatttactttgcaccctgtgccctggtttcaaggcatgagggctactccttaatgattacatggtacgccttaaaatagggctcacctggaaagatggggtggcaaaacaccacctcacatttttttccgcaacggtggcgacggtcgcaacggtgctgggagtccccctcaaaacaccgtcgcgaccgttgcaagcgtcgcgctttacttgattacttcaacataggtgcttctatcaccacgtaggtcagccggatacgccgcccttcgtgtttgattttgtattcatacttcacctgatgttcttccagcagacgactggcatttacattcagatgcttagtaaggcggttcactgccatatccaaccgaagggcttcggcaagctctgttgggctgccttcccattcgcggttctcgtcagatacgattttcgctaccgcttccagcaccgggtccggaggttgcttccaaagctcattctctgcatggtcgagaagccataccaaacgctcctgatctttacttaaatacagccgctgatccggctgatcccgtccgctgatttccagtgtggcctttccgtcagttcgtttttctttctgcataatgagggccccatctgcacagcccgacagtccggtggtgccggaaatcttctcaaagctatctcccgcaggctgctttctggtgtggtggacaatcaggatgcaaactccatgccggtctgcaaattgtttcagctttccaatcacctcatagtcgctggaataactgtagttatcgctcaccatctcccgaactttttgaagggtatccacgataatcaatttggtatcactgtgttcccggacaaacttttccagctgttcatccagaccgctgccgatcatcttggcgctggtagcaaagtggagggtgcttgtcccttccacaccaaacatacggaacatcctgcgctgcaaacggctttcgtcatcttccagagcaagatagaggactgttccctgatgaaccttgtagccccacagatcctgcccggtgctgacatggtgggctatttgtgccaccagaaaagatttgccgattttgggcgctccggcaaggatatatgctccagtatagagcaggttttcaatcactgcggactttacctcaaatacattatccatcacctcatccagggttacagtgtgcaggtaagctgggtcgctcatgcgctgtatcctgcggtacatttcctccagactttcctgcggatttacaacttcatcattgatttcttccttggaagtggttatactaatgtcagaatttttagagattgactgcccatcgtctgcgccaacagatgagtcctgggtggtcattttctttttttcatcgatcataggcaatatcctcctgcattcctttcataatggttgtgatcatctgaatggtgtccaacagttcctcatttacgccttgcccggcttcgatccggcgcagctcgtccagcacagcaaccagctgatctcgcagtgccttatagactcttggattgccctgagccaccacatcccgacagagcagccgacggatgatataatcctgtttggtcagtcctgtgagcttgactgctgtttcaatctgggcatcctcctccggggagacccggaaaaatacggccttgttcctccaacggttgtgcttatccaaattctttgctgacattcttaattgcccctttccatattcaatttatctgccatttccgtttgcttggacggaaacaggtgtgcataattgtaagtgatgtcgatgctctcatgtcccacccggtccgcgatggctgtggcagagaaccccatatcgatgagaagcgaaaccgcgctgtgacgaatatcgtggattcggatgcgcgggactccggcctctttggagcctctatccatctcccgatggagataactcttggtgacggtaaacattcggtcatctgctccaattccgtagagcattttgaggtaatcctgaatttcctctgccagaaactgcggcatagtgataacacgattgctcttttcggtttttggagtggtaatcaaatcctgcccgtttagccgctgataggatttgttgatggtaacagttcgcttctcaaagtcaaaatctgccggggtcagagccagcagttccccctcccggatgccacaccagtagagcatttcaaaagcatagaaggatagtggtttatccatcatcacctcagcaaatttcaggtactgctccttggtccagaacatcatctcacggtttttctttttccccatgctgcctgcctttttacaagggttatcccggaggttatagtaccgaaccgcgtggttgaagatggcgctaagctgagaatagatttgtcaagggtaaattctgcgaaggaatattataacccataaaaggctcactgctggaggtaaccagcagtgagccttactttttcactaaaataagcaatcaggttcgattgcaaagctcaaatataaattgatttttgagacggtttatgctacatttaatatggatgcaaatatgcattaggaactaagcaggaggtataaaatggctatctgctacaacaaattatggaaaatattgattgataaacatatgagcaaaacgcagctaattaaagaagcaaagatcagtaccaacgccatggcacggctgggaaaaaacgaggacgttcgtgtcgaggtacttgtaaaaatttgcagcgttttgggctgcacaatagacgatattatggaaatcattcccgaagagaaggagtaataacaatggccgatatcaaaaaggaccaagagcgtgatgaactgcacaaagcgatttgggcgatagcagatgaattgcgtggaagtgtagatggttgggattttaaatcctatgtgcttggtatgatgttttaccgctacatctccgaaaacttgacaaactatatcaacgagggggaaatcgaagctggaaatgagggctttgattatgcccagttatctgacgacgaggcagaacaggctcgggaagatttggttcagaccaaaggtttcttcattcttccgtctgagctcttctgtaacgtgagaaaaaaggctgctgccgatgaaaatttgaacatgaccttggaagcagtgtttaaccatattgaggagtccgcaaaaggcagcgaaagcgaagataacttttccgggctgtttgatgatatcgatgtaaacagtaataaactgggggcaactgttgccaaacgtaacgcaaacttagtaaagcttatgaatggcattgcggatatgcagcttggaaattataaggataattccattgatgcttttggtgatgcctatgagtatctgatgagtatgtacgcatccaatgccgggaaaagcggaggcgaattctttaccccgcaggaagtttccgaactgctgactcgtatagcggtagtgggaaaaacagaagtcaacaaagtctatgaccctgcttgcggttccggttcgcttcttttacaggccgcaaaaatccttggaaaagagaatgttcgccttggcttttttggacaggagatcaacctgactacctacaacctttgccgtatcaatatgttcctgcacgatattgattatgataagtttgatattgcgcatgaagatacgctgacgcatccgcagcacttagatgatgaaccctttgaagtaattgtttccaatcctccatactccattaaatgggagggagacgacaatccggtgttgatcaacgatccccgcttttctcctgccggagttttggcaccaaagtccaaagctgatcttgcatttatcatgcattcgttggcatggcttgcaagcaatggcacagcagcgattgtctgtttccctggcattatgtaccgtggcggagctgaaaagaaaatccgtcagtatctgattgacaacaactttattgactgtgtgatccagctgcccagcaacttattttatggaaccagcattgccacctgtatcatggtgttgaagcggaacaaaacggataaccgtacactgtttattgacgcttccgctgaatgtgagaaagttaccaataacaataagttgagagatcatcatatcaagaaaattgtagatgcatttgtttcccgtgccgatactgaccactttgcccactgtgtaccttacgaggaaattgccaacaacgaatataatctctcggttagcacctatgtacagccggaggacacccgggaagtgattgatattacaaagctcaatgccgagattgagcagattgtggccagagaacaggtattgcgggatgagattgcgaagattatcgcagaaatcgagggataactatgaggctgagcagtaggttatccgataaaagtaaaaacagcggcgaaattgaatcatttattgattgggaaaaatacacgacagtgaaggaagaagaaacggaagagattcgctttattagtgcgggagattttatagaaattcaaattggcaccattactctgccattttactccacggcgtgtaaggatagtgtttcctttatttctcccaaacggcttcattgtttgattgtgaataattcgatgatcagtattgattgccaattgcgatgcatggactatgaggaggacaatcccaaatgcagggcgtgtcatccttatgtgcaagcatggtttttgattggtgtagatgatatttccgcaaattctccaagggtgagtgtggttaagcaaagcttcaaacttccggataagataaaactacctatcgaaacggaagataagttttcagaatggttgggaaaggcggaaattgcatacaaagaacggctgggtgccggagcggtcatttacttacggtcagcgtttgagcaaataacgctggaggttggacatagggctggagtagaagtatataagcccaatggaagatcaaaaccattcgatcaagtcataagagccgtagatgctcaatgctctatcattccggttatctactcagacgacggctataaacttttccagaggctcagtaatattgcccatggaaatgcagatgaggaaaccgctttgcgagaatacgaaccacttcgcagcttagtggttggaattatcgaaaatgtgaaaaagaaagaagaagaaatccaaaaaaatgctgaaatccaaaaagcattggagcaaataggattcaaccatggaggtgatgacagtgagtaagctggaagaattgatacaagaattttgtcctgatggagtggaatgctttccgttgtggtctgtaacaacttgggataaaaggtttaatagtgttgatcgttcaaagcagccaaaagtgattaattacccatatctgcttgctaaagatatgtttgcattaaaacgagaaaaaggaaatgtatttttgctttctaccggagaagaaacaggctggacaactgaggaactagcaggaggttatctttgcgaaggagaggttgtgacaataccttgggggaaatctcgtaaggttaccgaggtaatgaaatattatcgaggtaaatttgtgacggcagacaatcgcattgccacttctaccgatacttcgcaattaatgaatcgatatctgtattattggatgatgaaccaaggtgacactattgacagtttttatcggggttccggattaaagcacccaagtatgaaagatatccttgatatgcgcattccgatcccgccacttccagttcagcgtgaaattgtacgcattctggacagttttacagagcttaccgcagagcttaccgcagagcttaccgcagagcttaccgcacgcaaaaagcagtatgcgtattatcgggatacactgttcacttttacaagtgaaatcgtatttaaaacattgcccgaaatatcagaaaactgtgacaggcaaagaagacctattacaaaaggaaatagacaagcaggagtatacccgtactacggagcctccggtgttgtagaccatgttgctgattacattttcgacggagattaccttttagtgtctgaagatggggcaaatttattggcaagaagcaccccgattgcgttttcgatatcaggaaaaaattgggttaacaaccatgcccatgttttaaaattcaactttgcagagctgcaaaaatatgttgagatttatctaaactctatcgacttaagtaaatatatttccggtggagcacagccaaaattaaatcaagataacctaaacagaattcctatccctgttccgccagatgatgaagttaagagaatcgtcggtgttctcaccagatttgatactctttgcaacgacctagcaagcggcttgccagctgaaatcgaagctcgtcaaaagcagtatgaatattatcgagataagctgctgacctttaaggaggcatcggtttgaatgaatgattcaggcaattatgacatttttgaaggtctaagcggtattgtgaaggggcttgagacttttgcatatgccctcaataaagtgcagacttggtatcaacaaaatgccgacaatattgcaaattatcttttagcctttgcggaatttggagaatggagtgtagcgaccaacaaacttattgaaagccaatttgtatttacagataatttgacgcagacccttgcgcacgaaatctatcaaggtgctgatgtagaagaagtaatgactcgctactattttgataacgatgggcaaaatatgcaaaagctcattcaaagatgtaaagatagcgactacatccgagaatatcgagagttatatagccaaattctaaatgcatatgacagagaggattatctgcttgcctgtataggccttttttcattggttgacggcttgctcgcagattgttccggtatcaataaaactgcatttcaaaaacgattggactgtattgccgacaaattcgcagataaagctgaactgaatgaaatcgatagaaaaactctttgtatttatgatgcgttcaagaaatttgactgctcagtgttcaaagattcgagattttcagaagaggaaccgcaagcggtcaatcggcattgggatgtacatggtagaacgcatcgtgaacatacaagaattgattttttaaaggtccttctatggctggacgcagtgatctatttatctgaaaaagatgcgcaattaggaagggagggtgaaaacgatgagcacttacaacatgattttatcgagcaatgaaagcacagttgtggcagaatacgagccacaggcaaaacgctccgattcgtaccaaagtgaagcggcactggaacaggctttcattaaaatgctgatggaacagggttacgaatacgtgaccattcacagcgaagatgctctgatcgacaatctccgcaggcagttggagcggctcaatcagtatagctttaccgacaaagaatgggatagctttttcaaacataaaattgccaatcacaacgacggaatcgtggaaaagacccgtaagattcaggaggatcatgtgcagaatctcacccgtgaggacggcactactatgaatatctccctgattgataagaagaatatccacaataatcgtttgcaagtgattaaccaatacgaagaaagcgccgggaaacatgatacccgctacgatgtgaccattttggtaaacggcttgccgcttgtccatgtggagctgaagcgccgtggcgttgccctcaaagaagcattcaatcaaatcaatcgctatcaaagggacagtttttgggcaggttcaggtttgtatgagtatgtacagatttttgtcatctccaatggcacaaataccaagtactactctaacactacccgattcagtcatatcaaggaaaatgagactgcatccagaaaacgtagtaaaaaaacttccaatagctttgagtttacttctttctgggcagacggaaataaccgcaccattcccgatcttgtggattttaccaagacgttttttacaaagcacacgttgctgaatattctgacaaagtactgtgtgtttaccacagaggagcttctactggtgatgcgtccctaccagattgcagccacggaacgcatcctaaaccgtattgaaacatccaccaattataagaaagctggaaccattgaagctggtggatatatctggcacaccactggcagcggtaaaacattaacttctttcaagactgcacagcttgcgaccaatcttccctatattgaaaaggtcctttttgtggttgaccgcaaagacttggactatcagacgatcagggaatatgatcgctttgaaaaaggagctgccaacgggaacaaaagtactgctgttttgcaaaaacaactggaagacagcacttcccgtatcatcgttacaactatccaaaaattagatgtctttatcacaaaaaatcctgcgcatcctattcgggataagcatatcgttttgatatttgatgagtgtcaccgcagtcaatttggcgatatgcatacccggatggtaggcggaactatcaaaaaaggagaaaagactgttaaggtaaaccggtattttagaaactaccatattttcggatttactggaacaccaatcttctctgtgaatgcgtcaagcggcggaaatcccaatctgaaaactacggcgcaggcatttggcggagagccgaatgagaaaggggaaaaagtattaccgttgcatacatacaccattgtggatgctatcaacgatggaaatgtactccccttccgcattgattatatcaataccattaagcagaaagaaaatagtaaagacaaacaggtgacggctattgatacggaagaagctcttgcttcaccagaacgtatttctgaagtagtaaaatatgttctgcaacattttgaccaaaagactatgcgaaattcctattacagcctgaaaggtcagcgagtaaacggatttaactccatgtttgcggtcagttccatccctgcttgtaaaaaatattatttggagttcaaaaaacagcttgcccaaacgcatcgagatttaacaattgccaccattttttcctttgctcaaaatgaagaagatagtgcagatggaattttagaggacgaaagttttgataccgatgaattggatcagagttcccgtgattttctggagatggcgattgacgattataataagatcttcaagaccaactttgacgcttccagcaagggatttcaggattattacaaggatttgtccgacaaagtgaaaaagcgggaagtagatctgctgatcgtagtcaatatgttcctgacaggttttgatgctacgacgctgaacactctttgggtggataagaacctgaaaatgcatgggttaattcaggcattctccagaacaaaccgtatccttaactcggtcaaaacttatggtaatattgtctgcttccgtgatttagaagaagcggccaatgatgcaatcaaattgtttggagacaaaaatgccagtggtattgtccttttgaaatcctatgatgattattactatggatatgtagatgaaaaagggcgtaaacaaaaaggatatgaggaacgcattgccgagttggtgcaaaaatatcctctggggcaacctatcattggtgaacagaataaaaaggatttcatcatactatttggcaatattcttcgtcttcggaacattctaactgcgttcgaccgctttgtcggcaatgagattctttcgcctatcgattttcaggattatacgggtacttatcatgacgtatatgaggaaatcaagccaaaagccggtgacaaagacagtattatggatgatgtcgtctttgagttggaactgataaagcaggtagaagtcaatatcgattatatccttatgctggttgcaaaataccatgacgataattgcgagaataaggaaatccttgttgcaatcgataaagcaatcaaatccagcttgcagctgcgctcaaagaaagaattgattgagaacttcattgcaacaatcaacgctgacacaaatgtaaacgaggattggcaacgttttgtaagagagcaacgggaagctgatatacagtctttgattgctgaagaaaagctaaaaccggaagaaacaaaaaagtttgtagcaaatgctttccgtgacggtgtgctcaaaacaaccggtactgatgtagacaggattttaccacctgtttcccgctttggcggcggtggttcccgtgataagaaaaagcagacagttatcgaaaaactgaaagcatttttcgaaaaatactttgggctgcttagctcggaagatcatatcaatcaagaagaatcatctggaaatatgtaaaacaaaggcgaccaacttttacggttggtcgcctttgttcgtccttcaagcaatttcttgtaaatcagtgcgttatcgctccggatcaccatgtctgggcttttctttttgttcctgccgttttcgctgttccatctcttgctggtaaacacgattttctgcatcatcttggagtagcttagctatgtctctctgactatcgaacatcagcagaggatcatacttttcgccataagcagactgaatccggttagatgcggaggcagacttctccgaacgcagcgccattctctgtgcatacagttcaacaggttcaaagtctgcactctgctctttgagatctgcatattcactaagggcagtttcaagttcagaggaatacttttcttcctgctgttccaacttggaaagactggcttctgcgtcagcaatgtcctttttgatagcagcaattccactatcatccgcacagtccagctgattaagcagtacagccttttcggatttcagttcctcaatatcctcggtcagctttgcaattttagcagatagctccttatactttgaggtattccagaaagaaatttctttcttctctgtcagcatgttttttcgttcctttgcggcagttttgattttctgcactaacgccagatactccgcaagaataggctttgcagcatccagatattgactcagtttgtacttaccccggctgatatgacggagctgataccgaaatacgatcatattggcacgcaatgtttccatagcttctgcaatagcaggcaaactgtttttgacagcctgtgccatcttcttcatctgcgcttttaactcccgcagcaggacattgtccgccttgatctggcggttcagctcacagcgatcagagacgatcccctttttctccagtgctcttgcgattacaccttcatgaatggtgggctgttcatcaaacccccgttctgcatgactgcgatggtcgatgcgttcttcctgtccagcacgctccaaatgaagattggtcacatccgcccacgccttacgccagaggacaagctgttcttcgctgttccagcgctcagagattggattttgtctgccgtatttgatgcttttgggatacttagataccctttcataaccctgtgcctgcgctgcggacggggtcatatacaccttctttttgcccaccttgtactggtattgcttttcccatccatcggcctgtgcctgtttaaactcggcggcagtgaagccctgttccttgccgttcttgacacagagatattctttctcggtcttgtactgccattttcccttttcatccagcgggcgcaccgtcagcaggatgtgagcgtggggattgtgaccgggagggtatggatcatgaatcgccacatccgcacacatcccatcagatacaaaggtatcagaaataaaatcggacagcagtctttcccactgtgctttgcttagctcaatcggcagagcaaccacaaattcacgggccaggcggctgtcctttgttttttcgttttcctccacagcattccacagtgtttctcgatcctgccactctgcgggagcggcaaccggcagaaaaatctgctgccacacaagtccctgtttgcgggtgtagtcatgctgcactccatcgtactcattgagcatccgggagcagctcagataggccgcagcagccacggcagagcgtccggctccacggctgaccaccttggcttccaaatgataaattgccataaatcactctatcctttctgaacgggggtgctggaattgctcaaccctttatcccaaaagggagtcgtgaatcacaactcccaaccaaacaagaggtggaacgatttattacacccctgtatctgtgtcaagctgccggtggcaggttgacacaggcaggcggcgggatggggtggcaatgtaccaccccatgaacagggggttctattctggaatcccctgcgccgactgcatgggcaaggctggcagtttggcagaaatgcagccttgcccagcggcgtccgcagacgctgcaatccccctcggagagcgcacgatttccgcaggaaataccaccgccccttcggggtggtgagtaagtgcgcccttcgggaaaaaagagaagcgccccggtttcccggaacgctcccagctcatcgaactgatttgaatacttcccatagaaaatcctccagctgctccaaagtcatcctctgcacctgcggcaaagctttctctaaaatcgccccttcctggatgagcctacgtgttcgggctttacgttctttcactcgatcccgtgcctgagcttcctctaaacggtgcttagcctgtaataacttcttttcgtgttccatcataaattttccctttctgccgtatctggctgaaaatgcaaaaaaggcggcttatgagattttattctcacaagccgcctcggtgctgatccttatgctgttttccctttttgatccgactctttaatggcggatgcttctatacttttctgtttgtttttctttgccgctctgcgctccttctgtcttttataggctgcttctttcatgcaatcctcacagcagtatttcacgccgtttctgtctgtaataaagacagttccgcagtttccacaagtgcattctcgttttctttttttcgccgcttcctgccggtaatatttagagcgacaattttgattgcagaacatcgcattggacatttttgattcaaaggtcttcccgcagcacttacacacaatctgaaacggttcacctactttccgggtgccatccctcagtgctttgtaccgttctctgctttgcatacgatgcttgcgcaggtattcctgtcgcttttcttcctccggtgtcagttccgacgcaggtgccgcaaagtatccaataaagtttagatagatctccacttcctgcactcgatccccatccaccttttctggggcatgaacaaggattttgtctacaaactcgttgatcatcggcgtcgtcaattcggaaaagtccgtgtactttttcgccagtgcaaggaattgttcggcatttgcggtactttcttcaaaggccgctacttgtttttcaaactctgcaatctccgagcgcaaatttttttgttctgcttcatactccgccagcagactatcaaagcgttcatctgaaattcgcccaaccgcaaaagactcgtagagctttttgatgatgacatccagctcatctgcccgtttccggttcttattgagcttccgtttcgtatcttttacagcttctttctggcggagtgcagatgctgctctcaccttttccagaaattctttctggttggtgatggcataggtgctggctgcctgtattgtttccaagagcaaagtccgaatggctttagttgaaatatagtgactgcagcatacatccatcctgtttctggacgccagtttatacgctgagcattcgtaagcatcatagggataatttccgttttctaaatcaccttggaatcggtggttatacattttcgccccgcaatcagcgcagaacacgagtcctgtcagcggatttgcttctccaagggtatcctttcgcctgggggttttccgcagcttctgcaccagttcccatgtctctttgtcaataatcgcttcatgggtgttttcaaaaatcagccattcctcctgcggattacgaacactgcccttatccttataggattctttatgagaacgaaaatttacagtatgtccgatatactccggcttagacagaatctgccccaccatataaccgctccaattataggggttgggaaagtcttctttgcttttccaaaaaccgatccctttcttccccaaatagacagcaggagtttccaccttgtccttatacaaaatccgtgcaatttcataaggaccgattccttctgcattcatgcggaatatcctgcgtacaacctctgcggcttcctcgtcgatcagccagtggaatttatccttgggatcttttttgtagccataaatggcgatgtttgtggtcggcttgccagattcacctttaatccgaatcgctgtgcgctgttttcggctcaaatcccgaagataccattcgttcatgatattgagaaacggagcaaattcgttgctgttctggtcgctgctgtccacattattcgcaattgcaataaaccggataccatgctgacggaagaacacctccgtataaaagccggtttgcagataatcacggccaatgcgtgacatatccttcgcaagtacggtgctgacccggccttcctcaatatcgttcatcagccgtttccatgcaggccggtcaaaattgccgccggaatagccatcgtctgtatagtggacgcaattctggaaaccttgctgctgagcatagctttccagatattttttctgattcacaatcgagttactgtccccaacctgttcatcgtcacgggacaaacgctcataaagagctgtgatttttccttcagtctgttttacgctcatgatgcgctcctttcagactgacggctcatttgtggtgatcccattataccacaagaaccacaaggatttgcagcctcgctttgaatcagtcttaaaattttatcttccatcgtttctgttgctgtttcactgccgtatactctcacccgatagatagtggaaccgatacggcggtttatcatataaaagccctgcttttccttttcatttcccataggcaatatcctccggcaaggtttcagctctgcattcctgctgtgtaacgcttttcttcgctgttttcatggttttgatagaactcctttccaaacgcaaaatgccctccgaaaacccttgtgctatcagggtttcggaggggcaaatggttactttcgcttgttcctgaatttccgtactctcgctgcattctgctgacggcgggcagattccgcacactgttgggaacagtacacccgctttccatcagccagaaatttctggccgcaatactgacaggtgcggacaggctggctttccagtgacgcttgcagctccgggtcatttggcagaacagatccccgaaagtagcggcacatagcactgtttgtgtagcagatgccgaacatcggacaatcacagtccagcggcaagcacccgtactcgctgtcatagttggcgcaaagtcttttgatcagccttttgatggagcgtttctcttttgaagtcagctccctgttttggtttgacatcattgttttctcctttctttcataaagtgtaatcagaataatcattttcggattacctcctcactgataggagaaaacagcggtgtaaatcggaactgtttttcaaaaattaaaaaataaattatgcacagcacaagtttttgagataaaatagaagtcagaagggaggcgaagtcatggacgaagaacagaataatctgtggttggaagaagaaagcgaagaaaattcagaagaagtctcctgggcagaatctatccttgactttgccgactggaaccaggacgaggacatacctgtctgcgatgaagaactggaagaagcgctggcagaggaacggaacgctgctttggaaagtgagctggagcaggacgagcatcctttagaagcagaagacgatattccagaagatgccgattcagccgaatcgcccatcagcctgaatacgctccgacagcagatggatgaaacagctgtggagcgcatcagcttagccgcaagaacagagacagatttttctgtggttattggggaaatggaccgattggatcgcaaccgggaacgcagagagcgatatcatgaaaatcttcgtggagatataccgctggaatataagaaggcaaactatggattggttttccctgagtggctgaatacgccggaacagcagcttctgggcaaaggcagttttctggacttgatctttgactgtccttatgagatgcaccagctgactgctgatccctttctctccaacattgtggaacggctgaaggacgaacataaggaagtgctgtactttctctccctgcggctttacagcactgttaaagtagcagtcatgcgggggcaatctgatcgaaatatccgcaagctgcgggatacttacacacgaaaattacaacatcagctatatgaacatcttttgcggaagaacagcttgaccttgcgggagaaagaatttgttgctctgtatgctgcaagcttagagcagagcggaaagagtgcggcgaaggtcaagcgagaaaataaaacgccgccccgtaaaaagagcggcttgacaggatccaaaaaatgattttatacttgtaataggattataatatatcagattacacacggaggtgaagccatgcagaatctatttgcacacgccagctcctattgggtgcggtacaatcaatatgagataaagaccggaaagaatggcagacgatatatcatggccgcgcctgcggcagaaccgaaagtttacgatcctctaaaggattccgaaaaactggttgtggatgctctcaatgtcgggatgctctgtatgggtcggaaaagtgaggcggtcattgagcaggctgtactggaatttgttcatcagtatgggctgctggggctgatgaccgcactgcctaccacaccgtcctttatggactatgaggcagtttatctcccgaaaaacagatttataaaagcagaatccatgcagacagaagcatttttgtctttattctatccttttgaaaaattagatgtggtaaaagaaagcattcagtcaagctggaacatcaatcaggacagagcgatgatggcgcttgctatgacctttgccgagcagcctatggcgatgaatatgcaatttcagcgtcagtatgcggaaccgtatgaatggagcgtacagcaattcaaggattgggcatttacactgaccagcagctttttgttttaccacgactacgaccagctggatgaggcatccagaaacacctatcgtatgggcatggctgcttttggcggaattgcaccgacttatcatattgccctgtttgacaagcccgcagccacccccacgattgtctgggactttcactcgcttctaacggcaattcagctcatgttcagctttatgctgactgatgaggaaaaaccgctgaggctctgcgaacactgccagaaagcttttgtcgccagccgagccaataatgtattttgcagcccacagtgcaaaaaccagcataatgtgtataagaatcgggcaaagaaccgggatagagacgagaaacaataaaaaagagggggcgcttgccgcagctgattgctgccaaaagcgtcccctctgtctattttatgttatacttcatataccagctcatacagcacgatttcttctgcccggttatggatgctgttcatacggcgcacccattccatctggtctgccgctttcagagcttctgcgactccttcctgttttttcatagcagctatcatcacttccatgcgggcattgcagagcttgtcgatctcggccaggtgattccagagccgtccttccactatgagatccgagtaacgggcaggatgatgctctttcaaaaagtttcgccgcattcggccatatttgccgagctgatactcctcctgctctggaagttttatgtttgggataagataatccccctcctgacggtatgtgccgcccatttcttcaaagatagatttcatgacgacctcctttgtgtgttttggtttcggcagttgttgggatattttaactcctttcctataactgcttttcaattcaccacaaatgagccgcagtcatatgtattagatggcagaaaccaccctttacatagtaactcttgattgtgaaccgtcttaaggtacacaggtgaatagggctgtcccttttcatccttgtggttcagcatctcgttctgccaggtgataatctgctgggcagtgatgttgcacatcttcagcttgccgaagtatgggagtagctttgtgcggataatatgctcctttgtggcccaagtgttttccttgagccgggtcttcatatccgctgtataaagttccacaaagcttttgaagttcatatccagatcagcactggttttatgaacctgctcacgctcccaggcctgcgcctctcgcttagtcttaaaaccgcgcttttgggtctgcttccgctcaccattccaatcggtatagcgataaactgcccgccaggtgccggttttttcttccttgtaaacggccattatgattcctcctttaccgttttggtatagtaatacttctctctgaagaattctcgattgacacggccagagatggtcagataccctttctcctgcaattcttcattaagcccatggatcaccttgtaggcgtgggatttggagatacccaattcctgagcaacttcgtctgctcgcataaaactctgtttttgcataaatgaaataccttcctttccttgctggttgttttttcctgctgattttgtttctcataaagccctcctcactctctactgccacttttttcagattttgcacccaaaaattttgaaaaaattttcttcgggtattacagctaagcaaatatgctttgtttattgtaattatactaagcataatagcttatgtcaatcggcgtatgcaaaataaattaaataaaattgtttagtattctcttgactttcctaagcatttctgctacgctttttataaagacaaccaacgattggagttgacgatatggcgattggtgaacgaattcactttttccgtctcctgcgggggatgacacaaaaatatctcggtatgacgttgggattcccggagaagtctgctgatgtgcgccttgcacagtacgaaacaggatcaagaaccccaaaggcagacctgaccgctgccctggcacaggtattggatgtctcgccccatgcgctctctgtcccggacatagactcctatgtagggctcatgcacaccctgtttaccctggaggataactacgggctcaagatcagcgagatggatggcgaagtctgcctgaaggtcgatgttcggaaaaacaaggacgccgcccggctgcatgagatgctctggacctggcgggaacaggcagccaaactggaggtcggtgagatctcccaggaggactacgaccgctggcgttaccactatccagagtttgacaaggcccagaactatgtgaaggtgccgccccaggatctcgcttgaccatctcacttgtagaccatgagagaggccgtttgttgcacaggacaataataaaaagaaaaagagagctaactgactaatcaaaatcagttaactctctttttatgaataatgaaaaagtgttgccacggagggccttaacccctcaaaaacccagttatatcaggcttttccgggcatctgaaattactcccactcgatggtggcggggggcttggaggtgatatcgtagacgatacgattgatgcccttcacctcgttgacgatgcgggtggagatcttgtccagcacatcgtaggggatacgggcccagtcggcagtcatgaagtcgctggtggtgacggcgcggagcgccagggtgtaatcgtaggtgcggccgtcgcccatgacgcccacggagcgggtattggtgaggacggcaaagtactggttgatgttcttgtcctcgccggcggcggtgatctcctcccggtagatggcgtcggcatcccggagggtgtccagcttctccttggtcagatcgccgatgacccggatggccaggccgggaccggggaagggctggcgcatgaccaggtattcaggcaggcccagctcgcggcctaactgccgcacctcgtccttgaagagcaggcgcaggggctcgatgatctccttgaagtccacatagtcgggcaggccgcccacgttgtggtggctcttgatcacggcggcgtcgccggcgccggactcgatcacgtcggggtagatggtgccctgcaccagatagtccacccggccgatcttcttggcctcctcctcaaagacgcggatgaactcctcgccgatgattttgcgcttgcgctccggctcgctgacgccggagagcttctccaggaagcgggcctcagcgtccacccggacgaagtggatgtcccacttggagaaggcggtctccacctcgtcgccctcgttcttgcgcatcaggccgtggtccacgaacacacaggtgagctggctgcccaccgcctcggccagcagtgcggcggccacggaggaatccacgccgccggacagagccagcaacaccttgccgccgcccaccttctcccggatggccttgatggagctctccttgtagtcgcccatggtccagtcgcccttggcgccgcagacctcatagaggaagttgcggatcatgtccacgccgtgctcggtgtgattgacctccgggtggtactgcaccccgtagaggccccgcttctcgtcggcaatggccacgttggggcaggcgtcagagtgggcggtgagggcgaagccctcgggcaccttggccatgtagtccccgtggctcatccaggagatgccctgctccggcaggcctttgaagagcttgcaggcggtgtcgtaataggtctcggtcttgccgtactcccgggcggtgtcctcgtgggcctcggtgacctggccgcccagggcgtgggccatgaactggcagccatagcagatgcccagcaccggcacacccagctcaaagatggccggatcagccttgggcgcgcccgcctcatagacggagttggggccgccagtgaagatgaagccgatgggctccatagcgcggagttgctccagcggggtcgtgtagggcttgacctcgcaatagacgccgcactcgcgcacccggcgggcgatgagctggttgtactggccgccgaaatccaggacaatcacggtctgatgggacatcatcttgccttctttctctcgttttctctcacgccatgcccataggcccggcgatatttttacagtttaggataccatattccggcctaaagcgcaagcattccgtaaaaaagccgccggacccggtcaggtccggcggcttttcagcgcagtcttcaatccacttccgcgccgccccactccacggcggtgaagccggcgcgctccggcgcggttaacgtctggggctccacctccaccggcgcgtccagccccttccacgccaggaacacccggatcagggtatcgggggccgggtcgatggtcagcccggcggagtcggtgtaggcctcggtctggaaggagagcagattgtaggggttgccctccagctttggcagccagtagatgatgaattcgtcagcctcccgctcggtcaggcccagcctgtccagggcgtcctccaggaaggccgcagtgtcctcccctgccacgcagaagccggcggaaaagtcatactccgcctcggtgatcccctcccagaacaggcagtagtactcccgccccgtggccggattggtgagggtgccgtcgggccgggccgtcactgtccacccatcgccgtacgcaggataggtggaggtcagcgtcccatcaaagtccagagtgacggtcacctccatctcctcctccgggtagaggtagagcaccggcttttccggcaccgcaacatttccactggaattgccgcacccagccagtcccgccgccagcaaagtgagcgcaagcagcaacagcagcttcttcattgcactacctccgcgccgccccactccacggcggtgaagccagcgcgctccggcgcggtcagcttctggggctccacctccaccggcgcgtccaggcccttccacgccaggaacacccggatcagggtgtcgggggccgggtcgatggtcaaaacggcggagcttgtgtacgcctccgtttgaaaggagagcagattgtaggggttgccctccagctttggcagccagtagatgatgaattcgtcggcctcccgctcggtcaggcccagcctgtccagggcgtcctccaggaaggccgcggtgtcctcccccgccacgcagaagccggtggagaagtcgtactccgcatccgtgatcccctcccagaacaggcagtagtattcccggcccgtggccggatcggtgagggtgccgccgggccgggccgtcaccgtccagccatccccgtagtccgggtaggtggaggtgagcgtcccgtcaaagtccagggtcacagtcacctccgtctcctcctccgggtagaggtagagcaccggcttggcggctaaatcgccgcgctcctctgccgctccgcaggcggtgagaccggcagccagcagggctgccagggataaagtcagcagtcgtttcaaagcatttccctcctgtcgttgatattcatttagacgaagggactggaaaaaggttcccggctggccgggtcaattccgccccgccttttccctccgcacggagggaaagaaagcggggaaaatcccgctgcgggagcccagggcatggagcagtgggaagcagaccagaacggtaaccaattgaaccactataacatgattttccgtccgctcctcctgactgtagcgtaccgcttctccggccatgtccacgtagaagtcggtgcggtccaggggatagccggaggtgatctgctccaggaaggcggggtcctcctccaggtcggcccaaatcacccggcccaccgggaggacaacctgcccggatgcgaagttctctccatcctgtacgctctcagtatggatgcgggcagccacccgttccccggaggggagggccaaattatagagatagctgccctcaaaatagcccgctccctcgttgcggtaggcaataccttgggagagcactgtgaaagtatccagctccagcagctccgcgatactctgtgcccggggaacctctggcccggcaggactgcccgcctggccaggagcagcggagtgaacctctgcatagccgtcatacgtggccgcgctgagggcggaggctgcggcccccgtgcccagggacaccagataggccaccagcaggcagagccagatatcaaagcgaaggcggtgcagacgcatggcggtttcctcccctcagatttcagtgatgtcgatggggcgcagctcagcggcccggccctgggtgcggacggtgagcatggcccgggcggtgtcgatggcggtgatgcaggccacggagtgctccacggtggagcggcggatcttgaagccgtcggtgtcgtggcggcggccgcgggtgggggtattgatgaccagatccacggtaccggaggcgatcatatccagaatgttgggatgggcctcggacacgcgggccacccagcgggcggggatgcccgcctcgttgagcgccttgcaggtgccgctggtggcgagaagctcaatgcccatatcatagaagcccctggcgatgccaatcatctcgtccttgtcctcgtccttgacggtaatgatgatgcgcccgcccttcttgggggccttcataccggcccccttgaaggccttgagcagcgcctgggggaaggactcggccaggcccaggcactcgccggtggacttcatctccgggcccaggccggtatccacgtcggtgagcttctcgaaggagaacaccggcatcttgacggcgtagtagtccgcctcccggtagatgcccgtgccgtagcccaggtcgcgcagcttctgccccagcatcaccctggtggccaggtcgatgatgggcacgccggtgaccttggagatataggggatggtgcgggaggagcggggattgacctcgatgacatacacctggtcgtcatagatgacgaactggatgttgaccaggcccaccacgcccagggcgcgggacaggtcataggtgtacttcaggatggtctgcttgtgcctgtcctcgatgtggatggggggatagaccgagatggagtcgccggagtggacgccagcccgctcaatgtgctccatgatgccggggatgagcagctcctccccgtcaaacacgccgtccacctccacctcccggcccatgaggtacttatccaccaggatggggtgctcctgctccacctggttgatgatgcgcatgaactcggtgatgttgcggtcgttgtaggcgatctccatgccttggccgcccagcacgtaggaggggcgcaccagcacgggatagcccacctcgtgggcggcggccagggcctgctcggtggtgaacaccgtgcggccggcggcccgggggatgccgcactggttcaaaatctcgtcaaaccgctcccgatcctcggcggcgtccacgccgtcggcggaggtgcccaggatgggcacgcccatgtcggtaagggcctgggccagcttgatggcggtctggccgccgaactgcaccaccgcgccccagggcttctccagctccaccaccgcctgcacgtcctcggcggtcagcggctcaaagtagagcttatccgccacatcgaagtcggtggacacggtctccgggttgttgttgatgatgatggtctcatagcccagacgcttgaaggcccagaccgagtggaccgaacagtagtcgaactcaatgccctgaccgatgcggatggggccggagcccagcaccagcaccttccgtttctccgcgccatcatccgcccggctgtccccggcggcctcgttctcctggtcgtaggtggagtagtaatagggggtctgggcctcgaactcggcggcgcaggtgtccaccatcttgaaggccgggcggatgccgaaggactcccgcagggccttgatctccttctgctcccggccggagagggcggcgatccacgcgtcggagaagcccatctccttggcccggcgcagggtgtcgccgtccaggcggccgtgatccagggcgtcctccatgtccacgatgttctggaagcggtcgaggaaccacaggtcgtacttggtgatcttgttgatcttctccggcgagaagccccggcgcagggcctcggccaccacaaagagccgctggtcgtcgatgttcaccaggcggtcctcgatctcctcagtatacagctcggccagccccggcaggcggagggacttcaccggcagctccagggagcggatggccttcatcagcgccccctcgaaggagttgccgatggccatgacctcgccggtggccttcatctgggtgcccagggtgcggctggcggtggtgaacttgtcaaagggcaggcggggcagcttgagcacgcagtagtccagggttggctcgaagcaggcggtggtcttgccggtcacggcgttggggatctcgtccagggtgtagcccagggccaccttggcggccaccttggcgatggggtagccggtggccttggaggccagggcggaggaccgggacacgcgggggttgacttcgatgaccgcgtactcgaaggagtcggggttgagggccagttgtacgttgcacccgccctcgatccccagggcggagatgatgttcagggaggcggagcggagcatttggtactcccggttggccagggtctgggtgggggccaccacgatggagtcgccggtgtggacgcccacggggtcgatgttctccatagagcagatctggatgacgttgccggcggagtcccgcatgacctcgaactcgatctccttccagccggagatgcaccgctcgatgagcacctggcccacccgggacaggtggatgccccggtcggcgatctcccgcagggagggctcgtcgtaggcgatgccgccgccggagccccccagggtataggcgggccggacgatgaccggatagccgatgcgcccggcgaactccaccgcggcctccacgctctccaccacgtcgctggtgacgcagggctggccaatggcctccatggcgtccttgaagccctggcggtcctccgccttgcggatggactccgggctggtgcccagcaggcgcacgccgtacttctccaggatgccctgctcgtggaggttcatggccaggttcagcccggtctggccgcccagggtgggcaggatggagtcgggccgctccttggcgatgacctgctccacgctggccaggttcagcggctcgatatacacgtggtcggcgatgtccttgtcggtcatgatggtggcggggttggagttgaccagcaccacctccacgccctcctccttgagggcgcggcaggcctgggtgccggcgtagtcaaactcggcggcctggccgatgacaatggggccggagcccagcaccagcacctttttgatcttgggattcttaggcatgggcgcgtcctcccttcatgctgtccacaaagcggtcaaacagatactcggtgtccatggggccgggggcggcctccgggtggaactggacggtgaagcagttgggccgccggtagcgcaggccctccacgctgccctcgttgacgttgatgtgggacacctccgccaccgccgggtccacgctctcggcggtaaccacatagccatggttctggctggtgatataggcccggccgtgctccagatccttcaccgggtgattgcccccccggtggccgaagcgcatcttgcgggtctccgccccggtggccagggccaggagctggtgtcccaggcagacggcaaagaggggcagcgcgctctcatagagcttccgaacctccgcgatgatctccacgttgtccgccggatcgccggggccgttggagagcatcaccccgtcgaacccgccggagagcaccgtctccgccggggtgtgggcggggaacaccgtcacctcacagccccggttctggaggcagcggatcatgttctccttcacgccgtagtccatcagggccacccggagctgctgcccgcccgcggcggggtacacctgcggctccttccgggtcacccgctccacggtgccctccacccggtaggcccggatgcgctccaggcactccgggacagaaaaatgctccgcacaggtgatcatgccgttcatggtcccctgactgcggagtattctcgttaaggcacgggtgtcgacgccctcaatgccggtgatatgaaattgcttcaaataggaatccagcccgtcctcgcagcggaagttgctgccgcgccgggccaggtggcggacgatgaacgcctccgcccaggggcgggaggattcgttgtcctcgtgattgacgccgtagttgccgatgaggggatagctcatcacaatgccctgtccggcgtaggaggggtcggtcaggatctcctgatagccggtcatggaggtgttgaacaccatctcgcagatccgctcctcgccggagccgatgctgcggcccgcgaaggtcatgccgttttccaggatcaaggtcgctttcatcttctgcatcacgcctttcgttcccaagttatctgtacgattgtaaccgaaaacctcccgcctgacaacacccttttgcgcccggaagcaaaaaccgtggatttggacaaaaagagagggcgtattgccgatttttccacggcaatacgccccaaaagttaaaaataagattttgacctcattctttttttgcaggaaattcctccagcccggggcacagctccaccaccaccagctccggacggttatagaaccggggcagccgggtgctctcccgggccagcccccggctgacgagcagggtggtgtcccccagtgcataccggccgccggcgtaggtgggaaacagcccctggtcgggggcaaacaggccgttgagcaggccgggcagccgccactggcccccgtgggcgtggcccgccagcaccagctcgaagccccggcccgcgtagtcctccgtccgctccggccggtgggtcatcaaaatggagcagttctccccatccagggcggcggtcaccgcctccagctgctcccgccaccgggtctcgcccacagagggatcgtcaatgccgcagagctgcaccgtctgtcccgccgccgttaccgtcacacagtcccccgccagcaccaccgcgccccgttcctccagccgggccttcacctcgtccacccgccccgtccagaactcgtgattgccggtgacataataggtgggccataccgccgccagggcctccaccgtgtccagcgcccgcgcctccggcatccggggctcgtcgtccacgatgtcgccgcacaacagtaccaggtcgggtgactgctccgccaccgcatccagcagctcccgctggccctccccataggcgcaggcgtgcagatcggtgagcaccgccagccgcaccgggccggtgagtctcccgctctccaccgtataggcgcgtaccagcaggcgggcgtccagacccgccagcaaaaacaccccggctgccgccagagcggcggccagcactcctttcgtccgctttttcatgcgttcgccgctttcttttattgattttcgatattataacatccataccctcccagcgtcaaggcccctgcgtacataatccgcccggcggcggccatactgaacggtgaacattaccgcgggaggtcttctcatggtcatcgcatttctgcgcaccatcattctctacctctttatcatcgtgggcatccgcctcatgggcaagcgccaggtgggcgagctggagccctcggagctggtgctcgccctgcttatcgccgatctggccgccgtgcccatgcaggacttcggcatccctctgctcaccggcatcatccccatcctcaccctcctctgcctcaccatggccctgtcggtgctcaccatgaaaagcgtccgcttccgtgcggtgctctgcggccgtcccagcatcatcgtggaaaacggcaagctccaccagcgggagatgcagaaaaaccgctttacagtggacgagctgatggaggagctgcgtatgaaggggatcaccgacctcaattccattaaatacgccattttggagaccaacggacagatctccgtcctcccctacgcggcccagcagcccgtcactgcggcccagatggagctgcacccaaaggagcccggcctgcccctggtgatcatcaacgacggccgggtgctggagcacaacctgcgccagcgggggctggacgacatctggctggaccggcagctcaaggcccatcacgtaaagcgcagccaggacgtgtttctcctcactgtggatgagcagaaccaggtctacctggcggagaaggaggggcgggtatgaagcggctgtggatcgcagccctgctgctggctgtcctgttcggcgcaacgctgtgcaacaacctctatctgcggggctttaccggggcgctgaacgcccttctggagcaggcggaggcccgggcggagaccggggactgggaggaggcccgcgttctcacagagcaggccctcacacagtggcagtcccgggacagctacctgcacatcctcctgcgccattccgacaccgatcagatctataccggttttcaggaggtgctcgagttcctcacctgccaggaggccggggagtactccgccgccaacgcccggctcatgacccagatctccctgctctacgaggccgaacagtttaccctgaagaacgtcctctagccccggttgacgggccggggaaaacccggtacaatggcgggtgaaaggaaggctgatgcccatgaacacacccaccattctgctctacaatctggacaacccccggggggccaaaatccgccgtatgtgcctgtccctgcgcctgcgcaccgccctggtgcccagggagtcctacggcctgcccctgggtgagctggcggagggggccgtcccggaggccccctacgacggggacggctttgacgacgagatgctcctgatcgtcaactgccccggccctctgctggatctgttcctccaggcgttccgccgccagaagctcgcccccgtccggctgaaggcggtgctcacccccaccaaccgggagtgggactccgtggccctccatgccgagctgtgtcgggagcggcaggccatcgcggagggccaggccgcccatcggaagggaccggccggggaatgaagctgctcatctcccccgccaagaaaatgcgggaggacggggactttctcgccccccggcaggcccccgccctgctggagcgggcggcggtgctggcggagtggctgcgggggctggactacacagccctgaaaaagctgctcgcctgtaacgacggtatcgcggagctgaacttccgccgctttcaggagatggacctccgccgccccggcgcccccgccctgctctcctacgacggcatccagtaccagtacatggccccccacctgttcacccggccgcagttcgagtacgcagagacgcacctgcgcatcctctccggcttttacggggtgctgcgccccttcgacggcgtgctcccctaccggctggagatgggggccagatgcagcacccccttctgcaaaagcctctacgacttctggggcgattccctgtaccggacgctgaccgccggcggggaggacaccctgctcaatctggcctcggcggagtacgccaaagcggtacgcccctgggtaacccctcccgtgcggtggatcaacgtgaccttcggcgaggcggacggagacaaggtggtggagaagggggtctatgtcaagatggcccggggagagatggtccgcttcctggcggagcggaacgccgaaacgccggaggaggcccagggcttcgaccggctgggctaccgcttctcccccgcccactccaccgccgcctcctacgtatttttgcgggaggggcggacgaactaggaggtctccatgcttcaccgcctgctctgcctgctggtcggctatctctgcggcggcttccttaccgccgagctggtggcccggacccgcaccggcaaaagcgccgccgccctgggcaccggaaaccccggcatggccaatctggcccacgagctgggaaagggctggggggcggtggtgctggccggagacatcgccaagaccgccctggcctttggcctgtgccgggcgctcttccccgccctgggcggcctgtccggcctgtgggccgggcttggggcggtgctgggccataattttcccttctggcggggcttccgtggcggaaagggggtggccgtcacctgcgccgccctcatcctcttctcccccctgtgggggacggccgcctgtctggccggactggccgtcaccctgctctccggctggctgcccctgggggcggtggtgatccccgccctgtttgtccccccggcctttctctgccgcggccgggaggccgggctgctggccctgattctggccctggtcatgctctcccggcacatccgggggctgggccgcatcctccggggggaggaggagcggaaattccgcggccgctgagccccttgcggggcagccgaaaaatattgcgcattctaccattccgccggcgctttgtggtataatggtggaacaacatagaacaagagggattccgccatgcacaatgaactgaccaaaaaagacattcaaatgatgaaggaagagctggactaccgccgcatccagctccggccccagctcctggaggcggtgaaggaggcccgggccttcggcgatctcagcgagaacttcgagtacaaggccgccaagcaggagaaaaaccgcaatgagagccgcatccggttcctggagaacatgatcaagaccgccgtggtgctccccgacgcgggggccagcgacggggtgcagctctacgacagagtcaccgtctttctggaggacgagggggacaccgaggtgtaccaggtggtcaccaccatgcggcaggacgccctccacggccttatcagcaaggagtcccctctggggaaggccctgctgggccggaaggtgggggagacgttccacatccaggtcaacgatacctacgggtatgacgcggtggtgaaagccatcgagaagggcgccgacgacggctcggtgccgctgaaccgcttttgaaccaatgaaactgtcccgcgccggatggctccggcgcgggacagttttgttattccacccgcatttgcagctcggtgacgtactcctcctcccggttggtgtcgtgggcgtccacccggtacagctccaggggcggccccgccgggcggcggcccgccgccgcgatccccgccagcaggacgccgcagtgctcctccaggcggtcataggccccacggtaatagaggcaggcgtactcccccgccgggagggcgtcgtcatggggcaggcccggctccgtgaggaagaacacccgggagaagtggttatacactccccgggacagccactcctcatccaccgccgcccccatacactggctgccgatgattttgagatagtcctggtggcggtgctccagctttttcagcaggaagtcgatctctttttccaggatgatgtcctcctccaggaacacgtagggccgcgcctcctcccggcggaagaagacccgtccgtcctccgcggcgcggtactgctccagcctggcccggcgggcccgcgcctcctccagagccgcctccagctccgccatgcggcggcggagcagcgcctcctcccggtccagcagggacagcgtctcccccaccgaccggcgctccagataggtgcggatggcccgggttgggattttcagctcccgcagggcgcggatgatgttgagggtacacacgtcctgaatgccgtacatgcggtagcggttctccccccgcaccgggtggagcagccccttctcctcatagtagcgcagggtgtcggggcagagatcaaagagcttggccagctcgtggatctgataaaattgcttcaacttttttccctccggctcttgactttcggatagtacgagggtttaacatgatcttaacaagagggggttatgaacttgaacctggtacgccgctttttcaaattcaccgttccgtccatcgtgtccatgtggatcttctcgctctactccctggtggacggcatgttcgtggcctggggcgtgggagagcacgccctcaccgccgtcaacctgtccctgcccttcgtgtcgctggtgttcaccctgggcatcctgctggccaccggcacctccaccgtcctgtccatcgccctgggacagaaggacgtggagcgggcccgcaactactttaaccagaacctgttcgtggtcatcgccgccaccctgctcctggcggtgctggtcctgttcaacctggactgggtggcggacttcctgggggccaccggggaaaaccaccacctggtaaaagagtacgtgggggtcatcgcctgcttctccgtctttttcaccgtgtcctacaacctggaggtccaggtcaaggccgacggcgcgccccatgtcagcatcatcggcgttatctcctgcggcctgatgaacgtggtgctggactacatctttgtcatgcatctccactggggggtgtggggggcggccctggccaccgggctggcccaggccacgtccacggcggtgtttgtcgtctattttctcacccaccgctatcccctgcggttcggccggttcaagcccgaccccggcgcctaccgccgcattatccccctgggtactgccgacggcctcagcgagctctccaacggcatggtcatcttcctgttcaaccacatcatacagcgtgtcatcggccccgacgccctggtgtcctataccatcatcagctatgtgaataccctggtgcttaacagtgtgatcggcatcgcccacggcatccagcccctgtgcagctaccacctgggggcggaggagcggccggtgtgccacaagttcctcacctacggcatccgcctggccgcctgcttcgccgccggcttctttgtcctgtgtcaggtgctggccggggcggtggtgggcctgttcctccagccggacagcgccctgttcgcctcctcggtgtccgctctgcggctgtactccttcgccttcctctttgtgggcttcaatgtggtgacctccggcttcttcaccgccatggagcaccccatcccctccctgaccatctcctttggccggggcctggtgctgatctccggctgtctggtggcgctcgcctttctcttcggtgccaacggcatctggctctcccccctggtgtccgagtccctctgcctgctcattaccctgttcttcctgacccgctacttccgccgggtccggcgggaggccagcggggagagggatgggataccggatgccaggccgctggactgagcctccccgccacctggcaaaacggcgcatggcaaaaggccatgcgccgcagcctgtcggaacattctttccgacaggctgttcagactttttgaaacttcattccgtttcaaaaagtcatttgatccaacgcgaaagggaaccctgacggttccctttcacactatccttcccttcgaacgcctccacaggaggatttcttggcaacctccggcgcatggcaaaaggccatgcgccgtttctgatttattccgtcaggagccagcgctccaccgccatgccgacgccgccctccgcattggagccggtctcatagcgggcggccttcttggcctccgccgaggcgttagccatggcaaaggaccatcccgcccaggccagcatctccaggtcattgcctgcgtcgccgaaggccatgacctgttccggccccagccccagccgggcgctcagggcctgcacggcggtccccttgttgacgccgacggcggtaaactccagattttctgcgaaagaggtgaccatctccagcgcgccgcaggccgccgcccgctccatcagggactttcgaccctccggcggaacatggaacacatggatcttctccaccagccggccccgcagggcggcgttcagatccgccggaaagcgggcgtgctcctgaagcacccgctggaactcaggggaaaaggtatgggccagcacgccctccagccggtcccgctgaatccagctctctccctcgcaatagacctcaaagggcacgccctcttccagcagcagctccgtcagcgcctgccgggtctcctcgggaaggcagttgcggtacagccactcccccgtacacacatccagtacggcggctccgttggacagcaccgcgtagcgcagcacgcccagctgctccgccacctcgtgcagaaacccccacggccggccgctggcgacggccaccgccgtcccccgctccgacgccgcccgcagggcgcggacattccgcgccggcaccgtggcgtggtcggcccccagaagggtgccgtccatatccaggcaaatgagcttgatgtccgtcatttcttccgcttcaccgcatggcgcaccttttccgcgatgccctccggggtgaggccgtaggcctccaggacagcctccgccttgccggagcggccgaacacgtcgttgacgccgtggcgcaccaccggcaccgggtggtgttcggccaggaactccgccaccgccgagcccaggccgcccaccacgttggcctcctcggtggtgacgatggccccggtctccagcgccgccttgagcaccagctccccgtccaggggcttgatggtgtgcatatccagcacccggacggacaggccctcttccgccaggctctccgccgccttcagcgccatctgcaccatcatgccggtggcgattaccgtcgcgtcagagccatcccgcagggtgacgccctggcccaggtggaaggtgtagccggggatggcgtcggtgacgctctccaccgccaggcggcccagccgcagataggcggggccgtcatagtccagcagagcgcgcaccgcctgccgcatctcggggccgtcgcagggggagaccaccatcatgttggggatggcccgcatgatggcgtaatcctcgatgcactgatgggtggcgccgtcctctcccacggacaggccgccgtgggagcccaccaccttgacattcagccggggataggcgatggagttgcgcacctgctcccacgcccgcccggcggcgaacatggcaaaggtgttggtgaagggctttttgccgcaggcggccaggccggcggccacgccggtcatgttggcctcggcgatgcccatgttgtaaaagcggtcgggatgggccttggcaaagcccttggtcatggtggagccggacagatccgcgtccagcaccaccagctccgggtactcctccgccagggccaccagagcctcgccgtaggccgcgcgggttgcaatcttctcagccatgcttactttccctccagttctgccacgcgggcggccagctccgcccgggccttctcatactgctcggcgttgggggccttgccatgccagccgtagtccccctccatgaaggacacgcccttgcccttcaccgtcctggccaagagcaccgtgggctttcccttgcaggccgcggcgacagcaaacgcctccgccagggcggcgtagtcgtggccgtccacacggatgacgttccagttgaaggcctcaaacttctgatccagcggctcggagggcatcacgtccgccgtggcgccgtcgatctgcaggccgttgacgtccaccacggcgcacaggttgtccaggcggtacttggccgccgccatggcggcctcccacacctgaccctcctcgatctcgccgtctcccagcagggcatacacccggtagtcccgaccgtccgccttgcccgccagagccatgcccacggccgcggaaattccctgccccaggctgcccgtggacatatccacgcccttgacgtggcgcatttcggcatggcccgacatgtgcccgtcaatgcggcggaactgcttcagctcctccagtggaaaaaagccccgctgggccagagtggagtagagcgccggcgtacagtgccccttggagagcacaaagcggtcccgctccggggcctgcggagcgtcggggttcacccgcatcacgtggaaatacagggttgtaaggatatccagcgacgacagggagccgccgatgtgtcccgacgccgcgccgtacaccatatccagcgccagcagccgggaacgcgccgccgtcaatgccaggttttgaacctttgcctgttccatccgattcacctttcccatttctcagcccgatggccgtattttgaactgtctgtattaagtatatcgtaccaggcccgcgctttcaactggcgaactgtaaaaaacattggtttctctgcgcggctttggggaaaaaaggggggccggcagggcgcgcaggcgcccccggccccttatttctagtggatgttcttcatggtcatccatcgctttgagcggtagaaccaccagcccaccggcaccgagctggccacggcgacgccgcaggcgatgtagacgccgtagatgcccaggaagtgctccaggacgacagccaggatcagccgcaccacgatgcagttgaggaaggagttccacatgatgaacactgtatgccctgagccggtggccagggtgttgtaggtaaacatgccggcgtagaagagctggcagacaatctcaatgcgcaggttgaccaccgcccagtgctgcacctccggatcgggggtaaagatcatggcaaactggggggcaaacacctcggccaccacgataatcaccgccgccatggccagggccagcttcatgcaggtcttcatcacctgctcggcccggtcatagaggcccgctcccaggcactgggcgcacatggtgcccgcgccagtggtcagggcggagaggaagagctggcagaagtcgcggattttgttggacacgccgttgccggcggagacggtgacgccgtacttgttgatgagggtgagcaccaccagccaggagatggaggcgatggtccactggagggctaccggaaagcccagcttcagggtgcgtttgaccatctccgcctcggggcggagatagcggggcagcaggcccaggtccgcccggtggcgcagggagaacaccagagcggtcaggcaggatatcgcctggccgatcacggtggccagggccgcccccgccacccccatatggaaccctgccacgaacaggatatccagcaccacgttgaggctcaccgacgcaatgatgcagtacagcgggatgcgggagttgcctaccccgcgcaggatggcggagagggaattgtagacaaagatgaacagcaggcccacgccgcagatgctcagataggcggtggcctcctccagggtgggggactggagcaaaatcagcagcggccgtcccagcagcagaatgcccgcggcaaagagcaggccggcgatgaggcccacggtgagcatgttgcccgcggccttccgacggttctcgtggtcgccgctgccgaaatactggcccaccagcacattcccacccactgtcagcccaatggccaattgggtgagcatattcataatgatgctggcgttgttgatggcggaaattcccacatcaccgatgtagtgcccggcgatgatgatatccgtgatactataaatagcctgcagcaggctggacgccaccagtggcagggcataccggaccagcttgcgcgtgacgctgccctgggtaagatcctgttctacagcgggcatagcgtaccccctccttatatgcgttcaattccccgtttctttacacgttgttaaagtttactgcggatttcctggcaaggcaatactaacttttttgtcaccaccacacaaaaacggacggcttccgccgcccgtttccttataattccctataataacgcaatatacgtttactcctcgccctgttccacgccgcgccggcgctcccgcccgggccagaagttgttttcccgcatgatgtcacccagtgcgtccacatacttctccgacttgtgcactacaaaggcatccgcatcgatggggattctgcggtcgtgcatctggcggatactccagatatagagtatgtccagggcaggaatgagctgctccccgctgggcgtgagcacatactccaccttgggcggcaccgtgtcgtaggagatgcggcggatcagccccgcctccaccagctccttgagctgctggctgaacaccttttccgagatgggcaggattttaagcgtctggttaaagcggatactgccatacgtatagatttcatggaggatggtcatcttccactttccgccaatgcagtgcaacacatagtgatagggattagtcggtgtgtcaaaattgtccgctttcacaggcgttcacctcatattcttttgtgatacaactatataaagatagacctgcattatcatatcacacccccaccactcccacaagaaaaactttttccgccccactgtaacgcgccaaaattttttgctgaaatttgtgcaacctatccaacttccacagagatacacttttgtaccgaatagtttacacaatatccctttttctcttttattcgaattatacaatttcggagcacttaccttttggtacgtgcaaacctacaggttatctacttacataattgtgggtattgcacaaatttttattttccgatacactacggctcgaaaaggaaagcataagttccaattcatcgcattggtttcctgaaaatgctgacataagaaggagcggatttcaaatgatcaagcgtacttatgaagagctggagccctatttcgccgccggtcattttggcgtaacctgcaagcgctaccacggcaaggacgagaccggcgcccagaagttctggatcggtgtgtccgagttcgagcccgacggcggcgctgactgggcctacgacgacaaccccctggagaaggtctacttcgtcctggagggcgagatgaccgttaccgacaaagacggcaacaagtacgtcatccacaagaacgagtccatctccttcccccccaacgagggccgcggcctgaagaatgagagcggcaagcccgccaagatgctggtcatcatcaattatcccgacgcgcagtaagtaagaggaggaagcagaaatggtcaacgtgaagaaagagttcgtcgacaacatgttctccgtgaagggcaaggtcgccctggtcaccggcgccaccggcgctctgggctgcgtcctctccaaggcttacggctatgccggcgccaaggtgttcatgaccggccgcaacgagaagaagctccaggctctggaggccgagttcaaggccgagggcatcgactgcgcctacggcgtggccgatcccgccgacgaggcccaggtggacgccatgattaaggcctgtgtggcccagtacggcgaggtcaacatcctggccgtcacccacggctttaacaagcctcagaacattctggagcagtccgtggccgactggcagtatatcatggatgccgactgcaagagcgtctatgtggtgtgcaagtatgttgcccagcagatggtcgaccagggcaagggcggcaagatcgtggtggtcacctcccagcgctccaagcgcggcatggccggctacaccggctactgcacctccaagggcggcgccgacctgatggtgtcctccatggcctgcgacctgagcgccaagtacggcatcaacgtcaactccatctgccccaccgtgttccgcagtgatctgaccgagtggatgttcgatcccgagtccgccgtgtatcagaacttcctgaagcgcgagcccatcggccgtctggccgagcctgaggacttcgtgggctacgccctgttcctctcctccgacgcctccaactacatcacgggtgccaactgcgactgctctggcggttacctgacctgctaagcctggaaggaagtcgagcagcatgaaagaaatcaagaacattctcatctgtggcgcgggcatgatgggcaagaacatcggctatgtgtttgcgtccaaccccagcttccaggtgggcatgtatgatctgtaccccactgatgtggaggcgggcatccgcaccaacaccaggcagctcctggacaagggcgtcatcaccgagcaggagctgagcgaccgtctctcccgcatctcctttaccaacgacatcgacagcgatctggtgaagaacgccgatctggtgatcgaagccgtttttgaggacatgaagatcaagcgggagaccttcgccaagctggaggcgcgctgccgccccgacaccatcttctgcactaactcctctgtcatgagccccagcgagatctccgccgagctccagcaccgtgagcgctttgtgggcactcacttctggaaccccggccacctgatccccctggtggaggtggtcaagtccgacgcctccagtgacgaggtggcccagacggtgatggaggtgctgcgctccgtgggcaagaagcccgtgctgtgcaaaaaggacgtgcccggcttcatcgccaaccgcatgcagcacgccctctggcgggaggctatctccatcgtggagaacggcatcgccgacgccgccaccgtggacgaggcggtgcgctactccttcggcctgcggctgccccagctcggccccatggagaacgccgacatggtgggtaccgacctgacctataacatccacgactacatcctgcgggatctggaggactcccacgagccctcccccctgctgaaggagctgcgcgacgcgggcaagatcggcttcaagaccggcgagggcttccagaagtggacgcctgagcaggttgcccagtccaacgccgagctcaatgagtatctgattcggatgctctacggaaagtaaaaactttccctttccttttgtcccacactctgctatgattatccaaggaggaactttatcatgggtaaaaaagtttatgtggacctgacccatcccttcagcgcggagattccccgctggccctactttgacaagcccgagatcaccaacgcccacaccatggccaagggcggcgtgctcacctccaagatcacctgcaccatgcacaccggcacccactgcgacgccccccgtcacgtcatggagtacgagtttgacggccgccgcgcccgctacacccacgagatgcccattgatgcctacaccggcgaggctgtggtgctgaagctggacgtggagccctggaccctgatcaccgacaagcacctggacgaggcctgcaagaagtgcggcatcgaccccgcctccctgaagggcaaggttctgtgcctgaacaccggcatgcaccgcctgttcgatgactccaaggcctactatcactactccatcggcaccggcatcgacgccggcaagtggtttgtcaagcacggcgtcaagtgcgtcgccatggacagccaggccctggatcaccccctgcacaccgccatgggcaacaacggcatgacccgcatgaacctgctgggcgccaccggcaagcccatcaccgaggagtacaaggagctgttcggcgaggaggcctatgccgagttcgacaagttcgagtacatccgcatccacggccaggccgcctacgacgagaagttcggcgagctggaggatctgggcgtatggggcacctgggagccctgccacaaggagatgctgggccacggcatcgtgggcgttgagaacctgggcggcgatctggacaagatcaagccgggcaaggtcttcaacttcttctgcttccccctgcgctggtacatgggcgacggcgccatgtcccgctgcgtggccttcatcgacgaggacgacgtggatgccagcgtgcccgaccgcacctacaaatacggcggcaccggctacgccgatgagtccggccacggcgacagtggtctggagtacatgcgcaagctgttcaaccgcaacaagtaatgcaaccggattgagttccacccataccgtaaagcggcgtgcgctatgcccgccgctttacgtgatgtccacaccaaatggagaaaggacctgaattccatgagcgagctgaagaacaagacgatcatcactgtggccactacgggcgcctggcccaccaaggccaacaaccccaatgtgcccatgaccccggaggagatttccgaggacgtgtacgcctgctggaaggccggcgcggccatcgcccacctgcacatgcgggacgacgaggggcacggcaccatggacagggagaagttccgcaagaccgtggagctgctgcgcgccaaccaccccgactgcgacatcatcctgaacatgaccacctccggcgacatccacgccgacgacaccacccgccagatccacctgaaggagctgcgccccgagatgggttcctatgactgcggctccatgaactggctgcacacctccctgttcctcaaccctcctgcctttctggaggagctgggcaagaacatgcaggagtggggcgtcaagccggagatcgaggcctttgaccccggcatgattgccaacgccgcctactacctgaagaagggcgtgctgaaggccccccttcacttccagttctgcatgggctgcgccaacggcatccccggctccctgaagaacctgatctttatgaaggaaaccatggagtccctgtgccccggctccacctggagctgctttggtgtgggccactgcgcgttggagatgctgtacggcgctgtggcgctgggcggccacatccgcgtgggcatggaggacaacgtgatgtacgccaagggcgttctggccgagagcaacgtgcagttcgtggagcgcgcccgccgcgtcatcgaggagtacggcaagcaggtcgccacccccgccgaggcccgcgagatcctcagcctgggcaagtaaaacatatcagacaggaaagccctgcaggcagaagcttgcagggctttcctcccgaaaaaaggttttcaacaggcggaacgtcgtttgacccaatgaatgtgacaggaaaccctgacggttccctgttacatgacctttcccccgcccccctcctgtagaaggatttagcgacagtctggcttttttccgtcccgccgttgtggtatactgaaaaaaacgacgagaggagggcccgcgcttggaatccctggaggcccttttggaactgctcacccccctggcccggctgggccgccccgcacttgccgccatcgacggccgctgcggcagcggcaagagcaccctggccggactggcggcccacaggctggggtgccccctgttccacatggacgattttttccttccgcctgccctgcgtacaccggagcgttatgccgctcctggcggcaacgtccactatgagcgggtggaggcagagctgctgcgccccctgcgggagaccggtgcggcctgcttccgccccttcgactgccgctccatggacttctccgcccccatccgggccgagctcaccggtctggcgctggtggagggcagctacgccctccaccccgccctgcgtggctggtatgaccgcaccgtctttctgacctgctcccccggcgagcagcggctccgccttctggcccgtgagggcccgaaacggctccccgcctttttagagcgttggattcccctggaggaggcctatttccagtccaccggtctgcccggagggtgtgacctggtgctggacaccaccccctgataccgcaaacagcggcggaacggatgctccgttccgccgctgtttcagcctgtcgaaagcttcttttcgacaggctgaaggaccttttgatgcttcaaaaagtcctttgatccaacgtgaaagggaacccctgacggttccctttcacgctatccttccctccaaatccttcggccgaagggtttaccgaccgccgccgcttactttatacctcaccaggccagccgattttcagggtcataccctcctgtcccacacccgcgctgcgggtgatgggcaggcgctgctcctccgagaagccgatggtctcgccatcccggagggtcacgtcctcctccagcagataatccgcgatgttcaggaggaaattccgcacctcggcgggctcggccctggcgtccagcacctccagttcgtccttgccgaagctgcgcaggccgtcggtataggcgcccatcccctcctccgtccggtagaggcccacccacaccagattgagcaggggcagctctccctcgtccagcggggcggccgcctcctgatagagctccggcggatagaccgtaccgttggcgtacacacccagagtccccgcctgcccgcaggcggcgcacaccagcttcacctggagggcggcggccttccatggcccggcctcccggcccaacaccgacaccaggagctgccccttgtgccgccgggcagccgcctcggcctccggccacaggtagcaccgcccggcggcctcctccgcctcgccgtggggcaccgggaaggggtagaggctcagggccgccagcatcccctccacctcaaagaccagggtgctctccccgtcctccccatcctccggctcggtcatgcagggaatgccccagtggtcccgcagcgcccgcttgaaggcctcggggtcccactccggctcctccagcagcacgaaggccagaaaattccccgcggagccgggctgctccagagcgggctgcccctcctcccgcaaagagaagtcggccccgaacagcaccatctggctgtgcccgcccccctggaaacacagccgtagcccctggtcccgctggatggtgaaccacgccagctccagcccgtcggtctgcagctccgccctcagctccaggaaggttctgccccgccggtccagctcgggcaggcgggccgccagcgccgccgcccactccgcggacagcttggacagggcggcctcgttgccgaaaaagcggccctgtaccgtcccctctccgtagggcatggtgaaagtgcaatagggggcgtcggcctcccactccgtcacgcccagggccgccttgacggcctccagattggcccggtcgcagaggatacaggcgatggccaggcgtttgtccgccatctccccctcctccgcctctccggcctggagccgccggtcctgctccgggtcgatccagtggtactccatctcctccaggctcctgccctcccggatctcccgggccagggtggtgaactcatagtcccccggctccagggccagcccccgctccactgcggccagggccccggccgtgtcaccaaagtggctgcgcagcttgcccagttgtagccagccccacacatagtccggctccaccgccactcccttttccgcgtaggccagggcctcctccagccgcccgcagtacagcagggcgcaggagtagcggtagtaccacatgccgcagcgggcggcctccgcgctcccctccgacgcggccatccactgcgccgcccggcagtacgactcatattcgtccaggttgttgcaggcgtaggagtaccagagggccgtctccaggtcggcctttgccgcctcctcggagaagcgcccccggcgcacgccgtcctccacccgcttctccaggtagtccagcatcttgtaaaagtaccctgtggagccgtcgctcatggcctccaggttttccacatcctgcggtgacagtaccaggctctccatatccatccccctcgcaaaataaatataatttataaaatctgtttttattataacagggcgtccctcccctggcaagccccattccggcggggcgcgggaaaagccgggcgcaattcccctatccccttgcatcctccaccggaacgtgcgataataaactgaaatcacccgtttaatcaaaggaggttcccgcatgaagcccacccaagcctgccgccctgaaaacctgcactatctgaaaatgctggcccgtcagtaccccacggtccaggccgccagtacggaaatcatcaacctgcaggccatcctgaacctgcccaagggcacggagcactttgtctccgacgtccacggggaatacgaggcctttctgcacatcctcaactccgcgtccggggtcgtgcgggaaaagctggacgatctgtttgccgccaccgtctccaaggcggagcgggatcagttggccaccctgatctattaccccaaggagaagctggaggagatccagcgggagacccccgacatgcgggagtggtaccgcatcaccttccaccggctcattgagatctgccgcctggtcagctccaagtacacccgctccaaggtgcgcaaggccatgcccagggagtacgcctacatcatcgatgagatgctgcacacccactacgaagacaacgacaagcgggactactacgagaacatcatctccaccatcatcgacatcggccgggcctccaacttcctggtgcagctctgcgagctcatcaagcgcctggcggtggaccacctccacgtggtgggggacatcttcgaccgaggcccccgggcggacatcattctggactccctgctggactaccacagcgtggacatacagtggggcaaccacgacgtgctgtggatgggggcggcctccggctcccgcaccctggtggccaccgtgctggccaactccctgcgctacaacaacctggaggtcatcgagaccggctacggcatctctctgcgccccctgtccgtctttgccaacgaggtctaccgggacaccgacgtgtcccgcttctccgtcaagctcaccggcgaggaggcagagcggtacaccgagaaggacaagctgctctccgcccggatgtataaggccatcaccatgatcctcttcaagctggaggggcagaagatcctgcgcaaccccgacttcggcatggccgaccggctcctgctggacaagatcgactacgaaagcaggactgtgacggtggacggcagagcctatcccatgctggacaccgacttccccaccgtcaaccccgccgatccctacgccctcacccccgaggaggagatcctgatccaccagctcaccctctcctttctccacagcgagaagctccagcggcacgtccgcttcctctactccaagggcagcctgtataaaatcttcaacggcaacctgctcttccacggctgcatccccatggcggccgacggctccctcctctccttcccggtgaacggggggcgtctctccggcaaggccttcctggactatgcggatttggccgcccgccgggcctactactccgcccccggctcggcggagcgggccgccggcatggacttcctgtggttcctgtgggcgggccgcaacagccccatcttcggccgcgaccgcatgaccacctttgagcggcgtttcctcgccgacgagtccacctggaccgagcccaaaaacgtctactaccagctctacaacgacccggagatctgcgaggcgctgctgcgggagttcggcctggagggcccccactgccacatcatcaacggccacgtccccgtcaagtccaagaaaggggagagccccatgaaggggggcggcaggctgctggtcatcgacggcggcttctgcaaggcctatcagcagaccactggcatcgcgggctataccctcatctacaactccgcctgctaccgcctggtgtcccacgagcccttcgtgggccgggcggaggccatccgcaccagccaggacatcgcctccacctccgtggtgttcgagcggctggagtcccggctgaaaatcgccggcactgacgtgggccgccagctccaggagcagatcgacgatctgatggccctcctgctggcctaccgcagcggcgccattgccgaggatcacaaggagtattgacgagggcccccgccctctggtacactggaagaaaaacggcggtttccgccgaaaggaggctctgtatggccctcatcgcctgcccggagtgtggaaaagagatctccaaccaggcccccgcctgcatccactgcggctgtcccctcgctccaagggctcccctcgatccaaaccgcttctccgtggtgctcaccgcctgccccgaggactccgaggggcgttaccgcgtccgaaagctcgccatccacctggaggagagcgtctgggaagccgtctacgcgtttctctcccagcccgcggccgaacgcgccccctccaccctccagacccatttgaccaaggaggatgcctgggcgctggccgacaccctccgcggggcgggggccgaggtgcaggtgctcgactccaccatacccgacgtcccccagccccatcccttcgaggggtgccgcgccatggacttcggcaaaaccgtggccgcagtgatccttggcgtcctggccgcgcagttgatcctcctccccctggccttactcctctcctagcccaccactccgccccttccggcgaaaaggaggttctccccatggcgctcatttcctgtcccgagtgcggaaaacagatctccgaccaggcccccgcctgcatccactgcggctaccctctgcccaagcagcccacagccccggcagctcccccttctccggaccgcttctccgtggtgctcactgcctgcccggacgggccggagacccagagcaaggtggtggagctgctcatggccgagctgggcatctcccgcgccgaggccgaggcctacgtggacaactgcacggtggttccctctatcgtcctgcgggaggggatgacacaggacgcggcccaggcgctgacattcgccctgcgtggcgtgggggcttatgcccgggtggtagatcccgcacagttggagccctcctctccccctccgccgcccgccgaggacccgcccgccgacgaggggaggggcggcatggggttcggcgggacggtggccgcggtgatcgtgggcgtgatcgcggcgcttctcctcctctccctgttctaaagcgccagttcaccctctccgcgggggtgatcggggccgccgtcctgctctacgcctgcaacaagctgtggtttctccccgccgcctccggcccgctccgcctcttcctggcctggtatttcagcgaccttctggccggggccctgctgctggccctggtggaacttcttctcgttctggggcggctgtcccccatacgctccgttccggccgccgccgggtatctgctggcctgcggcctctttctggagctggcccccctgctgtataagccctcctccgtgtgcgacccgtgggatctgctggcctatctggcaggcggcctgctggcgctcaccctggagcggcggctgctcagccatagcatataaaaccggctgctttccaaggaaagcagccggaattttttaatcctttccagtggggacgccgcacaggtgggtcggcgcggcatcgtgggtccggtcggtggcgttgtatgaccagaagcgccagccgccggacaggttggagcaccggaagccatgctgggacaggatgcggcaggccagatagctccgcaggccgctgtagcagttgacataaaccttcttccctttgtccagttcacccagccgcccccgcagctcgtccagggggatgtgaagcgcgtcggagcggagcagtccctgctttctgacctcgcccggcgtgcgcacatccagcaggatcaccgagccgtccgccggcagctccgccaccgcgtcccagtggtgctgctccaccagccccgcccggacattctcaatcacatagccagccatattcaccggatccttggccgagccgtaggggggcgcgtaggccagatccagctcggtgagctgttcggcggtgaggcccgcccgaatggcggcggccagcacgtccatgcgcttgtccaccccatcgaaccccacaatctgcgccccaagaatgcggccggaggcgggatcgaagagggtcttgaccgtcatgttgcgggcgcccgggtagtaggaggcgtgggaggcggagtaggtcaccaccttgtcataggccacgcccgcggcccgcgcctgtttttcgttcagccccgtggaggccgctgtcaggtcaaagagcttgagcaccgaggtgcccagcgccccggtgtaggcgctccgccgcccgcagatgtggtcggcggcaatgcgcccctgcttgttggccgggccggccagcgcaatgtggcttttggctccggtgacaaaatgccgcacctccaccgcgtcacccacggcgtagacgtccggggcgctggtgcgcatctgcccgtccaccgagatcgtccccttgacgcccagggccaggcccgcccggcgggccagctccgtgtcgggggccacgccgatgcccagcagcaccaggtcggccgggaaccgctccccgccctccagctctacagccagcccgtccccctggggagagaagccggacacccgtgcgcccaggcgcagctccaccccctggccccggagataggcgtggatctccgccgccatgtcggcgtccaggggcggcagcacctgcgcgccccgctggagcagggtggtgtgcacccccgcgtgcaccaggttctccgccatctccaagccgatgaagccgccgcccaccaccacggcccgccggacggggtgctcgtccaggtaggcccggatgcgcagggtgtcctccaccgtgcgcagggtgaacacacgggggtcgtcctcgccgggcaggttgggccgcacgggccgcgccccgggcgagaggatcagcttgtcatagtggagggcgtaggtgctcccatcctccaggcggcggacggtgacggtatgctgctccgggcgaagctccaccgcctcctgccccacccgcacgtcaattccgaagcggtttcggaagccctccggggtctgcagggtcagctcctcccggtcggtgatcacaccgcccacatagtagggcaggccgcagttggcgtaggacacgtagcccgtgcgctccaggatgatgatctccgcgctctcgtccaggcggcgcagacgggccgccgcagtggcccctccggccacgccgccgatgatgacaaccttcatgctgcttccctccctatgcttccagcggcccgcggtagcccagcaggccccccagatcggtgacggaataccccgcccgcgccagccgggctttggcctgggcgctccgcgccccgctgcggcagtagatgaacagcgggctcccggcaggctcggcgatggtatccagccggtccaggggcaggtttttcgctccgggcaggtggccgtcccggtattcctccggggtgcgcacgtccagcaggatggcgcccggggtgttgcggtattgttccaggccctcgctcagcgcggggcggcgggcaaagaggtcaaacagtcccatacattcagcactcctttttctcacggacgggcgggccgtcctggacgctctgtctgtactcaggataccagaaacagcccgccccttccgtgacaaaatcaccgtaggctgtccgatgccagagcctccagcgccggaaggtccagcagctccaccccgccccggcccagccgcaccagaccgtcgttctggaagtccttgagcaggcggctcaccacctcccgggcggaacccaggtggcgggccagttggtcatgggtgaggcggagggaggcgctctccgccaggcggctctcctccaccagcagggcagccaggcggccgtccagcttcttgctcagaatctggtccattcgccacatcacctcggagaagcggtcggccatcagctcgctggtgtagttggccactgccgcgctctcctccatcagcccttgatacacctccgccggcagaaagagggcagtggtatcccgctccgcctccaccagcacgtcgaactggatgccccgcagtacgcaggaggcggaaaaaaggcacatatcccggggaaagagccggtagagggtcagctcccgcccctcgtcggtgagcatataggcgcggagctgtccctcggtgggcaggataagtcccgcgcactccgccccgccgccgtacaccatctccccccggacgaagcgccgcaccgcggcgccctcctccagccgccgccgctgtccctccgtcagccgatcccaaaagggcaggtactcccgcagcatcagccttcctcctctccctcgttggcctcctgggcggtgcaggcctcggccggaggcgcctcctggaagtgcacctccagcaccgcctggggcctgttcagccggatggcggcgtgccgccccttccgggccgccgcctcctccagcagggcggccagctcccccagcacctcccccgtcagagggccgccccgccagtggaacaccaggggcttccccttgcggacggcctgggcggcccgcccggccacctcctccggccgggtgaaggagagcttggcctcccggtagtagaaccggcccccgtcggcgcaggccggcaccggatagaccagggcctcgtgatcccggaacagccgccggtcgtccagattgaagtagtcgtagcgcaccagctccgccgaccccagcgagttgtcaaaggtggcgtccaggtggtaatacgcatcccccaggcgcaccacgttccaggcatggcggtacttgacccccttgtccgggttgttctccgccagggccacgatgcaccacacccccagccggtcgcacaggcacttgaccgccttggcgataccctcgcacacccccaccccctggcccagcgggccgagaatctcgtgggagtagggctttttcagcttgtcgtagcggacattccggcagatgaagtcgtggacataccgctccttctccccctcgttcagccccatggccgggcggcacaggcgatccagccgggcggccagcgccttctggtgggtctggatcttccccttgtcgaagaggtactggggcagcagctccaccgtggcggcggccgggtgcacccggtaggagaagccggtgacgtagaacagctccgggcagtccagccgcaggcgggccagcacgtctcccagctcccgcccctccagccggggtaccgggaaggcggggcggagggcggccagcccggtcttcatggcgtggtaggccgcctggccggccttgtccagctgccggaaatagtacgacccggtcatgcctcctcctccagcagccggagcagcgtccgggccacgccgtcctcctggttggtgcccgtcaccagccgcgccgccgccttggcctccggcgcggcgttccccatggccacccccagccccgccgccgccagcatggagcagtcgttgcgctcgtccccgaaggccaccgcccgctccagggggatgcccagatgcgcgcacagggcggccatggccgcccccttggtggcgtcccggtgggtgagctccacgttgccgggcagggagcaggccaccgagagctcgggaaactcctccgccagggccgcgagcaccgcccgctgggtggcctcgtcccgaaagtagctctggatcttctgcaccggccgcccccgacggcccacatagccccgcagatcctccatggggcggcgcatctcccggatgatccgccgggagaccggatccaggatccagtcgtccagcgcggcgtagtacctggcctccatccagccgcagttgtcctccatatagcagtccagggtgccgggaaagtcctccagccgggccatcacccgaacggccagctccggggacagctccgcccggcggatggccctcccctccgcccggtcccacaccaccgccccgttcatcacaatggcgtaccgccagaagggcagctcctgcaccgcccgggggatggcgttgaaaaaacgcccggtggcgggcacgaaggaaatcccccgctccgccgctcgggccagggcctccgccgtcccgggggacagtcccttgtctcccagcagcagggtgccgtccaaatcgctgaagatgatatcaatgcgcaccgcagatgcctcctgaccgccccatggctccttccggggcttcgctgtctgttttgtctattataccgtgtcccgccccggaattccaccccggtctgtccgatttgacaaaacgccaaatatagtattgcgcttttccagttagccctatataatgtagcggacgaatgaattgtaaggagtggcagcaccagtgaaaatcatgaagcgcaacggcagcgaggccgcctttgaccgggagaagatcgccgccgccgtcaccaaagccaatctggccaccgaccagccgccggagctgtccggcgggcaggtggcccagctcgccctcagcgtggagcaggccgccgcccggatgggccgcaccctgtctgtggaggagattcaggagctggtggagaccgagatcatgcgcctgggcgcctttgagaccgccaagcgctacatccgctaccgctatgtccgctccctggcccgggcggccaacaccaccgacagccagatcctcaccctcatcgagtgcaacaacgaggaggccaagcaggagaacgccaacaagaacccggtggtcaactcggttcagcgggactacatggccggcgaggtgtccaaggacatcacccagcggctgctgctcccccccgacatcgtggaggcccacaaggcgggcatcatccacttccacgacatggactactacgcccagcacatgcacaactgcgatctggtcaacctggaggacatgctccaaaacggcaccgtcatctcgggtaccctcatcgaaaagccccacagcttttccaccgcctgcaacatcgccacccagatcatcgcccaggtggcctccaaccagtacggcggccagtccatctccctggcccacctggcccccttcgtccaggtctcccgggagaagatccgcgggcaggtgctggcggagatcgccgccgtgggtggcaccccctcggaggaggtgctctccggcatcgtggagaagcgcctgcgggaggagatccgccgtggggtgcagaccatccagtaccaggtggtcaccctcatgaccaccaacggacaggcccccttcgtcaccgtgttcatgtacctgggcgaggtggacgatccccagaccaagcgggatctggccctcatcatcgaggagaccctggtacagcgctatgagggcgtaaagaacgaggagggggtttggatcaccccggccttccccaagctcatctacgtgctggaggaggacaacgtgcgccccggcaccccctactactatctgaccaggctggccgccaagtgcaccgcccgccgcctggtgcccgactacatctccgagaagatcatgaaacagaacaaggtggatcagaacggggagggccagtgctacacctgcatgggctgccgctccttcctcaccccctacgtggagccggagaccggaaagcccaagtactacggccggttcaaccagggcgtggtgaccatcaatctggtggacgtggccctctcctccggcggcgaccgcgagaagttctggaaggtgttcgacgagcggctggagctgtgctaccgggcgctgatgtgccgccacgggcggctgaagggcaccctgtccgacgcggcccccatcctgtggcagtacggcgctctggcccggctgaagaagggggagcccatcgaccggctgctctacaacggctactccaccatctccctgggctacgcggggctgtacgagtgcgtcaagtacatgaccggccgctcccacaccgatccggaggccacccccttcgccctggaggtcatggaacacatgaaccgggccaccgccgcctggaaggccaaagagcacatcgacttctccctctacggcacgccgctggagtccaccacctacaagttcgccaagtgcctgcaaaagcgcttcggcgtcatccccggcatcaccgacaagtcctacatcaccaacagctaccacgtccacgtcaccgaggagatcgacgccttctccaagctgtccttcgaggcccagttccaggccctctcccccggcggcgccatcagctatgtggaggtgcccgacatgcagcagaacctggaggccgtgctccaggtcatgggcttcatctacgaccacatcatgtacgccgagctgaacaccaagagcgactactgccaggtgtgcggctttgacggggagatccggatcgtggaggacgacggcaagctggtgtgggagtgccccaagtgcggcaaccgggagcagagcaagctcaacgtggcccggcgcacctgcggttacatcggcacccagttctggaaccagggccgcacccaggagatcaaggagcgggtgctccacctgtaaggagggcagttccagtgtactacggcagcatcaagccctgcgacatcgccaacggcaccggggtgcgggtgaccctctttgtctcgggctgcacccaccgctgcaagggctgcttccagccccagacctgggacttccgctacggccagccctttaccgccgagaccgaggaggcgcttctggaggccctggaccggccctacatcagcgggcttaccctgctggggggcgagcccttcgagccggacaaccagcgcgccctgctccccttcctccaccgcctgcggcagcagctcccggacaagaccgtgtgggccttttccggctacacctgggaggagctgaccgggcagagccgcgcccgctgcgaggccaccggcgcgctgctctccctggtggacgtgctggtggatggggaatttgtggaggctctcagggacatctccctgcgctttcgcggctcctccaaccagcggctactggacgtccccgcctccctggccgccgggcggcccatcccttgggaaggctaaacaacaaaaaacaggccggccggagcgggacccctcgctccggccggcctgttttttctccacagcgtcctacatcccgcctccgtagtaacgccgggccagctccacaatggcatttaagcacttgtcatcccgctgccgccagagcagatgctcctcgctgggcgggatatctctcagggggacgaagaccacgtgctctccggcactgaagcgatagagctcagacaaaacagcaatcccgcatccgcaggccaccatggtgaagatttggggaatggagtccgcctcctggaccacgtggggtgagaagccattccggccggcataagttaccaccgtgtcaaactccacaccggagattttgtagtctgggaccaaaaacgcctcatgccgcagttgagagaagctcagctctcccgccccagccaggggatggccgccgggcagcacggcgcagatctggctgacggacaggctctgccgccccacgttgtccgcccggggccggccgaaagccaggacgaagtctgccatgtggtcgtccagggcgcggagaaggccgttttcgctgtaaaagcgcagctccagccggaggttggggtattcctcctcgatatgccgccgcaggccggcaaaggtatcgcagacccggtcccggggcaggccgaagcggaccaggcccgagatgtcgcccgccgccgtccgggcattgttcacccccttacgatatacctccagcatctcctcacacgcccgtgcgaactcctcccccgccgctgtcagtgccactgtccgtgtgctgcgctccaccagcctgaggttcagctcgctctccagcgccgcgatgcttttgctcagggctggctgggtgatgtatagctgcttcgccgcctgagtgtagcttccggactggcagagcgcatagaaatgggacatctgcgcgatagtcatacggccacctcctcgtggtatggccattatataacatttccttataaataaaaaggaaaaacatgaatttaacaaataagccgacccgtgttatagttgccatggagagaggtgtgcggtgaaaccgcaccaaagacagaaggaggaagaacgatgaaacagacaaacgcatcccccaagcacagctcgcggatctactacctggggacgctggccatgctggcgagcatgctcctgctcccccatctaatcccgtcctgggctgacgggatcacccccgccggcgtgtccatcgcctgcgtgtttgtgggtgccattatcggcatcctgaccaccaacgacttgatcctgtgcgccctgttcgccatgggcggcctggtaatcaacggcattcagacccctgtccaggtgatcagctcctttatgggcgcctcctatgtgtggcagatcgtggtgctctatgccctgtgctacgtcatcatccgggacaacaccggcgaggtcatcgcccggttcctcctgacccgcagattcactcaaaaatacccgatggtcatggtgatgatgctcctcttcgcctttggcctggccgccgccttcatgggggtgttcggcgccctcatcgtgggtttcaccctgctggatggaatctacgccgaggccggtatcgagcccaaaagcaagctggcccgcctgctatgcctgggcgcctttatcaccatgtgtatcggccctatgaccatcggcagcatggcggcccttaatctggcggcagggcagttctttctgtccgctgctggggtgcaggtagccaccttccgcttcgtggcggaggcctttgccattctcattgccttctgcgccgtcttcgctctggccctgcgcttcctcttccggtgcgacatccgagccctgggccgggtagatctggcccaggccctggcggacaagcccctgcgcctgacccggagacagtggatccccctggccgcctttctgatcatcgccctccactccttcaccagcccctactggcctgagatgccggtgctgagcgccctaaaggaaatggacaccgttctttttacctcagtggccctggcggtgctggcccttatccgggtggacggggaacagatcttctgccctgtggaggccttcaccaagggcgtgagctggcccattgtcatggccgtggcctccatggcagctatcggcggcctgctggtggccgacgagtacggcatcaaagcctggctgacgcaggccctgggtggcctcttctccaatcacagccccctgctctttgtggccatgacggtacttattaccttgctgctcaccaacttcttctctaacacagccaccctgctggtggtctcctccctggtatccgccctgagcggtcccctggtggaggcagggtatgacatcaccatcctggccgtggccatctcgctgagctccatggtggcctacctcacctacgcgtccagcggtcaggccgccatcctgctcagtcggaaaaacatggacaacaaattcatctggacctacggtatcgcggccatgctgctctatgcggcggtggttattctggtgtccgcggtgtgcctcttcttttgaaaggagcgtttcgccatgaattatccctctttggtttccctgagggaggttgcccccagggacggctggcagaaattcaagaccgtccttccaaccgaggttaagcgggagcttatctgtagtatgatcgactacggcgcccgtgagctggagatcggcgtcttcagctcagatcccgtacgtggccgacagtacctggatctggagccgctctgtcaggcggtgctcccctatgccgcagagaggggagtcaaggtgactgccctggtggagagcgtagaggccgcccaacgggccagggcgctgggtatccgccacgtggacttctttctctccgtcagcgacgccttcggccagggcttcggctccacgccggacagggccttcgccaccctggaggccatcgccaacctcccggacctccaggtacaggcggccctgggcgcggtcttcggctgccccttcggtgacgccactcccctggagaaaaccctggcttacgcccagcgggccatggagctgggggcctcctccctgggactgggagactctgccggaaaggccgatccaatccacaccgagcgcatcctgcggggaattctggagcgcttccggccagagcagatctcactgcacatccacaacactgagggatttggtcttgccaactgtgtgaaagccatggagttgggctttacccggtttgacgtatccctggcgggcatgggcggctgccccgtgattcccaatgccaaggggaacattcccaccgaagatttcgtcaatctactccacaaaatggatatcggctgcggcattgatctggatcgctgcaccgtggcctctttggacatgagccgccggatcggcgcaccggtcatcagcagtatggcgggcaacacccttctgaaacaggatgcctccccgctacctgttaaatgaacggctacctatgcctaaaaaagcgcccgcctgcgcatagcagttgggcgctttttccatgtgcatctcggaatgtataggctggaaccttcgtttactgtccttccttcttctcccgttccgccatctcgccagcaatcttctggaaactgtcggcaataaatccatagttctcccggcggtggggtaccaggcacttgctgcagtccttgacgccgctttccaaataggtgaagtttcccccgcacttccgccccagcatataaagcgggcagtagcagaacaggcagttgaactccgtcccctccggcaccgggtggcaggggtaatattcgcactccttgttggtatagaaagcgaagtgcttgccctcccagtattttttttgttcgcccataaccgtatctccttcccgttgcgtcaattctcttttgtctcccaaggggtaaacagacagtaggcggggcacagctcccccatatagatccacacgttctcccccatctccaccggctccgggaaggtcaggttggggatgaacagcttcaaagtggtacgcttcttccctttcagatttaccccctccgccgtggggtgggtccggaattcctctacctgctgtgccaggtcggcgatgccgagctcccgcgccaaccggggcagcacctcgttctccttacagtaggatacgtggtcggggttcttgatccaggtgagattcagcatagcggtctccttcctttctgctcgtcgtcactgtctcctgcataaaactgcggccgcggcagatcccatgatccgccgcggccgcttttccgcgcgctttcccggcgcacaccgacgtgcgccccacgctcaaacaccataggtcttccggctcgtgcctttccagagcgatctcgctcctgcgtctgccgttccgccttctcagggccctgccccaatgaccggctcacgcctcgaacggcaacctcaagcacatacggctacgggtatagctccggactcccaccggcttccctcatccctgcgcctgcccgaagggcagcactcgcgcagagtcatgatgctccatataaacttggctgtgcacccttattatactccatgcaggccaaaagtcaagagacaggtggcggtcctgctgcctcggcattcagaaattgtgttttgatgatattcagacccaaccggccgccggccgccttgccgaacccgtcgataatctgattgattgtatccgcactctaaaagatttttaatttttcctttgcacgggtgatggctgtatagaaaatgccgtgggagatctgctcggaattgctgctggggatgacctccttggcggaattgtactcgaggccctgcgccttgtgaatggagactgtataggccaactgaaaggggacgaccgaaagcccaaggagtggtcgtcggagatcccgtccagctacagacgaagtcatccccagactcttccgtgtttttgatctcgtccccgccggtaaagcggatcaccgcggagtccttgctaaaatcgagcgacgcgagaaacctgggggaaatgtacttccagaatacgcgctcctgccctcgcttccccgtatttaacaccaggaacaagataccggggtccagcgtaacctccaaagccacatatgcagggaaggcaagataccgtagccgatagtggacagcgcgtccagcgatatctgcggggtcgaggttcccttactctggaccacaaagctccgctttggccgcctagacacctttggagacgggactaattcaaacgtcccatccgtattaggccatgtgtcttcagtcgagaacctctcactgattttccgcccgagcccaaaaatgcctggagcattgtaacagcgtcccggtcatcaccagaccatgcggtgtgggtgttactatatcgctgaagctgttcagatataattttcatgcccccttcatgttgacagaaaatccttccaaaattgcctatatgctaattgtaatcaattttcgctctttattacaagctacatgccatatcctctgattccaaaattatatcttttcctttcgcctgcaaaatccagataatattttgtagtaaaacaccactatagcatgactgattgccagcatatcatagaggtattacaaatttaaaaaccacgtctcagcctcaattggctaagacgtggctttcaaatttggaacagacggttaaaaccgacaagaaaaaagccgcccgcagggcggccccaaaccgaagcccagcgtaagctggttcggtttggaaaggaggagcagcggcgtgagcgcgctctgacatataaaataagtcggagcaagcgatccatagcttgctccgacatggtgcgcgaggcgggacttgaacccgcacgtgcgtaatgcacactagaacctgaatctagcgagtctgccaattccaccactcgcgcatctttagcgctctttgcagcgcgaaaattatattaccatctgtccccccacttgtcaactccttttttcgatctttttgctttttctggtgcggagtggaaaattccagttgacaaatccgtaacggctcgttataataatctagcagtctttcgagacgacaatatgcggatgtgctggaactggtagactggctagcttgaggtgctagtggcccatggccgtacgggttcgagtcccgtcatccgcaccatactgaatgaccctacctcctctgaacaaatgactgacattgttcagaggaggtagggtcatttcattccagaactccttagactgcaagaggtttgacctttttatgcgaaacattttgtgtcaccaatcaaatacaaacagcgtaaaattaaagtgtaaaacgtgtatacgacgagattcgaactcttaaagtgtcatcgagatgtgttgctcatgaatacatcttccacccgacatggcgtacagttttgcaatgtgcgataagattcactgtgtattataaacctcgatgcaggaggccaagccgcgcttgaaatccacttctgaggggtaatgctgtctcgactgaggaagaaacaggtactcataaatattggttttaaccgtctcttccaagatatataagcaaaaacactgagaagtgcggtgtttctgctatttcggatagtttcagaagaagtcaacacaaaaagtatggtttgggaagatacgaaatccagttttggagggacagagcgtttcaaccctctcctcatttgaccaaggcacacaaaaacaaaatcaagcggcctgttgatttcacgatacccggaggtaacaggcggcttttttcattccctgtagttctgtcctttatagtgcttttgcttcatctgttcaccattccttggcggtggataaggtaaaataagtttcgcagaaaagatgagccaaatgcacacattgaaaaagggatcagatgagacaagggttgcaggcctctcgtagaatgaaattgcgacacagcatcccaaaagaagtctgtaaaccatgttccaaaaattttacaactaaatgagggagtaattaagagtcctacaaggaattggtgcgaggtagcgtggaggtttcccctcaacgagttattggaagtcgaaggcggagaagctctcgctacgagcgcaatgaacagcgctaaggctaccgcagcggccactgtagccgtagcctcattaccacttcctgtgaagtcgccctcaaggtgcccaagctcaaggggatttcctttaaaacggttgccattgtgagctgtcgctgccgggagagcagtgtgaagaaaccctgatcgagatgtatctagccggcgtatccatccggcgtgtggaggatataactgagaccacgtgggttctccggctactatcagcaaactaatgtggccattctgacagcgattgcggtcaataaggatggacgctgtatggtcatttttaccgtaatgtattttctgtcgttcccgatccaaggtgaagccggaggttgtaatgaggttccgctcataatataacacctgcttttatctggctttccagccattctttgtccggcagcaaaattcgttttatctcctttgtactggattctcttgtgcccggcagagccgttacatgctattaaaatgctcaatcatgtcatcaaagctctaccacatccatcactgcctgctccacatacagaggcgctttggcgtcaagcatcagggacaacttcacgctgtatccattgtttatacaggggtgcattacagagacatagtgcaatgtctgctgaccgtgtgccgggtgtcctatggaaaaatgcagaggcatcgcatctgtaaacgcaccacagggcgactgcctgaggagaattgtcccctcttccggtgatgtggcgcagacattcagtgcgtattggactgcgtaggttttccctggatcaagctgaatctgagcaggggtacgttcgtccaaacagatatcttttcctgaacggcttcgctgtctccagcacaggcgacagtccggattccacagcattctctcccgcagtcctattaattgaacagcgcttttttcacaggacagtacctgatgagacactggatggggtggggagcaggacaccggacactgggacacacagggatctggccggcaaggggaaggacagggcgtaggtcccggctccggcttacaagctggcggcgggggcgatggaagcgggcaaaactctagcacctgagccagcttgtttttcaacagcatctggttttgcgtcactgcctcaacaagggcggtgacgcttttgttgacggccagcacgtcatggggacaggcacaggggcttgtgccgggcagagtccccaggatatattgtagtttctcaccctcagcgttgagaatatgactcagggcaagctcttccatggcaatggacgcgataatcatggtcagagcttcctcttgggtcatatccgccccgttgggtggaaaggagggcatagacatattaaaactccatagttcgtcccggcggggccgggtccaagatgtgcggcaggatatccatgccgccgtcttaccctatgacatccggggcagttttgttccaccgggaacctgttggctggaagatacatagaatgtcccagcgcgacgttttggagtgcctcgctcccgccagcgcaccggtgcatattagtatgtacctctcaatttgaaaggagattcccgataatgtctctgcctagctttcccgtagtgaatccccccattgaacgggaagacgcagttaatcaaattctctcttctattgcgatggaagaactcggcctgagccatattctcaacgctgaaggagagaaactgcaatatattctgggaaccctgcccggtctcagcggccctcccgccacagtcagcgacgtgctggccgccaatgagagcgtccgcagtatgctggaaaccgcggcgcagaaccagctctttctgaaagcaaagatgcagggcgctttgacagcctcccccatgcagggtccaaccggcgccaccgggccaaccggagctaccgggcctgccggagggcctactggcgcgacaggggccaccggcgcgaccggggccaccggcgcaaccggtgcaaccggccccaccggagctgttggcgctgccggtgcggttggggcgactggtgcggttgggcccactgggcctactggcgcgaccggggccaccggcgcggctggagctgccggggctactggagccaccggggccacgggagccaccggggccaccggcgcgaccggacctgccggcgttacgggagccaccggccctacaggtgttgcgggggctaccggggccactggggccaccggcgcaacaggtattaccggcgcgacgggcgcgactggtgcaaccggccccaccggtcccaacatcaccgccacctccgcctttgcagccaacaccagcggcacggcgctgaccgtccttgtagggggcaccctggttccccttccggacggccagttgctctccccggacatcacggtcaacggggccaacacggtgtttacggtaaccaacgccgggcgctaccagatttcttacaatgtaaacaccaccgcgtccttggccagcggtacccgccttcttatcaatggcgcggccaatacggcctccaccgtggcccctgcggtgtctctgagccacttctccaacgagatcctgctgaacctaaacgccggggacaccgtttcgctgcaaatgtttggcatcgcctccgtggccaccctgctgccgggctccgccggcgcggccctttccattacccgtctaagctgaggagggatgtctcatgtcactgccaacctttcccccaatcgagcctcctctgagcagagagggcagcatcaatgagatcatttcctccattgctgccgaggagctcagcctgagccacatcctcaacgccgagggtgaaaagctgcaatacgttctgggtactctgccaggccttgaaacggctgcggctttggatgaggtaatgcaggtcaatcaaagcgtgcaggagacgctgtccagcgtgatggagcagcagatgatgctaaccggcaaattggcctcggccatgagcgcccccatcctgcccggtcccaccggggctaccggcgcgacgggcgcgacgggccccgcagaagggcctgtcggggtcactggccccacgggccccacaggtgcggacggcccgaccggcccgacgggcgccgcaggtcccaccggtacgacaggtcccactggtgcgcagggtcccattggtcccaccggagcaaccggggcagttggccctgccggggctgtaggtcccactggagccaccggagccaccggggctacgggccccaccggagcagtcggagctaccggagccaccggagcgacaggttctgccggcgcaaacggtgtcgtcggagtagctggcatcaccggcgcggcgggcgcggcaggggcaaccggtcccacgggggcgtccggtcccactggagccacaggtcccaaccttacctccaccgccggctttgccgccaacacccagggcagcagcgttctggtggcgctggggggcagcccaatccccctgcccaacgcccaagttctgtcccccgacatcacggccaacaccgggaacacggtgtttaccgtggccacggcgggcacctatcagatatcttaccatgtgaataccactgtggccctgctgatgggaacccggctggtgatcaacggggtgaacagcatcccctctaccatcaacccggtggtctcaacctctaactttgaaaaccagatcaaggtcaccctgcccgcaaactccaccattacgttgcagctctttaccacaattgccggaaccgccattctggtaagcggcggcgcgggggcctctctgaccatcatccgtctgagctgagtgccgccggtaaaaaccggcggaaacaatatcatgatgaatcaaaaggaagcgccactatgataagcgtcagtctgtgtatgattgtaaagaatgaggaagatgtgctggagcgctgtctgaagagtgtggctggcctcgtggacgagattatcattgtggacaccggctccaccgatcggacccgggagattgccacccactttaccaatcaaatctttgactttccctggcaggatgacttttccgccgcccggaacgaagccttttcccatgcgtctatggactactgcatgtggctggatgccgacgacgtatttttggaggaggatcagaaggcttttctcaacctaaaagagactctagacccaactgtctcggtggtcatggccccctaccacaccggctttgacgaacgcggccgcgtgaccttctcttactaccgggaaaggctgatcaaaaaccgggctgggatgtgctgggtaggagccgtccacgaggttgtcacgccggttgggaatgtcctgtactcggatttcgccgtcacccaccgcaagacccgcccctccgacccagaccggaacctgcgtatctaccaggcccaactggctgctgggaaacagctggaaccccgtcagcagttctactacggccgtgagctctactaccaccatcgctgggaggaggcgttggatgtctttgagcgatttttggaagaaggccagggctgggtggagaacaacattgacgcatgctgccactgcgcttactgtcacaaggagttgggccatgagcaagcggcgctggctgcgttatttcgcagcttcacctacgaccgacccagggcagaggtctgctgtgagatcggaaactgcttcctccggcaggagcggtaccagcaggctgcctactggtacgctctggctctgacctgcgcccgggatgatcgcaggggcggctttgtctctccggactgctatggttatctcccctgtatccagctgtgcgtctgttacagccatctgggcgaccagaaaagagcggaaaccttcaatgaactggccgccgcctgtaaaccggattcatcggcggttcttcacaaccgggctatctttcaaagcctgtcagagtcgttgcctcgttaggcgggtccaattgaatggccctacctggccagaacaaatggttatccttgttctggtcaggtagggccattttatgtctaaaatcctttttgctagaaaagtctcggcctttcctatataaaacgccttatgccaccagtcaaatacaaacagagcaaattcaaaggtcaaaacgtgtaatgggtgggattcgaactcctactgacatcggcttgatgcttttttgcctgctgctcatgagaatcgtcccttcgataaagttacttgtatgttttgggaacaacccccatagtcttattggggcggcaaaatccgtcgtaatgtagtacaataaaaatcatagtcacgctgaataagaagctacttgcaataatacttttgctttatacgagagaactttatgatagacttgcgaaaagtttatactgtatttttgaccgaaattcaagggaacgttatcaagaagatcatgggagcatttttgagtgaacgcactcttcaaaaagagacggaaccgattatggaacgtgttgcgtcacacggctttgggagacgcatcttttttattttggtgtctactccgccgttcggtattccattgcttgtcggaaagaaatcccgcctgcaatgttttcatgagagaacggctgtggtataatcgtcatacttcatagagccgaaaggaggcacccggatgggggacacgcttgattttccagcctttcccggacagccagagttggacggcatggaccgcgctcaacttctctcctgcctggaacggatccagcttatgctggagcatctggacgagctcgagccggaggatatggacagcgatgcctacgaggtctggggagaacgccacgaggcactggaggatctggccgacgagctccaggaccgcctggacgagctggaataaggcggagcgccgccaagctgcgcggcgctccgccctttcacagcctctccgcccagcaggctactgcgtcccgtaagaaccgggcgcagccgggcacagccctgtcatagtaggcggtaaagcgggggtcagacacatacagctcggccaggccctggtgcttggcggggtcgtactggttgccggtgagggtgagccagcggcggtggagcgccgcagccgcccggccgtcctccccctccggagaagcgccggaggccaccgcccgttccagcgcggtctggagctccccgcccagccgcgtccactcctggtactgctctggggtcaggttcaaaaccgcagtctgggcctcctccacctcggcgtcaccatatcggcctctggcctctgccccataggtctcctggtgccagtccacaacccgctgtttgaatgcctcaaatttctgcttatcgtccatgatttccttcctttcttcggctccgatggtctgtcgtaccgaccggatcaggccctccagccgcacccgctccgcctccagggcggtcaggtggctgcgcagggcggccagccggtcgaaggaggggtcgtccaggcacctcttgatccgggccagctccaccccgagggcccggtaatagaggatgtcctgaagccggtccacctccgccgggccgtaatagcggtacccgctctccgccacccgtctgggcttcaaaagaccgatttcgtcgtaccagcgcagggtgcgggtggtcaccccggacaggcgcgacagggcttgaatggaatattccatccggtattccctccttcttctacagcatagcagttgacgcagcgtcaaagtcaagcattttctccaggtttgtgttataatagagtatcctgcccggtaaagctgccgggcacacgaggaggaagcgatggaactaactgagctggaggcggccgggctgaaggccgccctctatggtcctcccgccgaccgggtctggctgtatgtccacggcaagggcgggtgcaaggaggaggcggcggactttgccgccctcgcctgtccccggggctggcaggtgctggcggccgacttgccggagcacggggcacgccgcggggacggggtgcccctggacccctggcacgcagcgcccgagctgcgggcgctgttgggctatgccaaagggcggtggcagcataccgccctgcggtgcaccagtctgggggcctggttctccctgctggccttcgccggggagcgtctggagcaggcgcttttcgtctccccggtggtggacatggaggggctcattcgggacatgatggggtgggccggcgtcagcgaggcccaactggaggcggccggcgagctggacactcccttcggggagaccctctcctggccctacctccagtatgtccgcgcccatccggtgtcccgctggcccactcccaccgccctgctgtacgcctccggggacgccatgctccgccgggcggcggtagaggacttcgcccgccggttcggcggagcactcaccgtcctggagggcggtgagcactggttccacacgccggagcagcttgcggccctccaccgctgggagtcggatgtgttggagcaaatgaaataaccgtttataaaaggagcgctcctgatgattttctatttcagcggcaccggaaacagccgctactgcgccaaacggctggcccaccagctgggggatgaggcggtggacgcctttcccttcctgcgggacgaccactttcccgccctcacctcccggtccccgtgggtctctgtgtctcccacctacggctggcagctcccccgtatctttgaggctctgctccgcggcggccggttttcgggcagccgggacgcctactttgtcatgacctgcggggcggaaatcggcgatcccatcccccggctggaggccctttgccgggacgtgggcctcacctaccgcggcgttctgccggttgtcatgccggagaactacatcgccctgttccgcgctcccgggccggaggaggcccacgccatcgtggcagccgcggtgccggggctggaggagggggcggagcgcatccgccggggcgagtccctcccgcccgtccggcgcggagcgatcgacaagctcaaatccggaccggtgaacgccttcttttaccgctttgtcatcaaggccggccccttccgctccaccagcgcctgcgtgggctgcggcaaatgcgccgcagtctgtgtggaaaacaatatccgcctccgggacggccgccctgtgtggggggaccggtgcacccactgtatggcctgcatctgcggatgtcctgccggagccattgagtacggcagggccagccggggcaagccccgctaccagtgtccggaataccgggaggagtaaggggccatggaatttgagttctgcaagctggaaatctatctccctgagagccacctggaggccgttcagcaggccctgtggtcggtggacgcgggccatatcggccggtacgaccgctgtctctcctatagccctgtcatcggcgcctggcgccccctggcgggcaccgctccttatctgggcaggatgggtgaggtatgccatgcgccagagctcaaggtggaggttacctgccggacagaccgcgtggaggagaccgtggcggccgtcaagcgggcccacccctatgaggagcccgtcatcaacgtcatccccctttaccgcaccggactatgaggcggagcccgtgtcccccttctggccaaacagcgcgtccaccggaaatccggcgggcgcgctgtcttcttatgcggggccgtccccccggaccagggccacaaaccgggccacatctgcgccgggccggagctgatagagcaggccgtacgggatggtgaagttccaatccaccggaagggtcaccagggacgggtgcacctccgtccagcagtccaggctcatcagcaggtggccggtctggacgctgcggttgaacacctccatgtcataaaactgcggggtgtcctcaatatggatctgcggatgggcctccactgcggcccgcacccggtctactgaaggggagtccccctgcttcaccatcatcagggtctccccatgcagctctgccagggtgagccccttccgccccgccagggggtgtccccgggggacggcgatgcagtggcgatactcccccagagggagaaaattgcagcggtccagccactgacgggagtcgcaggcaccgataaggaagtcaaatttctctcccagggcgccgatctctcccaaaatcccctggtggtcgtcctcataggggacgaggtggagctggtagccggggaagtgcccgcagaagcggtaccacaggtccataaagggccggcagggattgaggatggaggttcccacacaaaaggcagaccgggccgcctgggcggccgcccgcgcctcccgcagcgcccggtccgagtcggcgaacatctgtctggcgtagcggtaaatgacctctcccgccggggtcaggacggtcccccgccttgtgcgctccagcagcttcagctccaggtgccgctccagggcgttgagctgcttcatcaccgccgtggacgagaggtagagcttttccgccgcctggctgaagctgccgcagtcggccacgcagacaaaggtggccaattgggggttgaacatggccgctcctcccttccgttcaaacttttggttgataccatggtacaaaatcggcgcttccctgtcaagccagcccggcttaaaataggagcaaacaaccgcaggtggaatatccgcctggccggagaggagattgcaccatgacactggaagagctcaaccgcaccagccccttccacgcaggggcggagaacaccgcctttgccccttactttgacggcgccagctatctgaatatgctctccaccgagcaggtacccgtaggctgcgtcacgttcgcgccgggctgccgcaaccactggcacatccaccgcgccgcccgcggcggcgggcaaattctgcttgttaccgctggacgggggtggtatcaggagtggggcgaagctccccgggcgctccgtcccggcgacgtggtgaatatcccgcccaatgtcaagcactggcacggggcggcagtggacagcgcctttcagcacctggccgtcgaggtgcccggggagggttcccaaaacgagtggtgtgagccggtggacgcggcggcctatcgggctctggagacactgaccggcgggacagataatcagtaggaggtcttttatggaacaaaagataacggcgggccgggacgagctggggggctttgcccccaaattcgcccaactcaatgacgacgtgctcttcggcgaggtgtgggcacgggaggaggctctctccgcccgcgaccgcagcatcgtcaccgtcacggccctgatggccggcggcattctggacagctccctgaaatttcacattgccaacgccaaacgtcacggcgtcaccgccggagagatggcggaaatactcacccacgccgccttttacgcgggatggcccaaggcctgggccgccctgcgtatggcgaaggaggtctacgagggctgacagcgggaggcccaggcataagcctgggcctcttactgcggcatggtcatgagatgacagcgcatgggccgggaccgcccacatgcgcaatcacttcatgcgcctgagcctttgcatcgtttcatggcagatcctgtgcgcatgaagtgttacgcccgctttttcaccgggtagcacacttcggtgacgtactcctccgggtcgtcggtctcgctgggattgacgtggtaaatattgaaggccgggccgtcaaaggcatagccgttgtcccgcacccaggcggccacggcggcgttggccgcgcggatcttgtcgtagggcccccggaaggtggccgaggcaaacgtcacggcgggcagggtgcggaagcggacgtgctccgtgtcggggtagtctccccggaccgtcttctgcgcctccgcatccacctcccgctcccggtactccccgtcgtaataggtgacggagcagagacagggctcctccagccggaggctcaaagacgcggtctcccgggccatcacctgccagagctggtgctcggcctcatagctggggagggtcatgcggacgcaggccgcccgccgctggggcagatttttcagagtaacgctgtattccatggtgctttcatcctttctcaactgtgcacgggccgtgtccaggaggcgcagccgctgcctcgtctccgccaggagggcctccagcgcccgctgctgctccgccaggcggcggtccagctcctcccgtccgccgtcctccagcagcgccccgatggcggacaggccgaagcccatgtcccgcagggcggcgatgcgccccgccgtggtgagctgctcctcgcggtagtagcggtagccggtgaacgggtcggtgtggacgggctggagcagccccagctcgtcgtagcggcgcagcatgcggatgctgagcctggacaacttggaaaaggtaccgattttcaacatggccgattcctcacatatatgtgatcttcctgagctcaggattatcctactgcctgccaccgtgtgagagtcaagggcaatttctgcgcccgcttgaaacaggcaggccgcccgcagtttatgcgggcggcctgcctgatccatgtcagtacagggccagggcgataccggctgccaccagcaccgcgccgccgattttggttccaatccgggagcgcatccgccggaacaccttctggagctgctccagaggcaccgcgagaaagaccacgccaagggcaatcagaagcacgccaacggccaacatacctgtcataccttcaccgccgtttctgtcaaatctgtccctatcttaccagcttccaccccattttgcaagtcggcggcggctttctcttgccttcatccgttttttctgctaccatagggcaaacgggttgcttttgcaacagaagggaggccgccatggaggcctatctaggagcactgcggagagtggccctgtttcacggtatggaggacagggagctgctgtccatgctggactgtctgggggcgcggctgcggcagtactccaagggggatgtaatctttcatgccggcgatcccgccacccacctgggggcggtgctcactggccaggtgcaggtgagccggaccaaggccgacggccagcgagtggtcatgggggagatccgccccggcggcctctttgccgagtccttcgcctgcgcccgggcggagagcctgccggtgaccgtcacggccgccgccgacgcggcggtactgctcatcgactgcggccgcatctccgccccctgctccgccgcctgtaccttccacacccggctcatctccaacctgctccaggtgctggcggagaaaaacctctctctggcgggcaagctggggcacctgtccggccgcaccatccgggagcggctgctctcctatctggaggagcaggccgcccggacaggccgcgccaccgtcactgtcccctttgaccggcaggccctggcggactatctctgcgtggaccgcagcgcactgtcccgcaccatcggcgccctccagcgggagggcgtgctcaccgtccggcgggaccgcttcaccctcaatttctaaaaggaggcttcgctatgggcacctatcttctctctctggatcagggcaccaccagctcccgcgccatcctctttgaccgggagcagaacattctcggcgtggcgcaaaaggagttcacccagttctacccccgggaggggtgggtggagcatgaccccatggagatctggtcctcccagtacggggtaatgatggaggtcatcgcccagtccggggtaaacccggcggagatcgccgccatcggcatcaccaaccagcgtgagaccaccattttgtgggaccgggccaccgggcggcccatctacaacgccatcgtctggcagtgccgccgcacggcggagctggtggaccggctgcgggccgacggcctggaggagcacatccgcgccgccactggcctggttcccgacgcgtacttctccgccaccaagatcaagtgggtgctcgaccatgtggaggggtcccgggaaaaggcccgccggggggagattctgttcggcacggtggacgcctggctgctgtggaagctcactggcggggccgtccacgccaccgacgtcaccaacgcctcccgcaccatgctctttgacatccatgccctggactgggacgacaccctcctctccgccctggacattcccagggccatgctgccccaggtgcgcccctccagcgaggtctacggctacaccgacatacagggcgtgcgcatccccatcgccggcatggccggcgaccagcaggctgccctgttcggccagggctgcttctcccccggcgacgccaagaacacctacggcaccggctgcttcctgctgatgaacaccggggacaagccctgcgccagccgcaacggactgctcaccaccgtggcggtcgggctggacggaggggtgcagtacgccctggagggctccgtcttcgtgggcggggcggtgatccagtggctgcgggacgagctgcgcttcttccccgagagccgggacgcggagtactacgcccagaaggtgcccgacaacgggggcgtctatctggtacccgcctttaccggtctgggggccccctattgggacatgtacgcccggggcattctggtgggcctcacccggggcacccggcgggagcacatcacccgggcggcccaggagtccatcgcctaccaggtggccgacctggttcacgccatggaggcggataccggcctgccattgggccagctcaaggccgacggcggggccagccgggacgccttcctcatgcagttccaagcggacatcctggatcgggaggtccgccgccccgccatccgggagaccaccgccctgggggcagcctatctggccggtctggccgccggggtgtggagcggtaccggcgagctgcgccgcctgtggcggtgcgacaccgccttctcccccgccatgccgccggagcagcgggagcacctgctggagcagtggcaccgggcggtgggccgcagccgggactgggcccggtagaaaatcgacacatcttcctttttttccctttctttacccgcttgtcatatgggcagcggtggggtaaaatagaagggacaagacaggaggccctgattatgcagaacattgatccctattcctaccagtgcggcgtgattgactgcttcaacgagatggtgcgctccggggtgaaggcactggccctcagccatcccatggacagcgccgcagagcgggacgccctgatcccctttgcccgctcctgctgccaccagtacggcaaccagctctacatagaggacaccccgctgctcaccgacctctttcccctctcgctgaatcagggcaagttcaacatcctgttctaccgggctggccacattctcgaccagtacctgcgcctgaaggagcgcaaggccaatctggtggccgagcgggcctacttcggcggcaaccgcagccagctcgcctgggaatacggccggctgctgtcctacccggacgaggccatccggcggctcatttccgacaatccggaaaaggagcgtctctgaatccctccgggggcggcgcctgccgcccccttccgcttctttcctcttgacgtggcctggatttcgtgttatatttgtatagtagtctaaatgcacggcctgaactcacatgtttgtagtcatcgtcggatcttcagacgagcggcaaatgtgtgggtttttttctatgtcatttagctccaaatttttttcaggaggtaccattatgtatcacggtactgtcaagtggttcaacgagaccaagggcttcggcttcatctccaacgacgagggcggcgacgacgtgttcgtgcacttctccgccatcgtgtgcgacggcttcaagacccttcaggagggccagaaggtcacctatgatgtggagcccgatcccaagaatgccgacaagctgcgtgcggtcaacgtggtcgccgcctaacatacggatggaacggcgcctccggcccctgcgggccgggggcgcttgtttgtccaggcacccccggcggacctgcggcgtatactgtcgatgtggggggcgaaggcccgccgcaaatttgaatgggggtaccttactatgtgttgttgtcacggtcagaaccgcaattgctgctgttgctgctgcgggaacggttccaataccgggaacggcgggatcaccaccctgccctccttccccgagctgcccgtctttcccggcggcggcacggctgccaacacccgttggcccgtgtatgtctccttccccgcgttcctttgggatactgcgggcggggaggacgaggactcctcctgcggctgcggctgctgccgcggctgactgccctgccgccccggccggggcggctacttaaaacaacaccccccattcacgcaaagggccgcccggttataccgggcggccctttgctttacgcggcgcattgctcagatggcgaacagaaggaaacggtttgcctcgtaccagtcgccggtctcataggccaaggtcatcgcgtccacccgctccgcgccggggtagaagcccttggtataggcatcccggtgactcctataggtcagctctacccggaaatgctccggcagtgtgatacgggcggcggacaagtcctgcttcactgcccgctctgccccctcccggatcaggcggcacgccagggttgggctaaacccctgggaacgtccccccacgtcgtcctttaccggcacggtaaccagggaggggtgcagctccgcccccacctcgcacagggtcttgtctcccgtgaggagcacgcttggaaccccataccaagcggccatccaactgtagatcaggaactccgaggcgggctgcccgttgacggtgatgcggtgaaccacgccgccgttgatggtgtggctcagggcgttgcctccctcccccgccgcattgtgatagcccacgaaaaaggcggcatcgaagctgctgtccagcccttccaccatcatctccggcgagccgctccagcttcggatgagctggacatactccggcagttcctccggcagaatattgagccccggcccgtgggcgtccttcaccaccaccagctcggctccggcggcccgggccccctcggcggcggccaccacctccgccgtcatctccttccggctgcgctcatactcaaattcccccggccgacagccctcccgtgtggcggtaacagcggttccctcaatatccgcgctaataaatactttcacgatatgattcctccttttccgctatcgtactgcaatttgcccgcctccgcaaggggaccctacaacttttttctcgggcaaaacaccttgccgctcaagggctcaccccaattgaacccattattttacaaacttttttcttgacaaatgcgaatgacctgctaaaatatgcttaaattattttatttaaaaaattttaagtaaaatgattgaagtaattttgcaaggagaatctgtcatggattttgagaaggttaaagagattattgtggagaccctgagctgcgacgccgacaaggtgacccccgatgcccgcctggcggaggatctggaggccgattccctggccgccgtggagctgtccatggctctggaggaggagttcggtgtgaccattgccgacgaggagctgcccaacatgaagactgtgggcgacctggtgaagtacctggaggaccacgctgagtaataaggaacctgggcaccggtgcaggccggtgccttttttccgaaaggagccgttatgaccaatcaagagatttttgagctgatggcccgctttgacgccagcaccgccaccaccctgaagctctccaccaaggacttctccctggagctgggcaagggcggcccggccgctcccattcctgccgccgccccggttcccgcccccgcggccgctgtgtcgccggcggctgctccagcgcctgcgggcaagtgcatcaccgcccccctggtgggcaccttctacgccgcctccgcccccgatgctgctccctttgtgcaggtgggcgaccatgtgaaaaagggtcagaccgtgtgtctgatggaggctatgaagatgatgaacgaggtgcaggccccctgcgactgcgtcatcgaggagatccttcaggaggacggggccctggtgtccttcggggagccgctgctccgctaccgggaagggtgagcccatgttcaagcgcattttaattgccaaccggggcgagatcgccgtccgggtattccgggcctgccgggagctggagatcgagcccgtggtggtctactcccaggcggacagggaggctctccatgtccagttggcggagcaggcctactgcatcggccccgcccgctcggcagacagctatttaaacgtcaatgccatcctcaccgtggcccaggccgccgggtgcgacgccatccaccccggctacggctttctcagtgagaacgccgactttgccgacgcctgcgaggccgccggcatcaccttcatcggcccctccggcgacgtaatccgcgccatgggcaacaaggccgccgcccggaagctgatgcagagcgccggggtgccggtggtgcccggctccgacggggcggtagacaccgccgagcaggccaaggccctggccgactccattggatacccggtgctcatcaaggcctccgccggcggtggaggccgggggatgcgccgggtgtatgagccggaacagctcatccccctgtttgaagaggcccgcagcgagtcgctggcctgcttcggcagcggggagatgtacctggagaagctgatcgtcaacccccgccacatcgagttccagatcatggccgacgggcaggggcacgtgatccagttgggcgaccgggactgctccatccagcggcgcaaccagaagctgctggaggagtccccctccaaggccctgaccccggagctgcgggagcggatgggcgcggcggccgtggcggccgccagggccgcgggctacgtcaacgccggcaccatcgagttcgtgctggcccccgacggccagttctacttcatcgagatgaacacccgcatccaggtggagcacccagtcaccgagctggtcaccggcctggacctggtgcgggagcaaatccgcgtttccgccgggctccccctctctgttacccaggaggaggtcctgttccgcggccacgccatcgagtgccgcatcaacgccgaggacccggccaaggggttccagccctgtcccggccgcatcggcttcctccacctgcccggcggctacggcgtgcgggtggacaccggcctctataccggctacgagctgcccccctactacgactccctgatggccaagctgatcgtctatgcccccacccggctggaggccatccgccggatgcgccgggccctggaggagctggtcattgagggaccggctaccaacaccgacctgctccaccagatcctccaccaccctgacttcgtccggggcaactactccaccggctttctagaggcccatatggacacccttctggcctggagcggcagcggggaggtgcgtgaggtatgagcagcgtctttgcacagcgccgccagaagctcctctccctcaaggccctgcggggctcctcccccgctccggcccacaccgaggaggcctgccccgcctgcggcaaggcggtgccccgccgggagctggtaggccaccgctatgtctgccccctgtgcgggcaccactaccccgtgggggcctattaccgcctgagcctcattctggacaagggtaccttccgggagctggacgcccccctggcctccaacaacccgctggacttccccggctatgaggccaagctggacggcgcccgccgccgcaccggcatgaacgaggcggtggtcaccgccgccggccgcatcgggggccagcgggtggccgtgggcgccctggacagccgctttttcatgggcagcatgtccgccgccgtcggggagaaggtcacccggctggtggagtacgccgacaagtacaagctccccctcatccttttctccgccagcggcggggcccggatgcaggagggtatcctctccctgatgcagatggccaagacctctgccgccctggagcggttctcccagaagggcggcctctacatctcggtgctcacccaccccaccaccggcggcgtcaccgccagctttgccagcctgggggacatcatgctggccgagcccggcgccctgatcggcttcgccggcccgcgggtgattgagcagaccatcggcgaaaagctccccgagggcttccagagcgccgaatatctgctggagcacggcttcctggatgccatcgttccaagggacgcgctgcgcgccaccctgctccatctgctgaagctccatggaaaggggggcgacgcgcatggcaagtaagctgacccccgcccagcgggtggccctggcccgccacccggagcgccccggcacggcagatttcatcaagcacctgtttaccgatttctttgagcagcggggcgaccgcctgtgcgccgaggacggcagcatcctgggcggcgtcgccctgttccacggcaagccggtgaccgtcatcggccaccggaagggccgctccctggaggagaacctgtccctccacttcggcatgccctcaccggagggctaccgcaaggcccagcggctcatgcttcaggcggagaagttccgccgtcccgtcatcaccttcatcgacacccccggcgcctaccccggcctggaggccgaggcccggggccaagcggaggccatcgcccgcactctggccctgtccagccgtctcaccgtgcctgtagtctccgtggtcaccggggaaggaggcagcggcggcgccctggccctgggcgtgggcaaccgcgtgctcatgctggagaatgcggtgtactccgtcctctccccggagggctttgccgccatcctgtggaaggacgcctcccgcagcgacgaggcctgcggcgtgatgaagctcaccgccgccgacctgctggagctggaggtggccgaccgcatcattcctgagcccgagggaggggctcacaccaaccccgccgccctgttccggactctggacaccgccttggtcaaggagctcaacgccctgggcaagctcagcggtccggctctggccgccgggcgctataaaaaattccgcgcgatgggcgcgaaggccctgagaaaggagcgtacatgaacgggattaagttaatcagcaccggctccgccgtgcccaaaaaggtcgtgaccaacgatgatttggccaaaatcgtggataccaacgacgagtggatctccacccgcaccggcatccgctcccgacgctactgcaccgacggcgagagccacacctccctctgtctggccgccgcccggcaggcactggagcggggcggcgtcgcccccggcgaaatcggcatctgcctggtggccacagtcaccccggattttctttcccccgccgccgcctgcctgctccaaaaggagctgggctttccggaggataccatatgctttgatctgaacgccgcctgctccggctttgtgtacgctctgcacaccgccgagtgcctgctggcctccaccccccggaagtacggcctggtactgggggcggaaatcctcagccgggtcatggactttggcgaccggagcacctgtgtgctcttcggcgacggtgccggggccgccctggtggagtggggggcaaactacccctccctccacgccgtgctgggctgccggggcaactcagaggtgctctacgtccccggtgtcaacactgccgcgcccccccatgtccatatggacggccagtcggtgttccgcttcgccgtggaggctgtgccccgctgtgcccgggaggtgctggaccgggccggccttaccccggaggacatcgacctcttcgtgttccaccaggccaaccagcgcatcatcgactttgccgtgaagaagctgggcatcgacccggccaggtgccccggcaacatcgagcgcaccggcaacacctccgccgccagcgttcccctgctgctggacgagctggtgtgcggcggggccatcacctccggccagaaagccctgtgtgtgggcttcggcggcgggctgacctgggccggggctctgctggagctggcgtagcttccaacaagcggcagagccgcttgttggagagagatgcagcccccgcgcgcaagttttgtccggcttcgccggataaaactcacacttgtgggctgagaagtgttttcgtccacgcacatatcgcggccgaaaacggatttcattttatttccccgcctgcgggcggggaaactctgcgaggctttttcgtggaggcgtttcataaggagtttctatgaaattaaacgagcttttggggattgagttccccatcatccagggcggcatggccaacatcgccaccggcgccttcgccgccgccgtgtccaacgcgggtgccctgggcctggttgcctccggcgggatggacgccgaggccctgcgggccgagatccgcgccgccaaggcgaacaccggcaagcccttcggcgtcaacctgatgctgatgaatccccacatcgacgcgctggccaaggtggtggcggaggagggggtgcaggtggtgaccaccggcgcgggcaaccccggcaaatacgtccccgcctggaaagaggcgggcatcagggtgttccccgtggtggccgcccccattctggccaagcggctggagcgctacggcatcgacggcatcatcgccgagggctgcgagagcggcggccacatcggcgagctgaccaccatggccctggtgccccaggtggtggacgcggtgagcgtccccgtcatcgccgccggcggcatcgctgatggccggcagctcaccgccgcctttgcccttggggcctgcggcgtccaggtgggcacctgcctgctagccagcgaggagtgccccatccacgccaattacaagcaggccgtgctcaaggccggcgccaacgacaccaccgtcaccggccgctccaccggagcgccggtgcgggtgctcaagaacaagatggcccgggaatatctgcgcatggagaagaaggatgtccccctggaggagatggagcagctcaccctgggctccctgcggaaggccgtgttcgacggcgacgtggacggcggcagcttcatggccggccaggtggccggtatggtgcacgagatccgtcccctgcggcagatctttgaggagctgatggccggatatgcggccgtgcgaaaggggctgagcgaatgagtctggcctttctatacgccgggcagggcagccagcaccccggcatgggggccgatctctacgaggcccatcccgccttccgcgccgtgctggacgccgccggcgtggacttcgatctgaaaaccaccatgttcaccgaccccaacggggtgttgaacctgaccgagtacacccagccctgtatggtggcctttgccgccggcatgaccgccctgctggcggagcggggcattgtcccggactacgccgcgggcctctccctgggcgagtactccgccctccagtgcgccggggtgttcaccgctccccaggccatttccctggccgcctttcgcggcaaggccatggccgcagccgcggcgggccgtccctgcggcatgaccgccgtgctgggcctggaccgcgagaagctccaggaggcgtgccggcaggccgccggcgccggcgtggtggagatcgccaactacaactgccccggccagctggtcatcggtggcgagcaggccgccgtggaccaggccgccgcactggccaaggagctgggcgccaagcgctgcctgcccctgaaggtcagcgggcccttccacacctccctcctcgcccccgccggcgacgccctgcgggagaagttcaaggagaccgccttcggcgcgatgcgcatccccgtgctcttcaactgcctgggccgggagatggggccggaggacaccatccccgccctgctggagaagcaggtgcagacctccgtctacatggaggacaccatccgccgcctggccgagctgggggtggacaccatcgtggagatcggcccgggcaaggccctcatcggctttgtcaagaagaccgctcccgccatcaagacctacgccgtggagacctgcgccgatttggacgccctctccgccgcgctgaaaggataacgctatgagctttaccggaagaaccgccgtcgtcaccggcggcagccgcggcatcggccgcgccatctgcctggagctggcccgccggggggccaacgtggtcttctcctacgcgggcaacaccgccgcggcagaggcgacccgaaaggagctggaggccctgggcgtccagacccgtgccgtccagggcagtgtggccgatcccgccgccgtaaaaaccctcatcgacaccgccgtgaaggagctgggctccctggacattctggtcaacaacgcgggcatcacccgggacaacctggccatgatgctcaaggaggaggacttcgacgcggtcatcgagaccaacctcaagggggccttcctcaccatgaaggccgccgcccggcccatgatgaaggcccgctacggccgcatcgtcaacctcagctccgtggtggccctgcggggcaacccgggccagatcaactactgcgccagcaaggcggggctcatcggcatgaccaagtccctggccaaggagctgggcggccgcggcgtcaccgtcaacgcggtggcccccggctatatcgccactgatatgaccgccgccctgcccgacgcggcccgggaggccatgctggccgccatcccggcgggccgccccggcaccccggaggacgtggccgccgccgtggccttcttggcctccgaggaggccggatacatcaccggccaggtgctccaggtggacggcggaatgggcatgtgaggaggaacgcaattatggaaaaacgcagagtgctgattaccggcctgggcaccgtcaaccccctgggccacaacgccgccgacacctggcaggctgtccgggacggggtgtgcggcattggccccatcacccggtatgactgctccgcccagaaggtccacctggccgctgaggtcaaggactgggaccctaccaccgtgctggacaagaaggacgtgcggcacatgagccgctacacccaattggccgccgccgccgccaaggaggccctggccgacagcggtctggaccgggagaaggaggatctcacccgctgcggcgtcatcgtctccagcggcgtgggcggcatcgagatggccgagagcgaggagctgcgctgctcccagaagggctttgaccgggcctcccccttctatatccccaccaccatcgccaacatgggcgccggcttcattgccatcatggcgggctttcagggcatgtgcacctgcccggtaaccgcctgtgccggcggctccaacgcggtgggcgacgccttccgccacatccgggacggctacgccgagatgatgctctgcggcggcgccgaggccgccatcacccctctgtccatcggcggcttcacctccatgcgggccctccacgtgggggatgaccccagccgggcctccatcccctttgacgccgagcgcagcggcttcgtcatgggcgagggcgcggccgtgctgatgctggaggagtacgggcacgccatggcccggggcgccaagatctatgccgaggtggtgggctacggcaccacctgcgacgcctaccacatcaccgcccccgcccccaacggggagggcggcgcccgcgccatggcccaggccctgaccgacgccggggcgtcccccgagcaggtgggctacatcaacgcccacggcacctccacccccctcaacgactccggggagaccgcggccatcaaggccgtgttcggcgcccacgccgccaagctggccgtcagctccaccaaggccatgaccggccacatgctgggcgccgccggcgcggtggaggccatcttcaccgccctgagcctgcgggacggcttcctgcccgccaccatccactaccaggtgcccgacccggcctgcgatctggactatatccccaaccagggccgggagcagcaggtggagtatgccctgtccaactctctgggcttcggcggccacaacgcctgcgtgctgttcaagaagtgggagggctgagccatgatgcagttgaattccaaccagatcgctgagatcatcccccaccgctaccccttcgccctggtggaccgcatcgtggacggcgaggtgggcaagtgggccaagggcatcaaatgcgtcaccgtcaacgagcccttcttccagggccacttcccccagtaccacgtgatgcccggcgtgctcatcattgaagccctggcccaggtgggggccgtgaccatgctgtccatgccggagaacaaggggaagatcggcctgttcggcggcatcaaaaacgcccgcttccgccgccaggtcacccccggcgacgtactggagctggagtgcaccattctaaagcagaagggcccggtagctgtcgctgaggccaaagccaccgtgggcggccaactggccgtttcggcagagcttacctttgccttggccaaagatttgtgattgcccttccctccgctttttgataaaatgaaaaaaatatgacaatgcgggggcgccggcatgttggaacagaaatttgaaatcgtgtataccaaattcaaacttcatttttatcaggagatcttcgagcgttttcaaaaccgcgaggccagcctgaccacggtagagaccttcgccatggagaccatccaggccctgggctgcccaaccatcaacgagttcgcctcctttatgcgcatctcgccgcccaacgcggcctataagatcaacagcctgatccgcaagggctatgtgcagaagatccggtccgcccacgacaagcgcgagtaccacctccaggtcacccagaaatacaaggactactacaacatcagcaacgactacgtccatgccgtgaccgagcgcatccggcagcgtttctccccggaggagtgcgccaagctggaagagatgctcaccattatcaaccaagaactgatgcccgaggtggatctcggtcattctcaaactctgtaaacagaagaggcgcggccctttagggccgcgcctcttctgttttccgcgcaatcgtctcctctatcttctccgctgcccgggccgcgcctccggcggcccggaatccggcggccaggggcgcgatggcctggcggtacctctcccgatgccccagcacctgctccaccgcggcccggattgccgccgggctgcggcgctccaagcgcagccccgcccccagctccgcagcccgccgggccaccgccccctcctccgactgctggggggccagtaccatgggcacgccgcaccagatgctctcgctgacgctgttcatcccgcagtgggtgagaaacaccgacgcctcccccagcacccggagctgctccaccctggcctctgcccggacattggggggcagagcgcccagcgctgccgccccctccgggctgcccaccgacagcagcacatcccacggcccgtcccctaggccctccgcgcaggcccggtaaaagccggtattcccgtgcataaccgtaccgagggagacgtacaccagcggccgctcccgccgctgcgtccggggcggcagctccgggagggacggccccacaaaggccacccgctccccgaagtgctcgccgccgggctggaaggcccgggaggtatagacaatggtatcggtctcgctgtcattctgaatcaggtcggtgagcttttccacctcgtacccgtgctcccgcagcagggccagcctcttcccgatttggggcaggcccgtcagggtgtagaatacctccagcgggccggggcgcatcgccctggcggtctcctggtcaaaagcgaaggtggtggtggagcacaccagcggcagccccagccgccgggcgtacagcttgccccagacgcagatggaatcggccaccacgcagtcgggccggaattcgcctagctcccggagcaccttctcctccatggccaccgtcacatcgatcaccatcgccatgaggctggagaagtcgtgccccatccgccgccccagatccctgggggcggggggcaggaaggcgtcgcaggggacgaactcggctcccgcgccctccagcttcgcccggaattcctcaaaggagtagtagcgcacccggtgcccccggcgccccaactgccgcaccacctccaccgtgggattggtgtgtccgtaggcgggaatggagaaaaagacgatccggctcatattacgcaccccatttcttattagtaatacttttcttacttatagcaccataaaggcagaatgtcaagatgcaataaaagtggcccgcccacacgcgcggcacttttattgctcccggtccgaaaagacatcgcggaagaccggatccgccttctcaaaggtctggagcgcaatcccccggttcacgtccgccagcagcagcagcgtgtccccgggccggataccgaacatctcccgcacctccttgggcaccacgatctgccccttcggccccagcttcaccgaggccagatactttccctccggcatagccgccttgtccatcgttcctccctcctccgcctatctgtcggaattgtaaccgatttcctacgcttcgtcaaccaggattgccccagttgtcaaccagatgcttctctgctacaatacaggcagaacggaaggaggcggccgccgtgcagcttgatcccatcacccgcgcagtcctggacgccatgcaggagggcgtgctgatcattgacgcgcaggagcgcattgtctatggaaaccgggcctatgtggcctttctggagaaggaggccggcggccccatcgggccgatcgagggataccccctgcggctgctgcgccccggtgcccggctgccggaggtgctggttcagaagcgccccatcctgcacaccccgcgccaggagagcgaggacatctacttcgtcaacatgtaccccatcttcgacggagcggaggtggtgggcggcctgtcggtggtcaccttctggaaggacgccttcgacttccgggcggagctggagcgctatgaaaagcgcagccgtcaggtgctccgccgggtcaacaaggccaacgccgcccactacacctttgactccattgtggcggtctccccccggtcggcggcctgccgggagctggccagccgcctggcccagaccgacgtcaccgtcctgctccagtcggagagcggcacgggaaaggagctgtacgcccaggccatccacaacgccagcccccgctccgccggggtgttcgtggccatcaactgcgccaacttcaacgccaatatgctggagtccgagctcttcggctataccgagggggcctttactggcgccaagcggggcgggaagatcggcctctttgaggccgccgccggcgggacgctctttctggacgagatctccgagatggacgtcggcctccagtccaagctcctgcgcgccctccaggaacgccgcatccggccggtgggcggcgtggaggaggtggagaccgacgtgcgcatcatcgccgcctgcaacgccgatctgccccgctatgtggaggaggggaaattccgcaccgacctgttctaccgcctcaacaccttccccatccacatcccgccgctgcgggagcggagagaggacatccctcctctctgccgcagcctgctggacgagctgtcccgcaagctcaagcgacgtctggagctaacgcccgaggccctggaccgcctgctggcccacaactggccgggcaatgtgcgggagctgcgcaacgtgctggagttctgcgcctatctgaccccttccggtctcattaccgagctgtccctccccgaaaacctccggacagcccccgccgcccagcctctcacgctggcccagcgcacccgcgcctttgaaaaacaggagattctccgcctgctggcgtgcaacggctcccacctggagggcaagaaaaagaccgctgcccagcttggcatctctctggcaagcctctacaacaagttgaatgggtcgttctaactttttagaatttatttctagttttttagaaatcagctgtatcagtatgcgcgagtagttaccatttggtttctatccattaaaattccaatattttagaaatcatgcttttctcctctcttccggccgttcccccaagatactgcaaggactgcttttttatcccccgtccccgctctttcactttggcatccggattgcttattctcttgctgcaagcagcgtgtggagaggttgcttgaataaaagaggaggtaatgcgaatgtcacctttagcgattctcggattcctgacggtcattatcatgctggtgctgatcatgaccaaaaaagcatccccgctggtggccctcattgtggtacccgtggtcaccggcatcatctcctgtttcttcatcgcggttgtgccggagggcgccgcggaggggacgcagggtgtggtcgactttgtcgccaacttcaagtccctgggcgacatgatcaccggctccaagggcatcggctctgtggccgccaccggcgtcatgttcattttttccattctgttctttggtatcctgaccgacgccggtaccttccgccccatcattaaggggattctgaacctggtgggaacggatcccgtcaaaatcggcatcggcaccgccattctggccgccgtcgtccacctggacggctccggcgccgtcactttcctgatctgcgtccccgccctacttccgctgtacgacgcgttgggcatgcgccgcaccacgctggccaccattgtggcgctctccgccggcaccatgaacattctgccctggggcggccccaccatccgtgccgccaccgcgctgggcatgggcgataaccccgtcgccttcttccttcccgtccttcccgccgtgctggtgggcctggtatgtgtgctggttatctccgcattcctgggagccggcgagaaaaagcgcatcggcgccgtggctctccaggccgccggaaataccgagcaggagctcaccgaggagcagaaggccctgctgcgtccccacctgttctgggtgaacatcatcctcattgtggccgctatcgtgtccctgctgttctccggcttcgcccccgcggtggtattcatggccttctacgtgctggccaccgtcatcaactaccccagcgtgaaggattccaaggcccgggtggacgcccacgccaaggaggccctcatgatgtgctccgtgctcttcgccgccggctgcttcaccggcatcatgcagggcaccggcatgatcaccgagatggccagcacgctagtctccatcatcccccatacgatgggcaagttcttccccctcatcatcggcatcatcggtatgcccgcctccctgctctttgatcccgactccttctactacggcgtactccccgtgctggctcagaccgccgagggcttcggcgtcgccggtgtagatgtcggccgcgccgctatcctgggtcagatgaccatcggcttccccgtctcccctctgaccgcctctaccttcctgctggtgggcctgtccggcgtggacttcggcgagcaccagaagaagaccatcccgctggcctggctggtgtccctggtgatggtggttgtcgccattctcacccgcggcatcgccatctgagccgctctctcgtctttgaaatgtcaattatcagaaaggaagtcattgcatgacgaaaaccatccgcatcggcagcggggccggctatgccggcgaccggctggagccctcactggagctgatcgaaaagggcaacctggactatatcagctatgagtgcctggccgagcgcaccatcgccatcgggcagcaggccaagctgaaggacccgtccaagggatacaacggtcttctggagcaccgcatggagaaggcccttcccctgtgctggaagcacaaggtgaagctcatcaccaacatgggctctgccaatccccaggccgctgcccagaagtgcgtggagattgcccgcaggcacggcctgaccggcatgaagatcgcctgcgtcaccggcgacgatctgctgcccgtcatcaacaagtacatggacgccgaggtgtgggagacccacgagcccctgtccaagctccccggtgagatcgtctccgccaacgcctacatgggcgtggagggtattctgaaagccctggagcagggcgccgacgtggtcatcaccggacgcgtagccgaccccgccatcttcatggcccccgccatccacgccttcggctggtcgctggaggactgggacaagctgggcaagggcaccatgatgggccacctcctggagtgcggcggccaggtcactggcggctacttcgccgaacccggcaagaaggatgtccccggcctgggccacctgggcttccccattgtggagatctccgaggacgggtccttcttcgtcaccaagattccggagtccggcggcatggtcacggtggagacctgctccgagcagatcgtctacgagattcacgatcccgagaactacctgacccccgatgtggtggccgacttcaagcaggtcaagtttaccgaggtggagaaggataaagtgaaggtggagggcgcctccggcaagcccaggaccgagaccttcaagtgttccatcggctacaaggactgcttcatcggcgacggcgagatcagctacggaggccccggctgcgtggcccgcggcaggctggccctggacatcatcaaggaacgcctggagctggtggcccccggcgtgtttgacgagctgaagttcgacctcatcggctgcaacagcctgtactggaaccccgacttcaagtacaacgaagagcccagcgaggtgcgggtccgcgtgtccggccgagccaaggccagggccgacgccgagctcatcggcaacgaggtggaggccctctacaccaacggcccagccggcggctgcggcgccgtcaagcgcacccgcgacatcgtgtccgtggcctccattctggtgagccgctgcgatgttaagcccgaagtcgagatctttgaagtctgatttcaagacagaaaggaggcattttctatgaaactctgggatatcgcacactcccgcaccggcgacaagggcaacatctccaacatctccctcatcgcctacgcccccaaggactatgcgctgctcaaggagagagtcaccgctgagcgggtgaaggagcacttcaagggcatggtcaagggtgaggtggtccgctatgagctgcccaatatccatgcgctgaactttgtcatgtacgccgccctgggcggcggcgtaacccgctccctctccgtggacatgcacggcaagggcctgtcctcctatctgctggatatggagctttgagccttttcagaaaaagcgccgccccggagcctgtcgctccggggcggcgctttgccgcgtcagtcccgatccatctcataggtgagcacgccgccggttctggcgtcgatcttgtactcgtactccatgccgccggccttgaactccaccttatagcagggcgtgcgctcgtccagctcctcctccacctccagctcgtaggtgtcggtcagcgccacccccgcgtgggccaacgccgcgtcccgggcggcatcccgcccgatggcctggtccgcgggcagggcattggggtgctcctcccgcttgctcttgagcacgctgccgtccgcggcagcaatctcgtactcgtactctgtagtacctgcccagaattccagctcgtaggtcaggcggccatcgtcaaagtcccgcttgaccgtcagcccgcgcacgtccccttcggccacgcccgcatgggcgaaggccgcggctttggccgccgcctcgccgatgtcggtctgagcggtacttccgccgccggtcaggctgccgcccttttgctcccgcccgtgcttaacaatggcgccggtggcggcatctacatcgtactcatactccgtgtttccggcaaaaaactccacctcgtataccatacggccgtcctcatagtcgtagtcagcctccaggaacaccacgtccccactggtcacacccgcatgggtcagggcagcctccttggcggcctccacaccgatataggcgctctggctggctgtacctaccgagttcagcgccgggttggaggcggtcgtgctggtctgtccccccgcgctgtccggggtctggactgcggtggaattggccagcagattcagctcattgatggacagccccaccagggactcaaacgtgagatggttgctgctgtccaccagggactggatcagcgtggccttgcccagcgagatgccatactcgtccgccttttgctgaagggcgctgtccccactgagggtctgggagaggatcgctccgttgactttggcggagtctagcacctgcccgatctctgcggtcagcttctgctccagggccgcgccccgtgccgcgtcgtcgtcctccaccgagatgaggatggagttggccagctcatccacatagccgtgcttgagcagagagcccatgatggcgttgaccgccacattcagatcggcccccttcaggtccatgccgtccagaatttcgttggcgtccgcgttcagaggaacggccgaaaccaccttctcctgccggtttacatccagctccacgctgggattgacatccagagagatgaccgaagccacggcgttggcctggtagtactgaacaccggcgcctccgcccaccaccaccagcgccaggcaggccgccgcaagccaggccatggccgcctttttccgcggcttccgcgccggtacagtcatgggaatcacgtttccccgccgcggttcgcaccgggagaggagcgcctccagatggtcgggcgcggcgtgctccagcgcggtgcgcagacgctgttccagttcctgatcggtcacagggcatcccctccttccagcttcgtctttagtttcaggagcgcgcggcggtacttggacagcaccgtggacaggggcagctccagcaggcctgcaatctccctgtgcttccagccggtcaccgcgtggagcagcacaatttgccgttcgtcatccgccagcgcggtgagggcggcgtccagcacctgccggtcctccaccgtcaccatcgggttctccgctgccagccgttcccagtcctccagagccatgtcctgggtcctgccccgctcccgcagcttcatcagggcgaggttgcgggcgatggtcagcagccaggccagcggtgtgccctggggacggtactgatgggcgttttcccaggcccgcacaaaagcgtcctgggtcacatcctcagcgtcatgccggtttttcaggtaggatagggccaggccgtacaccgacgtccgcgtgcggtggtacagctctgccagcgcctcctgatcccccccggccagccgggccatcagcggctccagcagctccggcgcagtggcggtgcggcgctcctctgccattgtctcaagcaggattaacatggtgtcgcgctcctgtcatcttcttaatgtacgggagcagcgttttattgcgccgcccctctcttttttcccgattttattatatcccattcagccgctaggagtaaagcccttttttgctgggccccagccgctatgtactgcggcacaggagtgcttattcctgagcccccatggccgcctccagcttcttgagtgcttttttctcaatgcgcgatacctcgcgccgcggttattgtaaccagaggtccattaaggaaactctgagcaaatcaaccatttaaaacttcaaggagggaattgcgggtgaaaacttgtagcatatgccaattttcatagcgttttgctccatataccttctccattgcgttctcttggggcaaaaaagggcgcaataccccctcgtcaggaagcggcgagttttcgcccagccctcgcaagcatatacagattggcgcaggcaaacattgcgtacagacggttctcgttttttcgcaggccccggtacacgacttttctgtaaccaaacaggcacttgatgatccgaaaaacgtgttccaccttgcagcgcacggaggacttccggtgttcgataaatctttcccaatcaatggcgttgtcggataccctgggcaggctcttcgggcggcggttgatgcggtagtcgatgcctgaaaggtgcggatcgttatttacttcgtcccttttctcaacgccgagatagcctgagtccccgtagacaacttcatcgtcttcacggatcagacttgccgcctgtgtgatatcgtggtcatttgccgccgtgaccgtcatggtatgaacaagccctgtgccagcgtccacaccaacgtggcatttcatcccaaaacgccactcgctgcctttctttgtctgatgcatctccgggtcgcgctctctccgggcatttttcgtggaactgggcgcattgatgatcgtcgcgtccacaatcgtgccgcccctcatcatgtggcccgacttcaccattacccggttgattgcatcgaaaaacagcttgttcagcccgttctcctccaacaaatgccggaatttgcacagtgttgtctcgtctggcacatcccccgtcatgaagtcgatgcctgtgaatctacgcatggcatagctatcgtaaatcgcgtcctccgtcgccgggtcagacaggttgaaccagatttgaagcaaatacatccgcagcattttctcgatccccatcggtgggcgtccgcgttttccggatggatagtatggctcaatgactcttacccactcgtcccacgggatgatttcatccatgatttccaaaaattcttcccgctttgttttcttcttccggcagctgtattccacgtccgtaaatgtttcctgtttcattctgtacaccacctgcgcctttcttgtccctattttatctcattttgcgctgctgcggatgactatttaatcagaggctccttaaaaaagcgcctccggcgggcagaagcggaagtggatgatgagctccctctgttcagttagctccacccgctcaatgaggcttaccagaagctcccggttgtcaccagcctcatccagaaaacgctgaaccagggccccggccttgtccccggcctccgggctttcccggcgttccagctctgtcacacgccgctccagtgcgccgcgctcctcgcgggcctgccggtagagccgtgcaaaatccgcctcagccagcaggccactgagctgatccaaatacatccggtccaggacggtggtcaggcggcctattttggcccgcagggcccggatttccgccgtgggattttcccctccatgagcctctgctacggcagaccgggcggcgggcagcagggccgcaggctccaggcaggccccgcaggcctcccgcagcttggctaccacggcacgagtgacggtctgctcctgaatgcagtggcaggtgcagccccctgtctttgtgaaccgctggtaggtgcggcaaaccagataccgcacatcctccccccggctgtttttccggttgagcaccgccagcgggtgcccgcactcgtgacagaaaagcagccctttcagtggaaactcataggttcggctgcgggtgtgccgccggctggccaacagacgccccacccgttcaaaggtctccggcgtcaccagcggctcatgggttccctccaccaccacccagtcctccggtagctgccgaatgcactttttgctcttgtaactgaccttccgtcggcgcccctgtaccatatttccaatataggtttcgttttgcagcatctcagagatgcgctcaccgctccactgtccggtaccggagggatacaggcccgcgtagcatcccggcgatgggatgccctcagcgttgagctgcgcggcgatctggcggcagctcaggccctccagcgccagccggaaaatacgtcgtaccaccgacgcggccccctcgtccaccacaattttgttcttttccgcagggtgcatctgatagccatataccggcttgccgccgataaacagcccttttcgctgtttgtcccgcttgacgctggagatctttttggagatgtcctttgcgtacatgtcgttcataatggcccggaacggcgtgatctcgttggcgctggagtccacaccggtgtcgatgccgtccaacagggagatgtaccgcacacggtgttccgggaaatagcgctccatatagtggccggtcatgatgtagtcgcgccccagccgggacagatccttggtaatcaccatgttcacccgtccggcctcaatgtcccgcagcattcgccggaactccgggcggtcgaaactggtgcccgaccagccgtcgtccacatagaggccggccaccggcaccccccgctggcgggcaaagtcctccagcatggcccgctggttgctgacgctctctgagggcccgtcggtttcgtcctccctggacagccggatataaagtgcggcgcggtacctctccgccccttctatctccaggtacatgagttacccccaggggtgtccttgttaagttcccgcgtcaaaaaggcgcggaatgagccttgtaccaaatcctttgcctccgcccctccatcggtataggtacaccgtaccgtcacttcccgcttccgctgtcccaagcatatccctccttgctactgcttggtaaagcttatgcggcaggcggcgttccttgcctgtccagtcaaacttaaagaaaggggcgtcccgatcgggacgcccctttctttaagctgttacataaaaagtttgcgtacgggaatcggatccggaagagtcttgtgcaaacacggttacttcaattttgtattcagtcccggacttaccactataaaaaatagtattagaatgaaaataggcattactcgaggacataccagggtcattctgagacattgaatctgctaatgcccaaacattattaattttattgtatattactattctctttgctccaatacgcgtcattttcccagttccatcaatagaaactgaaattgctatttctccatctccagctgctgttgcattaatataatagctcataatctgctcactcgcccgataatcgatatctgaatatgcaaaagcaggtattgacagtaatattgaaagaacaaatataacagttgcaaacttagaattcattttcttcatattcatttcatcctccatcataaatcgagtcaatcatcttcttcaagtctgagtaggatatattaccgctaattacacattctacatttccttgattccatactgccacttgcttatctatatttttaaataggtaatgtactataccttccacattatatttttctacagcatcactatctttttcgaaagtagtaactgtatcaaagtttgattcaatatatttactataaacaattgtaataagaaaatcatcccaagtataatatgtccttacttcaactctatcgggtgactgaagctcacttaccgtaatcgaatccaatataaatccacttggaatccatgcaggtactatattgcctgcaataccagcctctttcaatatttcttgaatgtttaactcattacactctgcattcgtttcttccctgctatctaatatattatatgtgtctatcaaaacaaacacttcatctgtccacgcaccaaacatctgaaacacattctcaaaaccaagcgcagggggcaatgcgatacacaccaccacagccgctactatgataacgcgtcgaaaaaagtggcgttttggccttctttggggccggtactctgtctgagagggggctggttctgatggggctgttccggggttctctgccgggtagagggacaggtcctccccctccggggtattatagtactgctgaaactcctcccatgcctgctcggggtcggggagaagccctgtcggatgcctctcttctctctctaagaccacctccacaattgcgtctatataagctttgtcctcgggcgtttctgcgggcgccggcgcagcggccagcagctccagcagcttttgggtgctcaggcggcttagataggcgtagttctgatttttgctcgggcttgccattcgattgcgcccccttcaataatttatatgtagacagcatcctgtttttggacaggtctcaaaaaaatcgctccgggtgctcctctatggcgcggcggagctttttctgcgtccgctccacgcgcttgtaacaggcccatagggaaatgccagccgccttcgccgcatccacataggcccaaccatccagggtcactcttcggaacagggtaaaatcctcctcggagacgacatccagacacaactgcaccaattcgcggtcgctgtcgtcccattctgacggttcgctctccggcagaaggacttccagcggaagaaaggtccgtttctggcgggcctgctcccgcagcatgttcttcgccaccagccccgccgttttccgcagccatccggcgggatttgggctgctcatcatctcctccggcttctggcacgcaatccgcgccgcttcctgaatggcaacctgtgccgagggcatgtcctttaatatggggtagagctcgaggagcatccgcttaaaattcgcgtggtagagttcctccaggaatttcccctgttcctcattcatgtatcattcccccctcgcctgttctctctctctttattttatcacaggtgctccggcttttcttccctgcattttaccggctgtctggcaggccctgaaaaaactcctcataagaaacgccgtaaatctgcttcaaagcgatcaggacgctgacccggatactgtagcggcccagttccatctgggagatgatttcccggctgacagggaggcccatgacctggagctttaccgcgacctgctcctgggacagtccggcctgcttgcgcaggcgatgcaggtttttgccgattgagatatcctgcttaattttctctgacatgaagacctccttaaaatcaagcctggaacctatggattccgtttgattttaccttggtatttgcgccagatacggaatgtattcattccaaacggctgtcaaagaaaaaaagtatcctattccgtggatattgtcgacttccttggaaattaaccccacaaaaaagcagattcctctcccatctttcaatcatttgtccaatttccctcttttgcgtacatatagtttttggaaagcctatcggaggtcaagcagcggatgcgctccatccaccagagggtcgcttgcggctcggtccacaccagtcatggacgctcccttacatctactttttgaaaaaaggagtctgtcctatgacaaatttcaccctgtcacctacttttgacgcggcaaatgcctctcaaaaggcagagctgctcctgcgccggctgggcgtgcgcagaaacctggtcggatttgactacaccgtatacatgtctgtgcaggtggcggccaatcccagctccctccagttgatcaccaagcgtctctaccgggaaaccgccaagcagttccataccacctcaatcgcggtggagcgcgctgtccgcaccgtaatcggggactgctggaaacttgaggaccacagccttctggataccctggccggacggcacctgacccgcagtccctccaacagcgtattcattgacctggtggccggatacctccggtatccgctgagctgactgtaccactggtgttgatgtcggccgcacgtccggcactccgggcctccctccgagaagctggcttttcccgctctgacaccgcagtgagggtggcgtctccgtccgggccgtcccggcccccggagacatccccctccgcgcttgcaatagccgcggcgcgatacataggagcgggagatgccgcactgggccgcgatctcccgctgggtcaggggcgggcgggcattcaggccataccggagggtgatgatcatggcctcccgctcgtccaggcatcgcttgacgcaccggcgcaccttggcgcaggagtcacgggcatccagctcctccagcatattgtcgtccacgctgatggtgtccataagcgacagggagttgccgtccccatccccgtcaatggaatccgacagggagacctccccctgcagcttccgctgggcgcggaagtgcatcaggatctcgttttcgatacagcgggaggcataggtggccaggcgcacgttcttgtccggcttgaaggtgctgatccccttgatcagtccgatggtgccgatggagatcagatcgtcctgatccccgttgggtgtatagtactttttcatgatgtgcgccaccaggcgcaggttgtgctcgatgaggatgttccgggcctccagatcaccctgcgccatccgctccaggtacatccgctcctcctccgctttcagcggacgggggaaggagccgcttcccccgccggagaggcgcagggtgaagaacaggctgttgagcatcagcaaaatccacgcagtgaacatttgtcacacctccatagttccactctattccgcccgcgtctgtccctatgtcaacgatcctgttccatgcgtgcttcccctgcggaacgtgaacgaaattgacggtttttcccccattgcttttagtgaaactgctaaatttttaaaaatcgctccctctatatttacgaaccgctgccagaaggctataatttatcgtggtcggaaatgagcaaaatttttcgaaaatttgaccgcggagtcagatttgggggagcattttggatattgcgaatatagccgccatgtttggcgccatcgccacgttcctgtttggtatgtccaccatgacggacggcctggagaagctctccagcggccggctggagcatatcctggagcgtcttaccagcaacgtattcaagggggtccttctgggggccgtcgtcaccgggctgatccagagctccgccgccaccaccgtcatgtgcgtcggtttcgtcaacgcgggcatcatgaagctggagcagacggtgggcatcatcatgggagccaatatcggcaccaccgtcaccgcgcagttgctgcgcctgggtgatatcgacgcggacaacatcgtgatgatgttcctgcagccctccttcctggggcccattctggcggttgtgggcatcatcttctacatgttcatcaagggcgggcacaagcgcattgtgggccagatcgtgctgggcctgggcctgctgttcatcggcatgaacaccatgtcctccgccgtggagccactgaaggatctgccggagttccagtcggtgtttaccgccttctccaatccccttctgggcgtagccgtgggagcggcggtcaccgccctgctccagagctcctccgcctccatgggcatactccaggccatcagcaccaccggcgtggtctccttcaacatcgccatgccgctgattatgggccagaacatcggcacctgcatcaccgcgctcatctcgtcggtgggcgcttccaaaaatgccaagcggaccgccatgatccacctctttttcaacatcatcggctcggtctttttcctgctggttctgtacgcgggcaacgccctgttccgctttccgttctgggaaaacaccatggacatgggctctatcgccaacctccacctggcgttcaacattgcctgtactgccctgcttcttcccttccaccgccagctcgtcaagctggtcaaggcggtggtgcccggcgacgcggaggagcgggagctgtccgtgctggacgaccgtttcctgtcctccccctccctggcgctggagcgggcccacgatgcggtggtgcagatgggcgagttcgcccgggacaactaccggctggctgtggagctcatctggaaatttgacgccaagaagctggagcggctcaacgaaaccgaggtggcgctggacaagctggagggtctgctggacaactatctggtcaagctcaccgaccgggcgctgaccgccgaggagagcacccgggtgtccgagctgctgcacaccctgtccgactttgagcgcatcggcgattacgccgtcaacgtctcggagagtgcggtcgtcctccacgaccggaacattaccttctccccccaggcccgggccgagcttgagaggctcaccgcggcggtgggagagacgctggacaagacggtagcctgctaccagagccgccagcgcaccctggctgtccaggtggagccgctggaggaggttgtagatctgatcgccgccaccctgaaaaaccgccatgtggagcgccttaaggccggtgagtgcaccatcgagctgggcacccagttcctggagctgctgatcaatctggagcgcatgtccgaccactgttccaacgtggctctgcacatcctgcgccagacctcctcgcccgacgacaaggtgcgcatcgactcccacgcctatatgcacgagctgcatcacggcggtttcaaccaggagtttgacgacctctttcaggagtaccggacaaaatacttccagcccattgccggggacccggagcgcgtttgataaaaaagtaccccctgccgcatgcggcagggggtactttttgctattcataagcatagcaaagttggccatgcgccgcttaccgcggcacggccatgcgattacgggacggcccgcatgcgcaaacacttcatgcacctgagcttttgcattttttcgtggtgcgccctgttggagtgttatacgccttcaccggtcacgtcgcagaactccggctcctcccccagcgcgaactggagggggcggtctcccttcagcaggcgtgagagctccacatagcgcacccggctgttccggtaagtgagccagtagaagcgcatggactcggcgcagaggacggaggaatacaccgtgtagtcatagggcaccacgccccggtcgtggggggtgatctcccccggcccggtgagctccaccgcacccagaggaaaggcggcgctgtggagcaggcggaacagaagggacaccccctccgcttcgtccccgcccttgaccgcgtgctcccggaggaaggccagccgcacgaagcgggagggggacgaccagtccccgggcaggccggccgccccgctgccggaaaagcagggctccagccgctccccgccccaggccagctctccgtaatccaggggccggagttggggatagttcaacagattggtacggtgccacgggtagccggggctgttggtcatcactccaaccgtgttccggtagatgtgcagcccgtcccggtcggactccaccacgatgctctccccggtgcggtcggaaaacatccagtggatgggcggcacggtccccagcatggggatggccaccagcgacacccgctcctccagtgcgcgggccacctcctccaccgaggcacaggtggccaggcaccaggtcaccaggaagggcggctggaggggcagggtgccgggccgcgcctccggggcaaagtgggcaaacgtgcggtagtagagctggccgcccatcaggcccttctcgttgaggccctcatacagggccggggtggaacgcagcaccagggagccgatgcccaccgcagcgtaggccgccgtacagcgggtggacggctccagattgccctccagctcggtaccgcaggcgtagaacacctgtccccgtggtacaaaggtcaccttgctgtccgccgcaatgcggttgaaatcgaagttgcgcccccacaggtgcccgccgtccgccgtctcccacgccaccgcgctgcacccggcggacaggtcgcccagcagcgcccgcgcccggctctcgttagaatccatctgttacgcctccttctggaacctatgtgcttatggtatacggtctgtcactgattatacacctttttcccctttcccgccaccagcaaaaggagcaccccggcagccagaagcagcccttggacggcccaggccgccgccgggagggagaaagccgggtccagcatccccagagtcaggggataggacgtgcacaggccgccgttccacagccccagggcctccggcagaggcagggccgccagggcaaaggggaggagcatccacacatagagcagccagggccgcaggcggcccagcagccagccgctgcccagggcgaacaccagagggggcgccaggatcaccagggcgggcagggccagggagccccagtccgtccagccgaacaggcgggcatagagcagggcggccagggccagcgccgccaggcagagcagggccacccccaccagggcggcagcgcagcgggccagggcgtaccgccgggggtcggcgggggtggcggcggtgagcaccgccgcccgccgctcccgggccgacgtgaaaaaggtgaggaagaacagggcccccacccacacaaggggcagcagccgccccaggtaggccccgaagctccagggcgaaaagggggccgtatgggccacgccggggagggccacggcgtagaacacctgcccggcgtagaacagcagcaccgccagcaggccgatgaaaaacttgttgcacagcagccgccggcattcgcagcgaaaaatcttactcaagggtcaggtcctcctccgtcagcccgcaggcgtccaaaaattcctggtaggtcagataggggtacatggggtccagctcccggttgaagaggccgtgcaggatctcatccatggccgcctcgccccccaccagctcctccgctttcaaaatcttcagcggcatctcgctgtactgccgcatgccggacagggagttggagatggccagccgctccgtctcgggcagggcctccaggtactccgggcggcggtcgtagaagttgaggtagtagtcctccacctccccgcgccactggtccacatagtgctccctggcgtagtccccgccgtagagctccttcacgatgcggtaggtggtgtagcacgtcaggccctccgccgaccaggggctgtcggggccggcggtgtcgaacatgttgcccaggccccaccactggtggaccagctcgtggatcatcacctcggcggccccgccgcccttgcccgcgtcgcccaggttgtgggcggtgaagtcggcctcgtccagcaggctggccccgtccacggcgtagccgccgccggtcacccggctctggatcagcttgaggcgctccccgccgccgaaggacagagggccgtagtgcccggcgcagtagtccaccaccgcccggacggcctccgccgcgccggcggcctccatgacggcctggtgcttgcggccgtagtagaagtcgatggtgagccccccggcctggatctcctcacgaacgtagtcgccggcatagaggatgccgccggcacggttggtctcatagcgccaggttttggtgccgtccccatgttcggccaccacctccgcctcgctggcgccgaaggggatgaccgtcatggcggcgggcagggtgatctcaattgtggcgggatagccgtcttcgcctggcatcacgttcatcaggcggggagagagggccgcgttctccagacagaggtattcgccgctgagctccttgccgccctgcatggtgggcagatcctcctgggggaagccgccgtactccagggtcagctccacctgctcctcggccgggatggcgacctccagcttggcctcgttgtactcctggtaatcgctcaccgagaaggggatctccaccccgttggcccggacgttggagatggtgtagccgggggtgacgccgagggccaccgtctgctcctgccccgtggtattctggagctggtaggaggccgtacccgccaccgtgccccgccttgtgtccggcgtgacctgggcggagcggcgcaggcaggccaccccctccagcggttccatcgtcaggaaggtcatggcgttgagatccgggttgctgtggtcaatgaagggctgagcggcacagctccagccgcagcagagcagcagggccgcggccagcagggggcggtatacccgccgggccgtgcgtgccaaagagcctagggggccccggccgtaccgccggatgcacaggtaggacagggcccacagccccgccaggcccagcagccaggtcaggcgcatgtaggcggcggagcggaggatgcggaagttggagaaatcgtcggacagggcccagacgcaggggttgagccagcagagctgccagttgtcccgccagatggtgaggctcagggccgccagagcggccaccagcaccagggacaggtcaaagcggcgggtgaactgccacgccgccccggccagcaggatacacagggggagggccaggcccatgagaatgaggtaggccagcagataatccccgccgtcaaagacggcgcccacggtatgggccgtccagggcagccaggccagaagggtgagggccagggtcagcgccgccgtccccagcagggccatcagccttgccagggcagcggtcaggggagacaccgccgcgtcgcagagcacctccacccggcagcgggaggtacgggcgcagtcgcagagggtaagcagggcaaagagcagcccgcccagcacgcccccggccagggcgggattggccacatagagggactgcatcgtgtcggccgaggcggaccggtacaccgtcagccccgccaggggggacaggacggtgagggcggcggccagccaggtgagccggccccgcagcagccgcgtcagctcccgcaccgagagaatccagacgttcatgcctcgccctccccggagatgagatagaggtaggcgtcctccagggtgggctcggcgggccggacataggggggcagcgtctccgccaccgcccgacaggccacgccccgggcggtgttcacccgggcggtgatgtgcaggccgtcctcccggccccccgcccgcgccataggccgcccggcccaggtgcccacgtggccctctgccgcccggataagctcctccggcgtgccgtcgaagcgcagccgcccctggtggagcaccagcaggcgggagcacaccgactgcacatcctcgatgatgtgggtggacaggagcaccagccggtcctgggccagccgggaaaacaggttgcggaagtgaatgcgctcctccgggtccaggcccaccgtgggctcgtcaaagatcaaaaacgccgggtcgcccagcagggcctgggcaatgcccacccgctggcgctggccgccggagagggtgcggattctggcccgccgcttctcccccagatggacggcctcgatcaccgcccgaatgctctcccggccgctccgcaggcccttcagcgcccccatgtagtccagaaactgctccaccgtcagctcgtcaaacagaccgaagtcctggggcagatagcccaggcgggctttgtaggcccgctcgcatttggtcagaggctcgccgtccgcccgtatggcgccgccggtgggcagcaggcccgccaccagcagcttcatcagggtggatttgcccgcgccgttggggcccagcaggccgatcaggctggggctgtccagggaggcgctcaccccctggagggccttcttgccgttgggataggtcatgttcagttcttgcagggtaatttgcatggctcggcatcctttcttgtttgggttcgtcccaaggataccggccccccgtggaggagagagggagaatttatgtgttttctgtggagaggcgcggaaggagggcggtgaagcgcaccccgtcggcgctgttctcgatgcggcacgtcccgccgtggcgctccacgatcatgcgcaccagatagagccccaggccgctgccgccggtggcccggctgcgggagggctcggcccggtaaaaggcctcaaacaggtggggcagggcctcggccgggatgcgggccccggtgttttccaccgtcagcaccgcccaagccccccgggccgccgcagtcacccggatctccgccccctccggcgagtagagggcggcgttggagagcaggttttccaccgcacggcccagcagggcgcgctccccctccaccagaagtcccggctccagcgcctccaccgcggtcatcccccgctgctccagcagctcggcgtcctgggccagcttctccgccgtcagggcggacagctccaccgcctcccgacgggaggcgccgtccgactccatgcgggacacggccagcagctcccccaccagcgcctccatccgccccgccacctggagggagcgggccagatacttctcccggtcccggtacacccccacgccgtccagcataccgctcagttgccccttcaggatggtgacaggggtcttgagctcgtgggaggcggcggagaagaaggccagccgctggcgctccagctccctggcccgctccatgtcgccccgcagggccgcgttggcctcctccagctcggccagggcggcggagaggcgctctgccatctcatccaggctgcggcccagagcgccgatctcgtcccgccgggtctcgccgcacttccactggaagtccagctccgccatccgccccgcgatggagctgatgcggacgatgggcctggccagatagcgggagtaccctaccgcgcacagcagggaaaaggccaacagggccaaggccaggcagggcgccgcccggttgagggcctccaccgcctggttggccaggcgcatgggagggacaaccagcagttgataggtttccacccggtcggcaaaggtcacctccgcgatcagggcgtcgctgagggccgtggtcacatagtgcccggcccgttccctctgtgccgggccgccatcggcgccataggtataggtggacaccgaatcagactcctgcacggccgtggtgacggacacatagagggaacccgtgtccacactctccccgtcggggctcgccagggataccgccgctccgctctcccggacaaatacatccaggatgggcccggcgtcggccagcttggttagggccagccggtcggtgagctcgctcacctgcacctggagccggtcgccgaccacggacacataggtgatgggggtggcccaggcgatcagtccgaaggtgagtccccccgcccccagcagcagcagcagggtgagcaggaagatacgggccgtcaggctctcacggatgttccttcggcacacggtagcccacccccctcacagtctcaatgtagtccacccccagctttttgcggaggttcttgatgtggctgtccaccacccgctcgtccccgaagaagtcgtagccccacagcttggccagcagaatttcccgggtaaacacccgtccggggctggacaggagctcccgcagcagctcgaactcccgggcggtgagctgctccagcacccggccgtccaggcgtacctccaccgcgtcggggtccagggtcagcccccggtagcgcaggcagcgtccgggcgcgtcgccccccgcccgccgcagcaccgccgccagcttccgcagcaggatgggcatggagaagggcttggtgatgtagtcgtcgatctccagatcaaagccccggagctgctcagcctctccgtccagggcggtgagcaggacaatgggcacccgggactggcggcggataagctcgcacaccccaaagccgtccagcttgggcagcatcacgtccagcaggaccaggtcgaacgcctcctgctgaaagaggctcaccgcctcaatgccgtcccccgccgttgccgtctcatagcccgcgtcgcccaggtaggcctccagcagctcctggatgtcctgctcgtcctccacaatcaaaatgcgtttcactgcgaatcactcccgaaacagatggtagcacataattgtgaattttgtatggagaaggtttcccgcgctgccgccagaaaataccgctgtcccccttttcttctcaggggaatgatacggcccccttcctgcttttcaagcatagcgcagaaaggccctggttccgcacgtaggcagatgccccgccggcagtccaggctgccggcggggccctctcccctattgtttggaaatacttacggccgttggcgtagagtcctccttgcccagctctccggtataggtgacggatacgcagtctccctcctccagtgcgcctgtgtctactcccgctccgaattcaaaggtctggtactccccctcgtccgtcagaagcaccaaaaagtcgccgttccggttcacaactccctccaccgtgccgcccgcagcgccctccctgtccgtgccgcaggccgtcagtatggccagcaggagcagcgccgatatcagtctcaggtatctctgtctcatgttcctccgcctttttattggaatttttcgggcagcgtctgtcccgccatggcatagcaggccgcgatccgctcccagtccagccccgcctcattcccgtccaggaagcccgtcaggccccggagcatggtgtcctgtacctcggcggacgcgccggccaggtgttcctccaggaaagcaaggataggctccacctccacagtagtttgaagaagctcattgtacccgtccagcagaaccgcactctggtaagcctcctccgtctcatagcagaccggcacgttgttgccggtgcgccgctccacgatcaggcccgccgccccccggtcaccggcggcccgctcggccttctcccgggtgtcatactggcccagctccacaaaaagccgacctgcgtcgtcccgcagcaggcgcgccccctcctccggcgcggccatggccctgagggcctccgggctgtccgccgacagggtgcgcagcgagtagatggtgtccagccggttctctgcgggagtcaggcggatcacaatactgcccggctcctggtactcccggagctgcacatctgcatcgctctccagctccagttggaccacggcggcgcggtccacccacccctcggcggtgtaaacagacttgatgtactggctggtgtcctgggcgcgggagagctccgacaggatctccacccgctccgtcccgggcagggttagcgtgaccgtcttgggaaaagaggcgaattcggcgtggtagcgcccggcgctggactgctcgtagcggagggtcagccattccgtatcgccctcccgctccatggtcagggccgcccggctgcctgcggcagtttgtccgccgtccacgctgggcgcattgacccggaacacctgcaccagtctgcccagaatcggcagctcctccatggcggccgcgaaggccggcgaggcgttcacccctccggcaaacaggcccagcaccagtgccaggcacagggccgaccggacggccccccgccgcacccgcgcccgccgggccaccgtgcgccgcccacgctccaggccggtgcgaatggcggcatccagcccctgcggcaggtttccttcggatgtctgtatcatatctgtgtcgtcctttccttcaattgattcatcccccggtagtaatcggatttcacggtactctccggcttgcggagcacctgggcgatctcccggaaggtcatatcctcgtaaaatttcaggagaatgacggttcggcttcggtcatccagccgccccagctcctccctcagccagagggagtctgcccaccgctcctcaccgtcctcagccgggagcgcgtcccacgcctcctgcacagccccctgcggcggccgccggcggaggaaggacagcgccgtattggtcagtattcggtaaaaccaggggtaaaagcgttcggggtcccgaagcctccacttggcggtgtacgccttgcagacggcctcctgaaccacctccagggcgtcgtcctcatttcgtgtatacccaaaggccacccggtaaaaggatgcctttttctgctcaatccgttccacaaattccgagtcggagatggaaggatgcgagaattgcagctgcacgtgttttgctcactcctttctgcctaataagacgcggaaagccagcccttagtcggccccacaggaaattttctctaaaattttatcgtccctggcccctctatgtaaagagcctgccccctgtttgaaaagggggcaggctctgtttgatcaccggactattgggatgcttcgtccaggaactggcctaactgcgtcacaggctcctgaccgaccttacggatggatattggggtagcgtggagacatcgttcccccggatggatgatacgccggaacttcatgttgaaaaccggccgcctgttataaaatttgagaaacaaaaacgggaggccagcccctgcgggccggtcccccgttctgttccactcagtatccctcggcgtgctcgcccttcaccagcttgacgatccgggacgtgcccaggcggtccgcgcccagggccatgaagtcctcggcgtcctggaggctggagatgccgcccgcggccttgatcttcacgccggggccgatgtgggccttgaacagggccacgtcctcccgggtggcgccgccggtggagaagccggtggaggtcttgatgtagtccgcgccggactcggtcaccagctcgcacagcttgatcttctccgcctcggtgagcaggcaggtttccacgatcaccttgaggatgcggccctggcaggaggctttgatagccttgatctcggccagcacctcatcccaccgctgatccttcacccagccgatgttgatcaccatgtcgatctcgtcggcgccgttgcggatggcgtcctcggtctcaaagaccttgacggcggtggtagagtagccgttggggaaaccgatgacggtgcagatcttcagctcgttgcccacgtagtccgccgcctgcttcacaaaggaggcgggaatgcacacggaggcgcagccgtacttcagcccgtcgtcgcagacctccttgatctgggcccaggtagactcctgtttgagcagagtgtggtcgcagtgggccaggatgttcttcacgtccattagattactccctttctacgcgttgtgcagttattttacctccaccagctcgtaggagcgggtgccgatgccgattttctcacagtgggccaggcacacccgccagtcggtgtccggcatactgttgatgaagtggtcgtgcttgtcgcagaagccctccctgtgcatctgctcgtccaggtaggagccggggatggggggctgtttcccgcaggcgtcggcgcaggcctggtccagcgccaccgggtcaaaggaggcgaacatgcccacgtcgggcacgatgggcaggtcgttctccccgtggcagtcgcagtagggggacacgtcgatgacaaggctgatatggaactggggacggccgtccaccaccgccttggcgtactccgccatacggcagcccagctcctccatggccgcgtcgttgccggggcggatggcgtcggtgttgcacaccgcaatacagcggccgcagcccacgcacttgtcccagtcgatggacgccttgcggtcctccccaaaggtgatggcgccgtgggcgcactgggtggcgcaccggcggcagcccacacagcggcggggcgccaccatcggcttgccctgggcgtgctgctccatcttgccccggcgggaaccgcagcccatacccaagttcttgatggcgccgccaaagccggtctgctcatgccccttgaagtgggacagggagatgatcacatcggcctccatgatggcctttccgatcttggcggtctggatgtactccgccccctccacgggcacctccacgtcgtcgttgccccgcaagccgtcaccgatgatcacctggcagccggtggacagcggggagaagccgttctcataggccgcgtccaggtgctccagggcgtttttccggcggccgggatagagggtgttgcagtcggtgaggaaggggacgccccctaggctcttcaccacatcggccaccaccttggcgtaattgggccgcaggaatgccaggtttcccggctcgccgaagtgcatcttgatggccaccagcttacgctcaaagttgatctccccgatgcccgccgtgcgcatcagcttctccagcttgttcagcaggctgacccccggcccgcaccggaggtccgtcatgtaaaccttggaccgctctcccatatttctgtgtgcctcccattttggttcaaattgttaagtggttcttattttatacccctttgcccgttctcgcaaggggtttgcgctgaaacataagcaaaaaggccgcccaaaggagcacgcaggcccccagcaccgccctctgcccccaccggccgctgcaccaggcccccagtgccgctccgacaatgaaaaacacgataatgccgtagtactgggccgcccggtgtccgtggtcccgctcgccggtcttcccccataggtacagccgctccgtgccgctgcgcaggtttccggtgcacatagtggtggcaaaggcgttgccgttgaccttgcggaagctctccacctggaccgcgcagacaaaggccaccagcacattggccgcgttgtccagcgccgcaggcaggaaggccaccgccgccagcaggagcagttccgccgccacggtgatctgccgccagtggagggcctgggccccccggaaccgtccgcggatcagctctgccgccagtacccccgcggcaaaggccagaatgggtaccagatagtggcctgcgccgccccagtccccctccatcagccgtacccccagcagcacgatatttccggtctgggcgttggcgaacactccaccccggataaggtaagtatacgcatccagaaagcctccggtcagggccagcaccgcccccagccgaaagctctccgacatctgtctgtgtgtcgtctgttccacgcgctgtccccctttcaggaccaaaggtccgctgccagcttgtcgaaaaggtgtttcgacaagctggcggactttctataattctgagaaaataataaaaagtcgtttgattcaacgcgaaagggaaccctgacggttccctttcacactatctttcccctccaaatccttcggcaggagggtttatcgtcagtctcaggggcgggtccttgccccctccccctgtgtccggctcagaacggcaggccgagccctccggtgagctgctgcatggtggaggcggagtcgctctccgctgcccgcaaagcctcgttcaccgcggccacaatcatgtcctgaagcatctccacgtcctccgggtccaccgcctcgggggcaatgacgacctccttcagctcccgcttgccggtcaccgtggcggagaccacgccgccgcccgcggcggccgtgtaggtcttggtctccagctcctgctgcattttcatcatgtcctgctgcatcttctgaacctgcttcatcatgttcatattcatgccgccgccaaagccgcccattccgcggctgttgaatccctttgccatcggtcgcaactccttttattcctgaatgatgatgttgtcaaactgtcggctgaacgccagcagatcgtccagtttgtcgtgctccgccgcctgggcgggtgccgctgcggccggggcagcgggcgccttccccaccttgaccgcgcagcgcgccgggacgccggtctgagccgaggccagccgccccagctcctccagaatggaggctccgcccaccatgctcttggtaaactcgtccttcacccacagcgtgagcaccccgtcctccagccgcccctgcaccatggccgggttgctcaggaaggggtagaccgcaggaaattttccccgcaccgccgccaccaggccgggccagaggtcggccgcggcgctccggccggcttctccgccggtgggcgcctctccggccaccaggcggtcctcaggagctgcagacggctccggcgtctcgtctacgtctacccgctcccccggctcatcaggcagtgggggccgctcctcctcccacggggggcgctctgccgggactggctccacccttggggcggacggctcccgcttcgccggtgcgggctgcttcatgggctgccccggcaccgcgcaggccgccggaatcccccccgccagcagctcctccacccgggccagccgggcattcagcgccgcggtgctctcgtccaggcccgggtcgcaaaggcggatgaggcacagctccgtgtccgtccggcggttgccgctgcgggacagatctgcgatggtggtctgaagcaggcccagcatctgtaccagccgggccgtctggaactggttggacaggcggcgcatcgtattttcgtcatagccgccggtgagcagggccgcgcccccctggggggccgtctttcggatgagcagatcccgggtcagggcggacagctcgcccagcagagagcccacgtccttccccgcgccgtacagccgggccagggtctccagggccccggcggtgtctcccccgccgagctgctccatgagccgcgccgtctccaggttgcccgccagccccagggcgtccagcacctcctgctccccgatggggccggatggaccggcgcactggtccagcagggacagtgcgtcccgcaggccgccgtcggccagcctggccagcaggctggccccctccccccgcagctcaatgccctcctcccgggccacataggccagccgggcagcgatgtcgccggggagaatccgcttgaaggagaactgctggcaccgggacttgatggtggccggcaccttgtgcagctccgtggtggccaaaatgaacataaggtgctccggcggctcctccaaaatcttcagcagcgcgttgaaggccgcagtggagagcatgtgcacctcatccacaatatacacccgcttgcgcactgccgccggggtgtataccgcctcgtcccgcagggcgcgcacctggtccacgccgttattggaggcggcgtccagctccagcacatccaggatggagccgctctcaatgcccaggcaggacggacactggttgcagggattgccgtccaccgggtgttcacagttcaccgcccgggccaggatcttggcgcaggtggtcttgcccgttccccgggtgccggtaaacaggtaggcgtggctcagccggccggtggccacctggcgcttgagcgtgtcggtgatatgggactggcccaccacatcgtcaaaggtgcggggccgccatttgcggtacagggcctgatacaagggcggtcacctcaaatcaaatcaaaaaggagaggggcggaggatgcggaaagccgcgtcgcttcgcccctctcccgccgcgtccggcgcgtggcaagaccgcacaccggcctttggagactgcgctatacccgttacccaggcagccggctcaggagcgggacccccgcggcacaggtcgcggtccgcttagtgctgctcggttccccgcctgacacggttcacggtgcggccttgcgcgggaccgatccatcatcgctgcttacctggggcagacagcacaacgcagttccgggggccgggattcatccctgctgtagcgggttgcaggtacagggcaccgctaactccccgactagtgcggccttgccgcgggccggacgcctctgcgccgtccgtcggaaggctgtatttgatatcatacatcatttcccgccatttatcaatatcacttttcacttttttcaaaaagggtctttacaaccggataaattatgctataatatctgagtgtccacaacaaggatctttcattttgctgagagcactctgtatgggcctatagctcagctgggagagcgtacggttcgcatccgtaaggtcgtcggttcgatcccgattaggtccaccatgataagttgacaaacccaaaagccagaaaacggcttatatcaagggtttgtcaacttttcttttcgcttaaagtagtggaaaatggattttaagtgagtcgaaccctcttgcatttaaatatgaagtatagatgtttaggacacagcttcgggctgtgtcttttgttattcaaattgcaattatgaaaggaacatgataggatgaatacgacaaagagtgagcagatcaaagctgggcttcgaaaaagtttccaaactggggaatctgcaaaagcctccactgtgtgttacggatataaagtaacatccgaaggcaagttggtagcttatcccacagaggcgattattgtattccatatttttgaacgatttgccgatggagacagtctagggaaaatcgctgcttctctggcccgtatgaaggtgaaatctcccaccggcaaagagttgtggacgcgagagacaattagcaagattttgagtaatgagaaatatgtgggcgatgtgattttaggaaaaacgcaggtgcaaaatggcgtgcaggtcaagatggtcgatcacacttctcagacagtcataaatggtcatcatgaggcaattatctccagagaactatttgatattgtccaacaagaaaaagcccataggagcaggctaaaaagtcattctcatgtagtgtaaactttaaggggaaaatcatgtggtccgtcagaacaataccaccaaataatctcgtccccacgcagctaaaggtggcggcatactgccgtgtcagtacgaacagcttagagcaacagaccagtttgtcctcacaggaacaatactatgaggaatggattaagcgaattcctcattggacattcgccggtatttattccgacattggaagcgggacacaggcgaagggacgccgtagatttaatgcgatgatatcggcttgccggcggggaaagatcgatacgatccttacaaaatcggcacaccgttttgcccgtaatactgtagatgcgttggaaactatacggatgctgcgacggtggaaggtcgacatttattttgaaatagagggaatccattccctctatgaaagttcggagtttcttctggcggtagtctgcgctagagcacaggaagaaagctattccaaaagcgaagatatcaaatgggggctgagaaaagcatttgagaacccagagtctaggtattatcagagaatctgttatggatacactcataacaaagatggccgactcgtaatcaatgagaaggaagcgcaaatcgtccggctcatttatgagatggccggtgagggtaaaagtctctcaaggatatcctctcgcctaaaagaaatggggattccttctccgagaggcaaggagacatggagcagggaaaccttgcgaaagattttgaaaaatgagaagtatacgggtagtgtgatattgcaaaagacctatgtaaaaaattttctggaacacaaacaagtacaaaatgaaggacaattggatctatatcagatagataacaatcatcaaccgattattgatgatagataaagatggtagtatagtctcttttgatagggagtgcaaagacgggatttttgtagattgaatgattttattgctaaattttatcatgccatattgtagtaacatctacttcaaaggagagacagtatgcgaataataggaattgatattcagaattttcgaaaactatttggatgtcacattgatatcagtaaagaaacaactctgtttgtgggggcaaataacagcggaaaaacttcagcgatggatgctcttgcaaaatttttagcaaatcgcagttttgtttttaatgacataaccattgcaaaacgtattgatataaacagaataggaactaaatgggtggaagcggattgcgagtagcctgctgatttattagattgggatggcaagcggtgcggttttagcaaaagatattttttggtgttagttgcttgcaggcatttaacttgcacgaaaacggaatgtcgaaaaatgttcctgtcacttatagcgccgttgactaccatccgattaaaccggggcaagcggtcaaaccgcctgccctacattttcgcccagggccaggagcgttgacgctccacgtttcttttcgtcctccttctccggctccaggtaaatgctctggaactcgtcaaaggctacattaaactcaacatctatctcatagtcccgtttgacgtgtacggcctttacaaactgtgccgcaatcattttctttgcttcaaaggtgcatttgtcgtacaactcggcccagttcatcagttgcgcgtattcctctttcacctgttcggccccggacaccaattcacgcaactccgcttctgcttctttcacctgctgtcccaattctttgagttgcgtaatggtctcgtccacaatgctgtttagaaagtccacattcaagcggctgtcgcctcgaatgacacggagcgtttcagccctcaagtcctgatagtccctctgcttctgctgatactggccgttcagcaggttcagctttgccttggcgatttctacctcccggctctgctgttcccgtatcaacgcttggggcggggccgttttaatgcgttcaaactggatgcggatgatttgatccacaaggtcgtccagcttggccgcgccgtagcctgacggcccatcacacccgccggggtgctgaatgttataagagcattgatagcgggcgtaggtcttgttgactacggtgccgtccttcttctgatacttccgtccgctggtcgccagcgtcagccgcttgccacaatggccgcaataaacattccccaccaaaagggattgccctctggtattgagtgggatctccttgtgggcggtgcggggctttgcccggctctctatcatcttctgcgccctctcaaacaggtcaacgtcgatgatttgaagctcggtcaatacattttctgacctactctcaccgttgcagaggataccgatatagaggggatttttgataatgcggttaatgctggtggtgggaatattgccccccttgcgattgcggaagccctgctcggccagataccgggaaatgcgctgggagccgtagccctcatagacatacttctggaaaatcactttaacaacttcggcctcgtcgaggtcaatggcaaggtcgcagacctctttattccgtttgtttgtgcggccccgattttccaggcggtagccgtaggggacgatgccgccggtataatagccttcctcggtcaactggctaatgcgggtcttgacacggacagaggttttaatgctctccccggaggcttgccagtagcgtatgtagttcagcagtttatcaacgtgattatcgaaacgctgttgtccctccatcgcgctccaaacctcgatgccgttcttcacgaaccactccaccacaaagggagtttcatcgtcctttcggcccaggcggtcaaacatgaataccagcagaatatcaaactcgccttgcagggccatccgctgtatctcctgtactgcgtcccttttcttggccgagaccttgaagccggaaacacctttctcggaaaactccttgacgatctcccatcccggttgacgctggacaaactcacggcaaaactgcttttgcatgggaatgtcgtctttttctacctgtcccaccgtggaaacacggtaaagacataccactcgttttaagacatttttcgcaagttggatgatttgttccgccatatagattacctcctgttctggcggtgctatatggcggccagttctatttatttttcaaggtgccatctacaccattattatctcatatttcaccaaaatatgcaaaaaatcagtctttttgagtggaaacgctattgataagcacgtccttgatggcctggagcgccgggggatttttatccccgctgtatctgaccgtgaccttatgaccatcgacaaaaagcacctgggcctgcgggcctttatcgggcagggccgcaagtggagccgctttgttcataagcataacttcccttctgtaaaatggcagggccgcaccctcatgcggatgcagccctggtataaatgccgttctatccaaacccgttcctgcccctgcacatcattcagcgacgtattgctccccttggcgcgcaaatgcacactttcccggaaaggcatatcctgtttggccggtcatgcaattttcaaggtacaagggggtctgccttatgttgtagcagatagaagggctgtcgccagcccgcacaggcccgccgggtgcggtgggcttgggccggatggcggcggtgtcgaaatgtgtctcaatttgagacgtatttctccggcccggctggacaggctgccagccgggccaatgaaaaggtcatgctaccttgaaggtcaagattccagcgatcagcttgatttccagacgccgccgcatggtctcgtccacgcagagataaacattccccatctcgtcaaacaagcggcgggtggacagcttggcgatataaccctcatagtgccgcaagacagcggcgatagcgtcaggatcgccttgggtggccgcttggatggtagcatagggcaggagcttatagcggggggtgcggagtttctgctgcttactgtttgtggtattcatatccgttttcctccatgatcttccgtagttgttccaacgtgcttgtacggcggtattgcaccgtggagcgattaagaccgagccgtttggcaatttccacatctgtcattcccagcagataggccagcagaacaatatcacgccgctcttttgaaacagcgtccagcgcccgccccaggttgccgtccgagatttccatatccattccgaaaagacggaatactctccgttccggggcataggtatctatgtattgaagctgccgccgttcctccggggtgaggtcagagaaaacaacctcctgttgctcctgcctggaatactccaactggatatttactgcctcgttcttgaccacccgcttacaaaaggcgtcaaaggcgtgttccttgttttgctccatactcatggcaatacctcccggccggagaagggctttatttgcccctctatccttattacaagtggaagggggtgttttgccaaaccgcggcgaaagtagtgggctttcggcaaaaggttatctattgtgctgcatttctcaccccgcccgtgagaaatggccggaaatgccattctgtttggaagttggtggaactgtgtcgaaatggaaaaggccgccgtcccttgccttgggacgacggccttctcatggtttgctatcattcgtggagttttcatgtaaaatgctcctttccagtaaataccagcattttacatttcaattcctacaaaacccctacagagcgacttcatcatcgctataattatcgcaaatttcgctatgatacgccgtaaagcgatacccgattcgggagacggtttcgatgtaacgggggcaggtagggtctgtttcgattatttttcgcagaatagcaatagggccagacacacctcgcttatagcttccctccattccccaagcgtgttcacatatctgttcagaggttagtacaatgttgatattccgcatgaagtacagcagcaaagagaactcacggggtcgcaggtttacggactgcccccggacttttaccatacgacggggcggatcaataaaaatgtctccggcttggaaagaagctgcttctgcgttttctggattgttgaaatgattgtactctgtgtaacgccgcaactgggaaagtattatgtccgcaatcaggaatggcgcttgtttgcttgaaatacatatatccacaccatgatgtattaaagagtgcaaatcacgctccggggtatcagacagaacgactatcggaacgaatgtgacccgccggacgctgggtagccagtcaacttgcaggatgctccgcagatactccaaatccacaaccagcaggtggaatacctgttgaatcagcagccggctggcatcttgtacagtcagcgatggagtaaagcgcagattggatgtgagcaaagtctgtatattggaaaacaattcgtctgtcagtccgattgttagggcgctgtactccattcagatattccccctttctgaaatgtgtctcaagttgaaacgcattttgacataatttgcaatcaagttttaagaaacgcggaggtctaaaacggcttgttaaagacctccgcccatatccatcagtgagaactattttgatgaaaagatattattatttatctcccaattcgctttcgtgtttccaatgtctttaagctcaaaattagtgcatatttatggagcctctgattaaatagtcatccgcagcagcgcaaaatgagataaaatagggacaagaaaggcgcaggtggtgtacagaatgaaacaggaaacatttacggacgtggaatacagctgccggaagaagaaaacaaagcgggaagaatttttggaaatcatggatgaaatcatcccgtgggacgagtgggtaagagtcattgagccatactatccatccggaaaacgcggacgcccaccgatggggatcgagaaaatgctgcggatgtatttgcttcaaatctggttcaacctgtctgacccggcgacggaggacgcgatttacgatagctatgccatgcgtagattcacaggcatcgacttcatgacgggggatgtgccagacgagacaacactgtgcaaattccggcatttgttggaggagaacgggctgaacaagctgtttttcgatgcaatcaaccgggtaatggtgaagtcgggccacatgatgaggggcggcacgattgtggacgcgacgatcatcaatgcgcccagttccacgaaaaatgcccggagagagcgcgacccggagatgcatcagacaaagaaaggcagcgagtggcgttttgggatgaaatgccacgttggtgtggacgctggcacagggcttgttcataccatgacggtcacggcggcaaatgaccacgatatcacacaggcggcaagtctgatccgtgaagacgatgaagttgtctacggggactcaggctatctcggcgttgagaaaagggacgaagtaaataacgatccgcacctttcaggcatcgactaccgcatcaaccgccgcccgaagagcctgcccagggtatccgacaacgccattgattgggaaagatttatcgaacaccggaagtcctccgtgcgctgcaaggtggaacacgtttttcggatcatcaagtgcctgtttggttacagaaaagtcgtgtaccggggcctgcgaaaaaacgagaaccgtctgtacgcaatgtttgcctgcgccaatctgtatatgcttgcgagggctgggcgaaaactcgccgcttcctgacgagggggtattgcgcccttttttgccccaagagaacgcaatggagaaggtatatggagcaaaacgctatgaaaattggcatatgctacaagttttcacccgcaattccctccttgaagttttaaatggttgatttgctcagagtttccttataaattttgtcactaagatgatatataggcttattctgcaaacgagaatttatcttttgccgggccgcatttgctgtgcatccggatattcatccatacacatcatgtatagaaactccaagtcatcactgtgttcctcatcgcgttccttgtagtctagcttttttagcaacgaccattgaaaagagtcggggttatcagtaaaggctttttgcatctcgcgatttggccaaattccaagctgcaactgaaacagggaactgttgtaatcagacttggcatcttttgagactgctatccacattttttcgccattctgccagcagacaatccccatgtcgggctttcgttggtcatactgcgcacgaagcgctttcttcttttctttgtccattacaattccaacctcatatgaataacttcttgaaaccctgtcttacgagaattaaaacctttcggatttctgccatattcgataaatccagctttttcatacatggagaatgcccttacattttcagcaactacactcaattcaagctggctatatcccgcagttttagcgcattcaatacatgaagtcatcaatgcttgtccaattccaagtccccagaactttttcagaacgctaataccaaattcagcacgatgccgcaccttgtatttcgcccctactgcctcgattccagcagtccctatcactgcgccatcaattatagcaataatctcgatttcattttcactattttccttctctttcagaatccggctttcctgtgctgcatcaaaagtgttttcatcgggatatgtaagtaaatagtcggtttgggtatgagttaaattgaagttatctaacacaagctgtccatcactttcagttgcatttctcaaacaacattccataccattctttaatattattattttgttatatctcatagctgctcctttactgacaactgccttcaaagtcagcttcttcatctatacaatattctaagcaaaaaaatgttttctcatttcatattgtttaacaaatacactaaatttcaacttcttcaaaaaagcgttcaatgcctgatctcgttcatccacatttattactctcatctctaaactctttgtttgtttaagtaaatctaacaaaatctctgtggcaactcccattctgcgatatttgggatgtaccgctaactgtacaatatctcctttcattttgtccacaataccatatccaatcaagtttccatcaaatttaacaatcgtataggaaaaggatttagcgattgcacaaacagcatcttttgcgttttgccatgaaggtggataagaccaaaaatctttgactgctgtccattgatcatcttgtaatttttctggatgttccagtttccacactttatatacgcccggttcttttatcttgcccgtcagttggtaacaattcaatattctgttaattcgaaatccctgctttttatataaagtaagcgccttctcattatcctgaatcacttccagttgatacacgctgattttattttttatacatatagttctaaccagattcaataactcccccataattcctgttctccgaaaatcggggataactcctgttccgaggtcatatactgtcttttcgttatcccaatctctcactccattcaagataaaaccgacaagcgttctatctgcaaaggctccaactgaaaccgcaggcataaatccatttcttttcagcattgtttcaaaagatttaaaaggcatatcaactgaaacctgataatcagaaaacgcctgtgtaaacgcttcgtatatacaaacggaatctgtattttctaatgtccgatattccatattttctcctagaatgtcatatttactctattggaagattgtgctgcttcaaaaatgagagcttatcccaatagcctcgttggaatagaattttcccattcactacctgaaaaaaaccacacccccgtaaccccaatggatcacgccattcaaggattgaccattgcccatcttcaaaaatattttccacaatacaaaccatttttgcagttgaaaactcatttgcaaacatttctctaatagccacaactcctacaacaggttcatttataacttgatggtttgttgcattattatcatacagactaacaatcatgtctacatcaccagcattaaaagcgtctacccatttttttactacttctttcggacttaacatatattgttatcctcctttttgattaaaaataccattggtttatatttgtcattttcttggaaaagagttcagcaatactccgggctggtgcaacctattcatcttgctattaactatcactgctgacattgcaaatttaatttatactactattttgaatttacttcatttaagacaattactggttcattcatggcagatattcctccttgtaaaaattgtatttcaacatattcaggatttcttcaaattctttcataataccatcataatctgccccgttttccaaccgaacggccatcccctgcgcaagcatcataagcatctgaaacatcagctttgcgtcccctggacgtttgaatttcttgtaatcttcttcgtgcaaggccaatgcttctacatattttgtattttccggagaaagcagtaccccctttaatttcggtgcgggttttaccgccgcacttgcaataaatgacccaatatgcgggtgctgtttcaaattctccactttcatcacactggcctcccacacccgatcaaagaaatcagtgttttcctccaatgtgtttgcatcataggcttgtttcatttgggctgtgcagtagtcaagcaaatactgatagagagcctgtttactaccaaaatactgaaaaatggacgcttttgagatacctgccgccaccgcaatatcattgattgacgctttttcgtatccatgttttgcgaagcaagccagagctgcattacgtatagtattctgtttttcgtttgaaagagcaaaaaatttttccattatacttgcctccaaagttaatatttctttcaattttttcttttactattgaaacacttacctcagcagataccatctttgtaattattttctattttagcataaaatctgcccattcgcctttatagtcacttaaatgctcgttccagtaaaatagtctgcttatatacttttgcttacgtttttcaactgtttcaatgcaacagtctattccaagtccaaatatcagatgtgccttcataaacaagaaaatattagcttttgagttcattttcaatgagataattcgcaatttcaaatgcttttactcgccttcttgccaatgtaatctgcgacttatatcttccttggttttctttggattcaaaagtctttattgtttctcttagtttatgaagcgttgagtcaatttgccttttagcctcgttcaaatcatctcttgaaaactccatgttgctttcctcctgagataaccgaatcggttttttcggacagtatatcatatatgaccgaatcggtcaaggcattttgcgcaactacaattttacattattataactatcctcaagctagagcaggctctaacgcaaataaaaatgcgtctcaacttgagacgcatttttcaacattctccgcagcatattaaaatccgctccacactggtctttgacgatatagaaatgcctgtgtgtcttggcaatcctctactgtcagatcccgcagacgttttcgagactttgataggaatagtttgcttctcagcagcgggcgggcctgatgtgtttccacaagattatctacaaggagcgcacaggcgtaacattccggctcatgttcttggacatgccagtaaaagtagttggtatggaacgggcaaaacaggcaacagcttgccttggttgccaatccccatacatccttattgtaggtgtagcagtcgggccgtgtccagcccatatccaccagcggatatttggggaatcgggtaaaataatttcttgctttttagagcgtactatgatatactgctattatcctgatttgaggagtctatcaaatatgcggcaaggtattcttaaataaaatttgataatgggcgcaaaaatgattgccccttgcaggggcttagtttttgtacccaatttaagaatacttttgcctttttagtaaatatcgtgacggagagcggctcatgtaagccgtcatacttctgtgtatccgaagtcatgatccccagcggtaaaagtattagccgctggggatttttgcgcccatttgggccttgtatggaggatagacatgaacattatcaatatcgggattcttgcccatgtagacgctggaaagacaaccttgacggagagcctgctatatgccagcggagccatttcagaaccggggagcgtcgaaaaagggacaacgaggacggacaccatgcttttggagcggcagcgtgggattaccattcaagcggcagtcacttccttccagtggcacagatgtaaagtcaacattgtggatacgcccggccacatggattttttagcggaggtgtaccgttctttggctgttttagatggggccgtcttggtgatctctgctaaagatggtgtgcaggcccagacccgtattctgttccatgctctgcggaaaatggacattcccaccgttatctttatcaataagatcgaccaggctggcgttgatttgcaaggcgtgtatcagtctgttcgggataagctctccgccgatattatcatcaagcagacggtgtcgctgtccccggaaatagtcctggaggaaaataccgacatagaagcatgggatgcggtcatcgaaaataacaatgaattattggaaaagtatatcgcaggagaaccgatcagccgggaagaacttgcgcgggaggaacagcggcgggttcaagacgcctccctgttcccggtctatcatggcagcgccaaaaagggccttggcattcaaccgttgatggatgcggtgacagggctgttccaaccgattggggaacaggggagcgccgccctatgcggcagcgttttcaaggtggagtatacagattgtggccagcggctcatctatctgcggctatacagcggaacgctgcgcctgcgggatacggtggccctggccgggagagaaaagctgaaaatcacagagatgcgtattccatccaaaggggagattgttcggacagacaccgcccataagggcgaaattgtcatcctccccagcgacagtgtgagattaaacgacgtattgggggacaacacccggcttcctcgtgaaaggtggcgcgatgcccccctccccatgctgcggacgacgattgcgccgaaaacggcagcgcaaagagaacggctgctggacgctcttacgcagattgcggatactgacccgcttttgcgctacgaggtggattccatcacccatgagatcattctttcttttttgggtcgggtgcagttggaggttgtttccgctttgctggcggaaaagtacaagattgaaacagcggtgaaggaacccaccgtcatttatttagagcggccgctcaaagcggccagccacactatccatatcgaggtgccgcccaacccgttttgggcatccatcggactgtctgttacgccgctcccgcttggctccggtgtacaatacgagagccgggtttccctgggatacttgaaccagagttttcaaaacgctgtcatggatggtatccgttacggtctggagcaaggcttgtgtggctggaacgtaacggactgtaagatttgctttgaatacgggctttattatagcccggtcagcacgccggcggactttcgctcattggccccgattgtattggaacaggcattgaaggaatcaggaacgcagttgctggaaccttatctctccttcaccctctatgcaccccaggaatacctttccagggcttatcatgatgcgccgaaatactgtgccaccattgaaacggcccaggtaaaaaaggatgaagttgtctttactggcgagattcccgtccgctgcatacaggcataccgtactgatctggccttttacaccaacgggcggagcgtatgcctgacggaactgaaagggtatcaggccactgtcggcgagccggtcatccagccccgccgtccaaacagccgcctggacaaggtgcgccatatgttcagtaagatcacttgatacgccacagcgaggaagtgtaggtttgtcaaacatattggacagagaactcattgggagagagacaggcaaacaaagttgtctatacatcccaggaatatacaagagattgtatgttcgagcgcaatagacacctggcagattacagcagcgtgtgtatctgctatctgaataagccatctggtggcaaagtatacaccgttgagtatgcgaaaaaacttatcaatcttgcagaaaaataaaaaacaggccccgtaccagcaaatttgccagtatggggccttaaaacgtgtctcaagttgagacgcattttccgacgattttcgtgggatggtcggctgccttatcccaatatggccgctgtaattttgaactgtctgctgaatgtcctgggcgtaacaatcttatcatcgtttccatcctctgcgccatagaacagggccactctaccggcgcaagtgtttgccatccccgtttttccagtcagacattccgtaatttcaacagtgtgggcaatctgctccgctgttatcagcttttcatattccgtcatggcccgcctcctgtcagtcaaaaatgtccggcctgcccacggcggtaaagccggacacggaaaactcggtaataacaacattattctgtccactggcacaatggcagaccaacagctttccagcctcatttctgccaacgatgatcccgatatggctatcgtcaggataaaaagccaggtctccgggttgggccgcgctctgcgaaatatcggtacagtatcggtgctgcatgataacaccccctccgtggcctatgatatagcccaggctgttgttgaacgtccaatcaacaaaaccggaacagtcaagcccgaaggggcggtaggtgcctgtggtggagctgccagcggcccacaccttggtaagctgcccccagcgggagtcccagccaatggcgcggctctttccgccccaaaagtagttgactttccctacaagctgaagggcagtctgtacggtgtcccggcgggcctgttccaaatcagcgggcaaggccgccagcacctcccgtacatccgcatttgtgatggcaaggctcccggccagggaggacagcgcggcccggtctgccagcaattcatccagggcggaaatctgataggcggtgaaaccgtaggccgttttcatgtcctcggcggtcttggcggtgatggtgaggtgcaaaatgcgttccgtccagctatcatccgtatcatcgtccgggtcgctgtccgggtggtcgatggtctccaccgttgaggtcagggccgtcatatcccaaaaggtggcggtcaacttgctcacacggtcagcgtccagggtggccacgtcaataccgtcctccgccccggcgtaccgggcggcgaatacggccagcacgtcgggccagtcagcggcggcgccggtcacatctatactgtcatagtccccggcctgcaattcctccagcttggtattataggccacgttcaccgtcccaacggcctcggccacggaaacggtgtccggggcgctgcgttcctcggcaaagaacaggccaaagggcgagttggcgacggcggcgataataatgaccactaccagcacgatcaaaaggatgccgccgcccaccagccctataagagaactgaccaaggaggcgacagcctttgtcacagcctgcactactcgtctggccgccgctgtgtttttcgccgcttttcccgcccgcttcacggcctgttgggtcatacgccgctgggcggtctgtccagcggcccggaggggccggggcgacgccttgaagggcgtccgggccgtcttgggcgcaaagggtgctttggcataggcgataccccggcgcttgggtacgggggctttggggctggccctgccccgtgggaactgccgcccctcgccggggacggttttggtggtctggacggcctgggtactctgtgcggccctgcctgcggaagttcccggctggctggaaaggccccgccgctggacggtctgcatgggccgggtgggaatgttggacgataccggcctctcccgccccctcccctggggcgctgtggggggccgctggccgggccgctccatcctctggcggctggggtctggcccggcctgtcgtactgttccaggcggcggggctggccggtatgccccccgctctttgatgatgggtgcctgcggctgtcccttgccgctcttaatggcgctggcagggcgctccttgatggtctggacagcctggggcggctggtcggctgtccgtgggggcgttttgccgccgctggccgcttccgcctgccgggtcttgatttgcgccgtcctctccttgggagtagcggctgtgggccgttcctgggctgttggcggcccctccgggggcggcgggccgtccggccccggtgcctgcttggtggcctcctgtccaggctgtggtttctccttgatgcgtctgtcacgctggcgggaacggtggggctgggtatggacggccagctcgtccgccacaaactgcccgccgtcctccaactggtcgatggcctgggtggtctcgctctcccgcccctcctggcgctggtcaaactggcggaggtacttgtccttcatcagcttggccgcctgcctgggggcaagggcaggctgggatttgcttttcgtccccttggccttgcctgtcttgggcttttccttgattttcttcatgttgttctccatataaaaaagaggtcgaaatgcgtctcaaattgagacgcatttcgacaggatttttacttgtcaccgggggtagtggtcatcaagcggtaaagttccgtgtccctggggaactcgttggcgaaggggacgatggagccgcccacccggatcaggccgtgaccggcctcggcgctggtgatgtaggacatttggtttgcggagatgttcagcagcttggcaagctccgcccggtcggtggccgcctggttcagcagcaccagaaactcactgttggcgaacatgagccgggcggtgtcggagcgcagacattcctctacgttctgcgtggcggcggtcatggcggcggcatacttgcgaaaccgcttccagcacttatagaggaactgcgccgaatagtggtagcggaagaacagatacacctcatccacgaatacccatgtgtacttcccggccagccggttagccgccacacggttttgaatggtctccagagtgacgttgagagccgtcggtttcaactgttctcccatttcatacaagtcaaaggatacgatgcggttggcaatatccacgttggtctcatgggcaaacatattcaagctgccctccacgaaaagctccgacgcgagggccagctcctgggcctcccgttcctcctgccgcttgacctcgtttcgccagtcggacaggatcggctgacgggccttgccgccgctcttgattaggtcgtggtacacattggcggtacagcggtcaatgatggacttgtggaaggcccccaactggcccgcgcccatctgctgctcgcaaatgctcatcatcagctcggacttcatcgccaccgggttctcgccggtgccgtagcccctggcaatttccagcggattgatgtggtgggggctgctgggggaaatctcaatgaccaccccgcccagggcgcggatcaggtcgccgtattctctttctgcgtcaatgatgataatatcatcgttggtagaaagggcgataaaggtgatggcctccttcatgctgaaggatttgccggagccggacacgcccaggataaagccgtgggggttcaggagccgctttcggttgcagattagaaggttgcggcttacggcgtttacaccataataaataccgcccgcgtcctggatctcctgcactctaaagggcataaggacagcggtgctttcggtggtgagggtgcgggtggtcttgacacggcgcaggccatagggcagggccgtgtttaagccgtcctcctgttgatagcggaggacggagaactggcaaaggctctcgttgccgatggattgcagggtctcggtatcggcgtccaactgctccagcgtgtcggccatgtgtaccaacgtgacgttggcgaagatcatccgctggtcgcgggtggagaggtcatccagaaactccttgttttccgcccgaagctgctccagctcataggggacggtggcggtaaagttgttgttggcgttctgcttctgctgccagcgggtaatgtcgctctccactcccaaaatccgggcctgcatttccttgatggcctcgttggtgggaacggggagaatgtcgatggatagcatgaggttccgggagaagtcggacaggtcggttatcatgcggtctttgatgtagctggcgtactcccggaggaacagcacccggcccaccttcccgccgatctcgaagtggtcggccttgaactgcatcccatccggggcgatggcgtccttgaagctgtgtccccgcttcatagcctcggacaagtcgatgcggaagtcctgttcctcgccggggcggaaaaagtcatggaaaatgcggagccgttcatggttgtccagggccttggccccgctgtccagcttgccgaagctctttcccaggtcaatgtccacccgcttgaagaaggtgcgggcctcctcgatgttcttccgctcaacggaaatggtgatgtatttatcttgaatgaggttgttgctctccacggccttctccatgaggatgccgttgtactcctgccggtacttgtccaggccgtcccctttcagccgcatgaggacgctgtgctggaagtcggtgccgttgagacggcggttgttgatggtgattttcgccgtggccccggtaggcaggctgttgaggacgccgcagtaggacaaaaacatttcctgttgatcctcatgggacgctacggagtagttaatgtccgcgaagcgccacgtccggctgtattttccgttcaccatccatatcccgtcccgatagatgcgctggatgggtatggactgctggacgctgcgggggattttgaaatgctctctctcgctcttgttggcggcggctaacgtcttaatcatagtcatgcactcccttccttgtcagcgccttgcagtagatattttccgactggaaggtgcgcggcccggcgcagaggatctgagatttgagccaggcccaggcgaattgctcaaaggtcaggccgttgtactggaaaaagccggtgacggccacgggagccgccgccacgatgcaggcccagcttgccgtctccgggccgacaacgtgtttgataaggaagtacacgcccacggccaccgccacggccagcaccgcgcaaatgaactgccgggcggacaggccgaagaatatggtctccttgtgcgcccgcacttccttggggattttgatttccatgttgtaattcctccttaatgcgtctcaaattgagacgcatttcgacaaattcttacagtccgaacatctccctgacaatgcgctcggcgcccttcaccagtccaacgaggacaagcatattgaagatcgtttccccgatgtactgccagctcatggtgacggcggagagggtcgtatctaccaccggcgtcccgctggacataaaagcggagaaaatgaggcaggccaggacaatgaccgcaccctccatgcaaacgccgatatagcttttcaaaaaggctttcccggcgaagctggtgccttccccggcgaaggacgccagcgggatcggggccagggcggtgtagaagtacagacggaaaaagcgcccatacacggtgaggatcaggataaaggacatgatggtgatgaacaggctgcccagcagggagaccagccacaacgggatgctggccagaaagcccaccccctcgatggcgtcaacgatctcctgggggacgctgacactggccgaggccataccgccgatgctgttcatcacggtctgtaccacgctcccgcacacggagaaaatgcccgtcataatgtccatcgcggagccgacggccagttttgccagcagaaagcggataaagtgccgcagtacaaattccgggcgctggaagtcccggaaggagacggcggactggaacacgctcatggcgaagaacagcaccagcaggccgtaacccacggctttcagcgcctcattgatggtcacgatggtcgtccagatggccccgccgtggaacgcctggggcgtggtggtgataaggctccatatctcggaaattttgccgttccaggtttcaaaggccgattgcaggttgccgacgatccagttatcgctcaaagcatagtcacctccccaaatgcgtctcaattcgagacgcatttttcgacaatatatgataatgtagggagcaggccggacggcccgcccccggatgggtcagatcgcgccgatggcggtcaaaatctccttggcaaaagcgatcatcaagccgccgaacaggcacaggaagccctgggtgcgctggctggcgtcatgggactggatggacatacccacctggacgatgccccagcccagaacgatcacgcccacggccttgatgatattgaaaatgaaatcagaaagattatttacaatggtcagcgggtcgctcccggcagccagggccggacaggtcagggccgcgcagagggtcagggccaggacagccccgaagtagcggcgcttggccttgcgctggcggctggcggaaatggtgtcaacggtctttttcatggtgaaagtcctcctcgtcaatgatttcaatattgtccaggccgtcgaagggcagggacagatcctcctgctcaaaggtcaggccgggataatggatgtagggggcggccccgccgtcctcggtaagcttgatatgggggtgcttgagaatgtcatatttgcggtcaatgaccggcctctcgccccggataaagacgatggcatagtcgttatccatcgcccggacttcatcgggggtcaaaagttcgcggccggtctgctggtggctggtggatgtggagccgtgggagcctttggaaatgctctggttccgggttccgatggtttctttccccagcatttcggaaatgtatttgtgcgtactttgctcattcccgccgagatataccagcgtatctgcattacccatcaggccctcccaatcgtctttgaacagggcctttagagccgatatgttttgcaggacgatggtggacatgatgttgcgggagcgcatggtggcttgcagtttgccgaagtcgtccggcagggacacgttgcaaaactcgtccatcatcagacggacggggactggcagcgccccctggtgtaccttgtccgcctgatagtagagggcttgaaaggcgcaggtgtagagcatacctacaaggtagttaaatgtgccgtcattgtccgggatgatggcaaagacggcttgtttgcggtcccccatctgtcccagttccatatcgtcccggctggtgatgcctacgatctgcgggaggataaaggcggacaggcggacggcggcggaaattaagatacttttcgccgttttgcccgccgcctgcttgaagattttgtactcccggacggcgatgtgatccgggtcctcctcctccagcgcctcaaagagcaggtcaaggggggattgaaaatcgtcgctgtcctccctggccccgccgttctcgatcatatacatgaccatttcaaggttttgctcctccgggggagcttcatggagcaggtacagaatgagcgccgtgtccagggctatctcggacttctcccaaaaggggtcattgctgctggcgttcttgggtgtggtgtttttgataagattattcaccagcttcatagcgtccttgtcgtccttgatgtaggggaacggattgaaggaatcggagtgggccgggtcaatcaggtcgaacaccttgattacatagcccttctgaatgagcagcggggcgacggcccggagcatttctcccttgggatctgtcacaagaaaactgcaatttgcctgcatgagattaggcttgcagaaaaagcgggtcttgcccgccccggagccgccgatcacgatttgcaggaggttgcgccggtgcttctttccgttgaggcccatgcgtaggttttgggtcaggagcgtattttgaaaggggtctttgtcccggtacttggcgcagagctgacggacgctgccccatctggccgagccgtgttcctcgccgggccgccggttctctttcgtggagaaatagagcgcggcggcgcagccatagagggccagccccaccagcaggaatttcaaggtgtggggcgtccagtggagtgcgaaggggcgttccatcagaagattgaagcgccccatcaggtcaaagagggtcattccgtcctcatagccggtagccaggagcgccgagagccagaggacggggatcgccagcagcgcccagggcaatatgggattgccgtctgtttgccgtttcataaagccgtttgcggcctcccttctttacaaaaatggggccgtccccagccggagacggccccggaaatgcgtctcaatttgagacgcatttcgacaatatcctacctgggcttaatagccggtgcggggaagcggggtgggcttgccgtaaacagtcgtcacccagcgggtcacagcctgcacccaggccccattgtagacgccgcccacgtcggccacgttgacgaagctggagcctgcggtcagtcctttgacagcggtacagtagagcatgggggcctccacctgcccgaagcctccgggggcctgaccaaagataaacatgatctcggtcacgcgctcattagccgcgaggcccagggccacgggggatgcggccagcgtgtagttctggctggtggagaggttgtcggccagagtacggtagtccccggtgttgttcaccttgtagacgatcttataattgccggggcggttgtaggtgccggtgacaaccttatccagcgtaacggcggcgggcagggtgtccctccaataaaaactttgcagagtgacgttgcccgtgttgccgattttggagaacacatagcgcacaggctggccgcctactgcctccttggggccggtcttggaaatggatatgccggtgttggcgctcttgttcgtgacctcgaatttcacgatttggccgctgtactccaaaacggcggtaatatccgcgccgttggcggagtagttggccggggccttggtctcccggatggtatagcggcccagggggaggggcttggacaccgccagcccccggttatcgctgacgatggtatccaccagagcgccgttgcgctcgttgtagatttcaaaggtggccccttccaggagcgtcccggcaggcaggccgttgacgctgttgtactcggcggactttttaatgatctggatctgtccccggagggcggcgttgggccatgtgatggtggtgcagccgccatactccacatagatagtcttgggctgggtgtccagaatatagccgtccgcgcactcgatctcccggatggtgtaccggccatcggcaagctcatggtcgatataaacatacccctcgttgtcgctctcgtaggtgccgatggggttgccctttgcgtcggacagcaggaactttaccccgaaaatgcccttgccggtcacactgtcgatcttgtgaatgagggcgctgccagtctgccggttggtgatctccaggatggcggtgccgccgtccttcacctcgatctggtggggcgtatcgtccagcttgtagccctcggcggctttcagttccaccacctgataccagcccttttcagcctgtggcagactgataacgccgttggtgtcggtggtgtaggtgccgataatttccccgttcagcttgcgtacctcaaactggacgcccttgatacgctttccggtttcctcgtccttcttgatgatggtaaggcccccggccttggtattgtagaccgtgatggtctgcgtatcggtagggttcaccttgacggtctgcgtcttggtcccctcgtccatgacgtacccaggcaggggcttggtttccgtgatgaccagtgtacccactacgccggaaatgcgtatctcaccgttggcgtccgtcttgtagaggcccttgctggacaggtggccgtagtcgtcgtcaaggtagctgccgtccgagtaggtgatttcaaattccacgcccgccaggggttcgccggtctgcttatccagcttgcggatcacgatggccccctgcttctggttgtaaaagcggagggtctgtacctcgccctccttgattttgatgcttttggggctggtgtcgaggacgtaaccctccagcgtcttgacctccttggcggtgacggtggttccaggctccagcccctcaatgacgatgcggccattctcgtcggtgataaactcaccgttggactggcccaccaccgcgccggagctgtcggtgacaaggaaagttacccctttcagcggggtggtcgtcccctcgatatacttctcaatgacaagggtggtgctgggggtgttggtgaagtggagggtctgcgtatcgttgggccgcacgtccacggtctgcgtccgggtggcctcgtcgatggaatagccggggagggtcttgacctccgtgaccaccagtgtacccaccacgccgttgatggtgatcttgccgtttttgtctgtaaaatacaggccgttagagctgatatggccgctggcgtcggggacatactcgccggtggaggtcgtgaccttgaacgtcacgcctgccagcggtttcccggtgagggagtcccgcttgtcaatgaccagcgtaccggccttggagtttttcacgatgaccgtttgcgtatcgccgccctgcccgatgacgacattggtgctggcggtgtccatcacatagccggtcggagccttgatctcattcagtacataagcgccgggggcgaggttggaaatgcggatttcgccctgtgcgtccgtggtgaaaatgccgttttgggtcaagctggacgtgccgatcacaccgtccagccccacctcacagcccgccgccgtggtcacgcggaactcggccccggcaaggggctggcctgtggcgctatcccgcttctggatgataatggcccctttcggctggtttttgaacgtgagggaaacggtgcggccctctttgatctggacggtctgcgactgcgtatccaggataaatccagcgggggcgcgggtttccgtcaccaccacgctctttcccggtttcagcccggtgatgcggatttccccgttttcatctgttctgaaaatgccgttcccgtccccgatcagggtgccgtccgcgtacatgaccttgaactccgcgttctggagggtgacggagggattgacagagcatacctttctaatcaaaagctgtccgtccggggcattggtaaaacgcaccgtgacaacgctctgctccccgctgtcagccagcatgatggtttcggaggactggatgatgttatagccgtccgcggcgtccacttcttccaacacatacgcgccggggttcagccccgtccacatggcggtgccgttcttacccgtcacttttgtaccgatcactgtaccgcctgtgccggaagtcccgcccaaataccgcagttggaacgtgcatccgggcagggcctccccggtgacggaatcatatttctcgcaaattatggcgtttttcggcacattctcaaaagtgataactttgctctcgccgcccttgatataaaattcctgggtggcgggttccttgatggtgaaacctgcggcgggttccagctccgtcaccttgtaccagccatcccgcagcaggtcaacgaaaaactggcctttggcgtcggagtagaaggtgccgaggctgttcaattcgcccgtggtcgtgctgttgctcccataccagacttcaaacttggcccccttgatggggctgcccgttatgctgtccaccttgttcaccgtcaaagtcggctttttgtggttctggaaatacacggtgtggtcacggttgggatagagggtgataagctgggggtctgcgtccatgagccagggggccgggacggacttctccgacacttcatagacaccgggcaggaggttggcaagggtggccttgccctcgctgtccgtcctgatttcgtcaacggagtggccgtccgccgccttcaccagaaataccgtgtcggggatgggctttcccgtgtctgcgtccttcttgtaaatggtgaggttagggcgtacctgattctcaatggtgatggtgctggtctggccggggaataactcaacgtggtattcctgaaggtcgaggatgtggtcggctaccgtggcggtctccttgacggagtacacacccggttccaggttgggaatgttaatctcgccggtatcatcggtgatgcggtcaagatagtgggtgccgtcctcgattttagcgatcctaaaatgcaccccgcccagccgggagccgtccgaactggtcttgataagccgcagggcgggcttgggggtgttggtgaaaacaaagttggcgttctcgtccgggttgatctgcaccacccgcacagcgtcatccatgaggtagccgtccggggcctccagctcccgcacttcataagcgccgggggccagcttagacaggtcgatttctccgttcagatcggtggtaaattcctggcgataagagccgcccaccagcttgaactcaaatctgacgttgggcagggatctcatggtgatgctgtccaccttaatcaagtggatgcccggtttcagagagttgaaaaagaccagctcccgcgtctgcgtgtcgcccgcatttaattcgatctgctggggggtgctgttcaccacatgggcgtcgtccgtggcgatctccttcaccagataggtgccggggtcaagctcatacagaaaaatctcgccgctggcgttggtggtgtactctccaaacaggtcgccgtcatgccagacctcaaaggtcacgtcaggcatgggggagttgctggtcaggtcgtacttgaggatacgcagggcgggccgcgcccggttggtcacggtcagcaccgggtcgtcctcggtggtggggtcatagggatcgatgtggatgccgtgaggggtcttgtccagaacgtaaccggcgggggcggcggtttccaccacctcgatataggcttccttcttgataccgctcacatgggcctcgccatcgtcgttggtggtgacggaggtgataagctgcccgtccgcatacacgtcaaaggtggcgttgggcagggatacgccggtttgctcgtccaccttcacgatggtcaagccaatgtcccggtcattctcccaggtgatggtcacatcctcggtgccgtcccactccaccgtttccacgcgggaggacttcacataaccgtccgggggtgactgctccgaaatgcggtaggagccgtagggcagctcgtccccctcaaaggagatagtgccgtcaaagccggtggtgcctgtggtcgtgtagctgccgtcgatctgttcaaaacggaacacggccccctgcaagctggccttgttctgcccgtccaccttcttgatggtgaagcccttttccgtatcgtctgccacggtcaggtaggcggtgcggccaggggtaagggtcacgctcatgggggcgacgatctggtagccctccggggccttggtttccgccagggtgaatttttcatcggcgggaaggtctttccagatgatttggccgttgcggtcggtggtgccggtgacagtggttcccttatcgccggtcagagtaaactccgcgccctccaacggagagccgcccgcccccgccttgactacctgaaggctggcggtttcggacaagtcctcgtcgctgctccacttaaaggtggcgctggcgtcacaggtggtatagcctgggtcggaaatgatataggactgctccttggatgcggggttgtaggccaggaacaggttgaactgcgccacgccgcccgtggccttgatggtaaaggagccttcatcggcggcggtgtccacggggatacagaccttgaacgcgccgtaatactcgctgccgttggcgttgaggttggtggtgcgctgcttgctggtgtccaccttgtagcaggtggccccgttctcctgcaccgtttccaggggcgaattgttctccgccacaaaaatggtgccggagggggcgtcggtggagtagactttggtttttctgtcgtcgatccaggtggaggttgcggaggccacatacatcacatgggtgtaatattctttcccgttgatggtttcctttttgatgccgtctgtgttagtctcggcagcgccctccaaaccgcgctcatggatgacctccacgccgcgcacgtccttgttttcctcggcccggaggtacatccccgtgtagaggtgtttcgaccagccgttggcaagggtcaggatggctttgacgctatcaaaaatgcggattttctgcgcgtccgaggtgggtactgtgagagtgtcacggcccgccgtaaaggatgtaccggggacggcaagctggccgcaggtggcccagactgccaactgcgtggcatacttatattcgtcctcggtcagaccgctgatcccccgcacatcgcctgcgtgaagttccttaaactgtgccaacgtgcggttggggtagccgttggcaaaggctcccattgtcttgggttcacggttatactcttggacggtcagggccttggagggggacacccctttcaatccatgattgacgcagtaggcggtgccggtcaatccattgttgctggtgtacttccagtaaccgccgccgatggtgccgccgctggacttggtgaggtacttgccgtatccggcctgctggatggtgacggtgccgctgtcgttgagggatgcggcgtttgccgggagcgacattacgccgaacatcgtcaccacgacaagcagcatagacagcaggcgggcaaaacgcttgtgtttcatggaaaatgctcctttcgcatacattagatagtggtgtcgaaatgcgtctcaatttgagacgcatttccgggtggccggacagggtaaagaaaaagcgggccgcttacgcagtccgctttctctgatatgtccgggtcttattttgtggagccaggcgccagcagttctttcagaaaagccgtggcctccggcgcttcgtcggtacggtctgataccgttttcgcaagcaggatgtaattctgccggtacaggtcattggcggcaacgtccacatggagccattgtccgtccgcatagaccatgttccaggcgtggtttgtggtgctgatggtaaaacaggggatgcctgccgccccgcacaagaacttgaaatcgtgggcgtagtcaccgcaagcccctttcaattcctcgctgtgcggggcaaacgtccgaatgatcccagcaacggatttcttgtcataggtcagcagagagcataggtagtcgttcagatacttcactttctcgctgtccgtgtccatccggttcaccgtgtcaatgacgggctggataaagtcataggccgcttgatacgtttcgggcatttgcgcggagagagcgtagtagtccaggtattcatagtagttggttaaattttgggggacgtaatgctcataccgtaaaagcccgtccatgcggcccaccatccgcttgacctcgccgtaatcatcctttgataccatcgtgtaggcacagcggtctcccgcgctgttctccgtccctacatccacaagcgtctgccgtatggcgttgtatagctcccggtcatagacgctggtgaacacggcggggttggcctgctgggaaaagtcctcccggctccaatggtcggtgctgatggtgtagctggactgtgccggggccgatggcgctggggccgtgactgccggggcgggggcgtcctcactgtacggctcgttggtggcgatttggacgctgttggtggcggcgtcgtaggtgacgttgaagttgaccgcctgccccacgtcccggagtttcacatagttgttgccgccgatggcgtatgcctgcaactggacttgctggccgtccacataaaaggtctggctggacggctccgccagaagcccggcggcgtaggctgtgccgccgccgaacaaggcggctccaacggcgatcccgactacaaactcgatgtgctttcccttcattttcgatacctccaatcaggatttttaaggggtattacctaactatattgtatcaaaaatagggaaaaaggtcaaaaaatcgggtctaaacctccacggcccggacgcaccagcggtaggcgctttggttgcgaacgcaggtaaagagggtgatgcagttctccgaggtcgccgccagcatggagttatccgtctcgctgatcttctccacgctggtgacggcgtatgtcctcgtccccagcttggtagtcagcttgatggtgcctccaatgtccagcgtgtggatctctccgaagtagcagttagtcccccggttatggcccgcgacgcagacatttccggcccagatagacgtatccgggaagtggcccgcgcctttggcgagggtggcgctgcctgtcccctggtagaccttgacattcacatcaaggctggggattttcagcgtccccaggtagccgccgctgtaatagagatcatcggtcacgtcggtgtaggcggtgacaggataggcggcgccgggtgtggtgacagcgccgggatagaccatgaccccgccagtgacggcactcccgccgccgctgggattgacggcggtgacggccccgccgctcccggtcaggttgggggtcagcggctccccgctgctgggaaggtagctggtggggctgccgaagttgggcgggatcagggcggcgttcttgctcctgtccacgttggcggtggcctccgtccccacatacaccgtatcgtcactggtgggcgtaccaaagtccccagggttggggctgtcgatggtatagtccagggcgttggccggggtgacggtcagggccgtcagcagggcggcggagaggatcatgcttttccacttcattttgtgtactccttccattcttttttcgccttatattgtttcagcaggaacttccccaggaaggccagacctgccgccgcccctccaacgggcagaagcaaaagccatttccaactgccgccgctggatggggcggggctttccgtaggcgctggggtgtccgggctggcaggcgcgggtttctctggggcctccccggagggggcgggcgtgatgggggtgccgctgaaaacggcggtgtagaccgtctccccggcgatggtcttgaccacctccccggcgtattcggcggtgacggtatagccggtggcgtatttgctggtggccgtcccggtgtagctggcggtggcgtggaaaaagccccctgcctcctgccactgaacatcagccagggtcattgtccgcccgccgtcctcaatagtcttgggaatgagggatgtgtcggcgtcggagaggttgggataactccgggtggcggtgacggtgcggctgctgctcttatagcccgccgcctccaccttgatactggcggtgtccagggtgaggacgccggtatagccgtcctcggtggtgacttccatcgtggcggcaagctggggcatgatggcgtccatgtccttgctcttgctgtccaaggtgacggtttcggtgtagtccctggtgtcggtctcgctgttgtcctgccgggtcacatccagcagggtatagtgccagccctcccggtcaaagtcggcagtgggtatgcctgccgggtcgtcactggcggagagaagatagattttttccagcctgcgggcgtctccctcggcggtttccctgacctctgccgggtagaacgccgccgtctgcttggggggcggcgttccctccgcaggctcggcggccagagccgggcaggtcagggtacagatcaggagcgccgcaaacaggacgggcgctgctcgtttcatagtcattacctcatttcgtgtaaaatgtcgaaatgcgtctcaattcgagacgcatttccgggctggctgccccgccgacggcttgcggcggggcgcgtggggtcacgctggcgctcccgtcaggccgccgcgctctcccagtatagcaaagccgccaactggcggctttggggtgttttccccttgataaccttaaaatccgccggacggcccctgtcaaggcccgaccagtccgcagactggtcggctcgcgcacgattgcgccagcaatcgtgcggccttgacgggggacgggcggcggattacactcccgcaggggaaaaacacccccgcaggggcttaacggacagggcggcgaacagggcggacaggggcgcggccccgttgcttgtccgcttccaggctcttgtcgatggaacggccaaactgcttgctcatgtcctgaatgttgtccagggcttgccgccgctgctgggggtcccagccctcgtaaagttccggcaggcgggacatatcgggcatgggacgctcgatcccgaagcggcggcagaggatataggacacgctctgggcgtccaggtcgcactcgtcccggtcatagccgggaaacgcgcctttggcatggagccgggagtgcgccacctccgcagcgatggcggcaaacgcctcgctgtccgggaaggtggggttgacggcaagctccatgttgcgctggtcgtagaacgcggccacgggcagttcctcgtcgatgaccaccgggacaacggcgtaattcagcaccgtggagagggcggtctccatatccttggtgtcgtcccgcaggacggtctgcttgatctcccggccctgggtctggctaatgtcgtaggcatcggccagggtgtagccccggcccatcggggaacgggcgaaaatctttgtccccttgcccttctccgcttccatcacggaacggttcagcgttttccagcggtcacgggtggcgaagatggtggcctgcggctggccgaacatgaccagggcgatgttcccggcgctgtacgtcgggttgtccccctgcatttccagataccgggcataggcttccggggtggtggtgatctcggtgataccggcgtcctgcatggccacggtgttctcccgttctgcctgctgctgttcccgccacttggtatcgttctcggccttgcggcttacgatctgtttcaaatctgccattgtgaattacctcctacaattatcgtgttttgggtggagtggtacgggtatgctgtttgggggccttgccctggttcatgctctcggctgcggcttggagggcggccagccgccccttgacggaggggatgtcgctgatcttctccggggtgtcagtagtcctcgtcgtcctcgtcgtcgtcctcttgctctgcgattgtgtcgagccactcccgcgctgtggtgaggagcgcccttgcggagcgcggggggcggctttttttggcggttccgcctcctggccccttgcgggagcgccatagccccggcgctccatgaacaggttgacttgggacacaaaatccacgttggtcacaaggtctaccataccgtcctcggcccggctgtcctttacggcggcaaaaaggacgtttttcttggcaaaggcccggaactccgcaaggtcgctctccttaatgcgaaacaccttcaactccttgccctcccggagcaggcgggccatgtgggtcttgccaaccagctttttgttgtccttggacagcgcccataggaacgccgccagatttttgctccccgctgccagcagcttgatactggcctcggtgagctggatgctctctttgaccatcagatcggccacatcaccgcttacatccattgactttcacctcccgttttcagatattcaatgacttcccggacgcagcagtaccggggattgtgaagataccggcgcaggatcagcctgatatgccgttcccgctgggcctggggcagaggggcgaatatctccacatcctccacggaggcccggtagttcaaaatggtgacgctgccccagggcagtccccccacgctcttgtccacatggagcagcagggcgatgaccggcccgccggggacggcccggtaggccgtccagcacaggttggcgtagctgtccttctcatagatggccgggaagtcgaacaggccgcaccagccgcgccgcgctaaaaagagatagtcggaaaattcctgtcggcatagcttggaaaggctcatgtccagcctatcggcctctatcggctggcactctcccgccagacggaggatggcggtcaggtctgcttttatcagtcttttcatgggtctcgctcctgtcggcccccacattggcgcgtaccgtaggggcgtcgttttcaatgcgggcgcacagcttcaattcccggcgcagcgcccgcaggcggtcgttgatggcgtcgatctccgcctcggccccctccgtcccggcccgccgcagggggtacagttcccggcgctggccggtgagggcgtctatctcggcctggatagcgtcatactgcatggaaagctggcccatcgtctcaatgcggtttttcatcaggtatataaattgctcctggtagcggtcaaacttgatgacctcccgccacgaaacgagggcggtctgccgcctggggcggcggttggggatggctcccagcagatagaggtacttgaagtagagggcgcgaagccctttcagcttccggggcttgcggggaagtccgccacggggccggtatctccgtcccggtgtcagccattgaaaggccgggggcggcggttcgggtggcggcggggccgccccggaacgggcggcggacaggcgggatagaatgtccgcctcggtgtagccgtcccccaaactgtccagccggataaaacgtggagcgccggggggcttgacggcggtatgcttcacgttggggccgcgcttgacggcgtagcccagccggttaagctcctgccaaaaggttttcatggtgtaggccctgaaaagggcggcgtcaatgtcctgccgcacaaggccccgcagggtgggcttgcccttccgctccgcctgccactcgctgtactgtttgcctttgctttccgggtcgatgatggataggccgtactcctgacagatggcgtccgaggtcccccggatgccttggtagtagtccttcttggtgtcccggtacatcatcccatccacaaaggaaacgctgttgaaaacgatgtgggagtgaagatgctctttgttcaggtgggtggcgacaatgacctcgtagcggtctcccaaaagcctccgggcaagctccacacctacggcatgggcctgttccggcgtgacctcgccgggggcgaaggactggatgatgtgatagcccttccgcttgcggccctccttgccccagcgacgtttcgtgtccatcatatcggcatagaccgtatcccggtcgcagttgatggcggtctcaaaacaggtgcgctcggtcttgtcccggttgagggcgtagtcgatggctgtttccagcgaggtcttttcctcgttctgggcgtagtccacgctcttgtccagccggttatgcaccacaaggatttttgtgtaggccattagagcgtatccctcaccagccgggccatttgccgcacaaggcgggcggcctcggtgatctcgtccctggtggcctcccctctggcgttggcctgatgggcaagctgattgacgttatttccgatggcggacagttcccggagaagggcggcgtaggtgtcggggggacgggggcggagttcaacgcccatgataagctgacgtaatagcggctccatctttaagccggtggccccggcctgcgcctggaggtgggcatactcgtcggcgttcagccgcagggtgatagtcttatagggctttggcatagctggctcctttcgacaaaaaataatgcgtctcaaattgagacgcatttccggggaatgggggtattaggggcttgcccctaacaagcggcattttgcagtcaaaatgccatgcttgcgcggacagcggcgccaacggcgccgctgtctaccgtgtcggggcggagtccctttgcttgcggggctggggcttcttatgggttgggcggctgggatgttgatgtttgggcttttccggctctgccggtggcgggggcgtatccccgtcctccagaaagcccagcagttcatcggcaacctcctggggcgttttctccgggacttccacggtgtagccggggagaaggataccgttgacggaaaagcggcgttcctcccccttggggatgggcggggagagttcggtgaacaggtgggcgtaggcgttgatacggccttggaggtacttttccatcgccgccttgtcggtaaagcgtttcctgtcctgaccggcgatttgacggccagggccggaatagtccggctccctgggggtgttgaatgtcagataccacgaaatttcccaggagaccggcacagattcctttttggctttgtcatagcgggtgttctcatagacgcgccacgacattttgtagaccatgttgctgatctcatgccagtcgtactcaccatctatccagacgttagccgtgtgaggggtgggcggtattgtcagatattgctgtgccttcctcaattcacaggttttcatcgcctgctgtacccacttctcgctgactttcaatatttctgcataaatggctttttcctggtcaacactggcctgctcctgttctttcagcgcgtcgggagaaagtttgaccaactcggagaggtcggactggctgctcgaaaaatagatgtgacttgaaatttcaagttccctgccggggtcaaggtgtgtatatcccatattcgcgcctccctaacgtaccggggccgactgctttttagcggcggcctttttcttggcggtaggcttttttgctggggtcgctctccgcttctgcgcggcggctggcttttccgggctggccttcccctggggcgggggcgatttcttcggggccttgggcggctccgggtcggacggcggtgcaaggtctccatcgtccagcaagtccagcagctcgtcggccacctcctggggcgctctctccttgggcgctatggtatagccggggagaagaacgccgttgatataaaaggaacgcttgaactcgtccgggacgggaggggacaactccgtaaaaagccgggcgtacacatcaaagcggccttggatatagttctgtgcgtcggcctcggcgttgtagtatttcttctttatctccactaccataacatcgccggaatagtagtatttttccgtagagggccggggcgggcggttgatggcgatgccccaggtcacaagccactggccttggtgattgcccgtcgtctcctgcattatcttatagcgcatgatgtagacgcggttgctgatctcccaaacaccgtccttttgccgtttccactcgtttgacgtgtgcttgacctccggggtcttgacgtactcgatggccctgtccaggagcatggtctgggcggcctgctccacccattcctcggcggcgacctgcacttttccgaaaatggtcttttctgccgttgctccgtccttacgcttggcttgcaactcctgcaagggcagcttgaccagctctgccagatcgctgcggtcaacattccacctgtcaaactccacggagcgttccagttcgatatgttcaccgggattgaatttgtctgtacggtgcaatacgcggtaaaaggtcggctctttccgtttttgttctgccatagaccgcccctcctatcgctcgccgcgctggggggatggctttttcctgtcacgggagggaacggtcggaaattccagcgcgatttcaaactgccgttgtaattcctccatcctcacgctgtccagcggctcataggtcttgctgtccgggtcccagcgggtcagacgcttttcctccgggatgtggttgcgccgttcccacgcgcccacggcctgggcctggacgctcatgcgctccttaatgtcggggttgtccctggcggggcgcagttcatagtcctcgatctgctttggggacaggggggcgttataggccagaacgccccaggccaggacggtgccgctctccactggctggcgtccgctaaagaacgtcatttccacctgggggtcgtttggcagtttgggataggtgccaatgtcgatggggcgctgggtggaataatacttgaataccataccgcgccccctatctctgccgctggggatggttccgctggcgctggggcgctttggcggtctggccctctttgatctggcgcagtttcaccttgaccgattgccggggccggtcatcattacgggccggggcggcgcgttcctgcaccggggcggaggtctggctggtattcgcggccttccgcaaatctgtgaccgccgcttttgtatatgccaggaatttccccttttccttctccggcatgaccgccgcctgcgcctggaattgctgctccaatctggtgatggtgtaatgctgctggaaaaagccgatcactctggtcgccagcttttccaggtcgtcatggagctggaggccaaactgttcatggagcaattcacgcaggccaacgggcgcgtcctcgaagatcccggtcagattctccgggtggttcaggttattttcaacaaggtcttgcatttgttccagcatggagccgtagcccggcccggtagagaggggcagccagtagcggtcaacctcgccgtccagcatatagtcgatggcaaccttgaccgggcggctcggctcgtcagtgttccagtattcctggtttatcgcctccatccgggtctccgcctcggacagcgtcatgcgggcgccagcgggaagatgctcgtcggcgctctccatgacggtgacgatgggttcctgttccggggacaggtcgggcagggtggcctccttggcggatttgaacagggacacaaacgccccggaaatatcacgggtgaagttcctccagcgggtggccgcgccccggacggtgcaaaggccatttttgaaaaagccggtcacgatgcttgcgctctcgcccagcaggtctttcacatcccggcgcaggttcccggcgatctctttcatacggctgttggtatctatggggatcactcctttccaaaaagtggtggggcggctctcgccgccccggataaaatgtcgaaattcgtctcaatttgagacgaatttcagcggacggcggcgggccgcgcccggtgcatacggcaatatgccttgggcgggacaaagggcctcccggcgaaggtcacttcccggatgggacggtaatgggacagcaccccgtcccgcaggctggcaaactcgatatagtccgccttggtaaagcaccgctcccggcgcatttggcgctgggacaccggccagccctcgccgtaaaggaaatggaacattttgatgttgtcggagatcagttgcagggagttgtccgaattgtcgtaaaacgcgggggcctcgccgtctccggggcaatagttttcgctcctgccgagatacacccgcccatcctcgcccaccagggcgtccatgccctcatagttgctggcggcggcggacgcgatcaagatttctgtcatggtgtcacctcgccatatcgtcatggccgggcggcttgcggggcttgggcggcaggccgtagtcttgccgcagttcctcaactctccggcgaaaatccttttctgcgctctcccggtctccgaaatagttgccataggcaaattccttaaactgcctgtgggcgtaggatttccaggtcacatagggggatggtgctttcgggttgtgggccagcacgatctccacgtccttgatgcgcttgcttttgataacgtggtagccctcgcatactctatcatccgccatagccgcttacctcgaaggggaagggggctttttgcccttacccgccttttccgcttcggccttggccttctggcgctcaatggcctttttccgcaggtcaagggcctcgaacaccccgcgctttgcgtcagggatggtagtccgcttatccgggaagtacggacgcagatcctcctcggtcagcgtgattttcagttgcggcgtctcctcccgcttggtgggggctaccgacttttcgatcttgtccgtggtcagcgtcccttcctggctggcctttttcagttccaccgcctgggtgccggaggggactttatcctccttcttgatggcgtcggctaccgccgcctgttcctcttttttcagatatgagaggtctgcggcggtgtggacggggagcttcttatcctccaccatctgctgtaattccggggtcaggttgttcagacggacaagtttctggatattgctacggctctcgccggtctgctgggccagttcctcgtcagcccgcatgggcttcttgccctcggccgccagcttggcggtttcctccttggtgcgccgtccggccttgtgcttcatggcttccagcttcatggcataggcgcgggccttctccatcgggctgatgttctcccgcttcaggttggcgtccaccatagagatcgtggcctcgtcccggtcaagctggcggacgatgaccggcatggtggcgatacccgccagctcgcaggcccggcggcggcggtggccggacaccatctcatagccgcccgccttgcgggggatgaccacggcaggctccaacactccgaatttctttacgctgtccaccaggtccatcatgtcctggtcgtccttgacgttgaacggatggccctcaaaggggtgtatctccgacaccttcagcgtggtgatgatctccgactgcccctccctggtgatggggagcgtaaagtccttggggatttcgtcctcggtgggcttatcgggcgcggcggcgggcgcttgttcagcccccgtcttttccggctcggcggggtgggggtctaccagcttgccgggaatgggcaggtcggggtttttcctgtgttccttgcggtagcggctggcgtccgtaagggccatttcgtaaacatccgcccggacttccagcataccggcctgttccagcgccttgcagcgatggaaaccgtctacaagctgtagctctcccttttccccctggcggagaatgaccggcttttgcaggccgttctttttgatgtcggcaatcatatcgccgtagtccttcctgggggtgtccttgacgtaggtgccggggaggggaacgatctcggacagcttgacgaaacggaggctggggtctttcggcggttcggcaggcttcttttcctcggcaggcttgtcgggtgcggcgggggctttggggtcagccgccgccttggacgctttggcacccttcttttccccggcaggcttaccgggagcgtcggcgggggccttggggtcaggcgtggccttgggtggctcggcgggcttctttccctcggcgggcttgtcgggagcatcagcgggggccttggggtcaggcgcggccttgggcggctcggcgggtttcttttcctcggcaggcttgccgggagcgtcggcgggggccttggggtcaggcgtggccttgggcggctcggcgggcttcttttcctcggcgggcttgccgggagcgtcggtgggggccttggggtcaggtgcggccttgggcggctcggcgggtttcttctcctcggcaggcttgccgggagcggcaacggtggccttggggtcaggcgcggccttgggctgctcggcgggtttcttttcctcggtgggcttgccgggagcgtcggcggtggccttggggtcaggcgcggccttgggcggctcgacgggtttcttttcctcggcgggcttatcaggcggtgcgccggggacgggggcgcggaaagcgccgatcaacgggttcttcttgtctggcatggtgagtcctccttttgcttattttgtcgaaaaatgcgtctcgatttgagacgcattttcaaccgatattaagggccaaaatcgtgctgtacctccgcttgatagtagttgttgatggtggccggggcattgtaaagggcagtcagcagataggcgcggatgttgcggattttggtcgtgttcttccgcagacagtcaaaaacatattccaggtgcgaatagtccagtttataaaagcgttccttcacctgggcggtgggaagttcctcgccgccgatgcggagggtggcgcgggtgctgcatagaacatcggttatcaactccgccacctcatccacgtcctcacggttgaactgggtacagagggcagcgtagtcaatactttcccgcacatctctcccgcaatcaatccgatctatccatcctgttcccggaggggagggggatggatggacagatggatcaagctgaatggggtcagtttgatttgattcaatatagattgcgtccgattttccgaagtctgcacttccgaaaaccggaagtcttgacttctgcttttcggaactcttgacttccgattttccgaagtcttgacttccgaaaatcggaagtctgggaatgtcctgcggctgggagggttgcggcggtttttcgccggtggtgaaccgcttgacatagatttttgcaggacggccctggccccgcttgacgcgctcgatcaggccaaaacccttgcctgtgtccaactcggccagcagcttgacggccttctcatgcccgcagcccaggtctgcctgtatctcgtccagtgtgtagtagatataaacacggccttggtcgtcgtaccagccgtttttagcggacagccccatgcggtcaaggagaaggccatagagcagcttggcgtcggtagacagcttcttgaactgttcgccggtgataagctggcgggggatacggtagaacgaaaattgattgctttcgtcgccgtaataatagtcaaatgcttgcttgcccacgttctcacctccattgggcaaaaagaaaggcgccccttacggagcgcctggactacgggctttccacccgctttcttcttttttctgcacctttttcaatttgggatagtaacaatgatagcaagcaacttactcaacaaaggtttttaagggaaattgtagatggccctcgtctgcctgtgtcggggcaatttttactggccgccacataccaccattcttttttgctcgattttcctcgataagattgtgcttgataccctaaaatctcgttatcatagaagtgcgccgcttgggatactattgttcctaaaatggatatttggcttgatgtggctcctaatgaaatgcattatgttgccagcataattcctaccttaaaatggcgcggaggaaaattgggagttcggttagctctcttaccaaaagatgtttctaatttatttaatgagtatcgagaagcgtactcttcagctcgcaccacagaacatgcaagggttgaaaaaagttctttcaatctcttcccaaaagacttgtgtgaatttcttgatagaaaattgactacatatttttctatcaaggcatttatccttgatccgtcacatttcgaagatgcccctgtacaaccaacatcctttgaggcagaatgtttaacagataacccactaaaggacatcgtaagggttgacatgattgacgcacaacgcggatttgcagatcctgacagttcagaaggaacagaaaaggttcggaaacagttatctgcccaaatgcgcaattattatgaaaaacatctagatccagaaaaggctccttctccagaagatttagatattttagaagctactgaaggcgcacgccaagtttttgataagacacttgcattaaaatttgctcctgcaataaaagaattagaagggttgggttatccgggtattagtgatcccaaacttacaataacaactaaagttatgactagcgaaacattaaaacacgattcagccgtacaatatgcgctcagtaaaaccgacaatactttgaaactaccagaaaagtataatgggttgggttatcaaaaccttatttcaatggtttttgatttgatgggttttagagatgactggatgcgtgaaggaaaagctaaagatactaataccgtaattgagccgatgcatttggtgctggtagaggaaccagaagctcacctccatattcaagtgcagcaagtttttatacgccaagcatataaagttttaactaaccataaatttctcaagcaaaacttgaattttacaacgcaattggtgatcagcacccattcgagccatattgctatagaaactacttttggaaatttaagatatttcaaacggctaccagaagggactgaatgcgcagtagcgacatccaaagtaattaacttatctgatgtatttggggattcagatcagaccaacaaatttgttacacgttatctgcaatcaacccattgtgatttgttttttgctgatgcagcaattctggtcgaaggtgtagccgaaagtatgctattaccacattttatacgctcaaagtttccagaactatatcagcggtatattacaattcttggggttaatggacgtcatgctcaccggttaagtcctctgattgaaaagttatgcctcccaacattggttattacagatttagatccagcagaaaaagaaggttatcacaaatctgtagttcccaagagaggagaaggccaaatcagtggaaactacgctattgcaaagtggctgatgaaagaaaaagacatcgacaagttggtagattattcagaagataaaaaggaattttcttttgcttctccgtatcgattttctattcgtttagcctatcaaactcctgtaaaagtggactttgaaggagaagaaaaagaggccatacctggaacttttgaagattgtcttatatatacaaattatgatcttttcaagaagataaaagtcactgattctgggaacttggttgaacaaacgcatgatttacttaactctaatgacacattcgaaatgatccatgaaaaaatttataaaatgctgcgtgcaggaaaatcagagcagaaggcagaattcgcattagacgtaatttttgaaattagtccagacgagctttcggttccaccatatattaaccaaggtttaatgtggctacaggactatttacatccggaggattaacgatggataaaataaaagaggtaaccgaagaattattagatgatcatgtagatgaccatgtagatgaagaaattcagagatgctttttaaaagaagatccaaaatgtttctttgtttttgcgggagctgggtcagggaaaactcgaagcttaataaaaaccttaactttcttggatgaaacactaggtgactggcttctaacgaatagaaaacagatagccgtaattacttacaccaatgcagcttgcgatgaaatatccaggcgattacattacaagtcgattttctcagtctcaactatacatagtttcttgtgggagcttattaaaaactatcagtcagatatcaaagcgtgggtaatcaattcgataaaccttgaaatcgcagaacttgaagaaaagcaaagaaaaagcaaagcgggaaaaacttcagaaaaacgagcagaggatatacgaaaaaagcaagagcgactagctaaaatcaatacggtaagaaggtttacctataatccaaatggagataatgtaggatatgattctctcaaccatagtgaagtagtaaaaatggggtcgaaatttatctgtgcagaagatactatgcagaacattttgatttcccaatatcctattctcctcattgatgaaagccaagatacaaaaaaagaactggtagatgccatttttaccgtatgcgaaaggcacaaaggaaagttcatagttggcatgtttggggatacaatgcaacgaatctatcaagatggcaaagaaaacctttctcagtgtatccctgatgactgggtaaagccccaaaaaatcatgaaccatcgcagtgcatctcgaatagttactttggcaaatgccataaggtttacagtcgatactcaacaacaacgccctcggtcagacgcagaggtgggaaatgtaaggttgtttatcgtttcttcagatgctaataaagaagtgacggagcagcgagttgcggaaatcatgtctgaagaaactggtgatggtgagtggcgtgacagtaaacaatataaaagtctcatactagaacaccatatggctgctagtcgctttggctttttagaactgtatttaccacttaatgaggttcctgtatttaacacatctttgcgagatgggtcaatttcagaactttcttttctgtcaaaagttatatctccgcttgttcaggcctataaaggcaataatgactttgaagtactaaaaatagtcaaagagtattctcctttaatggaaagcaagaaatggatttctcttgacgatcaaacaaaagcactgcagcaagtcgaaagtgctgtagataaattgatggaactatggaaagatgatgctattccaacttgcttggatgtcctccgctcaattcaagacacagggctatttaaactggatgaacgtgtagataacatattgtcatctcctgccgcagacgaatctataaggataacggctttaagaaaggctctatctgtcccatttaccactttagaaaaatattttgcatatgtctctgataatacgaggtttgcaacacatcagggtgttaaaggcttggaattcccaagagttatggttattatagatgacgcagaagcaaaaggatttctttttagttatgaaaaactttttggcgtcaaactaaaaacagaaactgatatcaagaatgaaagagagggtaaagacaatagtataacaaggacaacccgtctgttttatgttgcttgtactcgcgcacaaaaaagtttggctataattgcttatacatatgactgcgaagcagtgaaagcaactgccatgaaaaataattggtttgaagatgatgaaattcgtcttttggagtaaggcaataaaagccgttgcagaagttattagactgaaacgcttccaaaatgcttattctgtttcgttgcaaagcttttgaaagtgtgcatcttttttgtccacacatttcattcatagaaaacgccgcagtgaaaactgcggcgttttctcgtttgaccacagaaataccacagacggatttctgctttaactacttgacgggtaccccctttcaggagtgcccgtcttttttgtttgtgccaatactgtttagcgcctcccaactaatctcgttggaagttgccgctatctctcaaacagtcgcattttcagcataaatcttctcttatattttctgagaatatttcttgaccacaaatttgcccatagacagaaaaaatcagcccgccggatgggcaccttccatcggcgggccggttttgcaacatttcagcttgctttgcgactccatcgtttccttgcttggaagtttgtcatggaatgttctctccgctcttctggttgtttgacctctgctttcgcggtatcacggtcaatcttttccgccaccaattgctgcatctcgtcggttatgtgggaatatgtgttcagggtagtagcgctggatacataacacaaaattgtcggcagggtcttgatgtccattccgtaggcctaggcgttggttgcaaaagtatggcacggaccatgaaatctcacccgttcacatcccgcataatccaaaattctgtgcaggcgcttatggggcgaggatggacgcatgggcaagtcttctttctttggggatggaaacatccatcgtgaatccaccttggtcttatactctgccagcactcgcctgacggatggcggcaggatcatggtacaaaccgccgcttttgttttgggttcacagatgactacctctgatccgacaatgctagcttgcttgtcgatccgcagctctccagtcgttaagttcaaatcgtcccactgaagggcggccagttccctcagtcgcaggccagtggcaaactccagaaggaagagttcatagtaattttcctctttggcctggatgagtactctctgcacagtttcccctgagggaattttcatctcttctcgttttgcaggcggacacttgcatccaatggccgggttgcagaggatcaaatgctcctcaactgctttctccagtgcctgccggcatagactgcggcaacatcgaatctggctgtcagcaataccttttccattggcatgctcatctggcttcatccacacacaaatttgctgcttatcattttctgttagtttgttcagtggaatatcgcctagccttggtttgatgtatagccggagatacccttcgtaggttcgatgggttctgggccggatttatggtttgctgtaggtttcgtaccaatagttcagacactccccaaatggcatatctgcccgaaccttggacggatttgcaggtgcaatggtgtctttcagtgttttcaatttatccacgcactcacctttggtcttggccagcacatttttcgtcttgggaaggccgtcctttctcagctgggcggtgccttcgccgttttttggctttcttcccatggcttcaactcctcttcaaagatatttttaagaaattcctctacgatctcagccgcccgcttttgtatatccctagtggtgtgggtaggtgtcttgggtgaacgccgacctggtatgtcccaggattccagacagagtctttacatctacaccagatgccaacgcatgggtggcaaaagtgtggtgcagaccatgaaaccggatatcaggcagctccgcccgttttaacagggctttcagccgatcataggcagtactcgggtgggtaggctgttctggttttcacggatgggggaagatccattccgtcagagcggactttttcctctcccggagcaattctacagtactgggcggcagggtgatcgttctggcaccagctgatgtcttggtatcccaagtagtcagttttccgccacgctcctcatgtacagcgcggcaaatcttgagccttccatcatctgcatcaaagtccctccactggaggccgcagatctcacctcgccgcagtccggttgtcagttctgtatagaagaagtcataccagacggcatcctcccggataatctccacaaatcgttccaactgctcatccgttaaaatttgttttgcctcccccagtgcttcatggagcatggagtgaatcccacggacagtactgctggcaagcactctcctgtggttcggtttccctgacgagccagcgtatcatataactttttaatgtcttttccggttatctgagtgattggcttgtctcccataaaggggacaatgtggttccgcacggtaccttcatatcgtctcaaggtagagggacgaatgttaggagctatgtttttcaaccattgctccagccactggcccagtgccatccgactctcctcagtcagctcgacactctgatacacctcaatactctgccggagcttaactgtcagttccttctggatatcagtatagatatagcggaagatggactcaccgttctctttgtggcccactacgggatgtgccttgaaattagggacgactggttcacacacgtagtccctcggacaccgttcggcgcacatcggcccggctgtggctgagcccccctggatcaaaggcagggcagtcttataacggatggccttgcagcggagctcaccggccatgtccaaagtctcctgtatctttcagctttcgtggccgttgaccgtctaaaagtatctacgcaccgtgctctgactgcgccgcataagccagcagaaaaaccaacctcctggatctaatttaaaagttatccgacaaaaagtgattcccgcacaaaaaaacacgccccatgccgtccgaaaatggaatggcatggggcgcagctttattttataccggccgagcataggcggaactatggtcggccccggcccttgccgccggtggctggatgcggaggacagcacgtcctcccctctacagactcatatggctggttttccatctcaccacaaatatcaaaaaactgtgaggataaagataactggaatgcaatatgtactcagcgctccctttgttccgggagaggaatcaccgagttgtttgccaactcaatccgaaacgcatatttatcgccgcggacaatggattttgtatattcaatcaggacattgccctcatagctgtatcgctccaaaagagtacacggaacattggatgagatatgcaacagcgtcctttcttctgagcgcggcataacaggccggaatttttccgtggcccgatctgcatggaagttatactgttctcgcaaaaactcatatagagagccgcaggagagcgcctccgtgtccagcgtcaagaaacggctttgggggagaaaggtggtttccagcatcagaggatacgtcctggccgagcggagccggaacagtttatggaacaccgttccctcctgatacccggtttcaatcgccaaagacttatcggctttgaccagatcatagtgaatgacagaattctgaattagaatattgctgcttttaagcgtatcagtaaacgagtagaaatcagataggggctgggtaaatacgaacggcttaatataggttccattaccctggaccgagtaaagtacaccggtttctttcagcatgttgagtgcacgccggagagtgctacggcttgcgttatacttccggcacaacttttcttcgggggggaacagtgaattttccggatagagccccgtctgtatatcacgaagcatctccgtgtaaacgtctatatagaccggcctttgagccataccgcaccccccgcttgccgctgcttcacgtcacttcagatagccaatcaacccatagatccttacaagtatttttagagactattactattttgccaattattttatcatatggggagtgaatttacaaggaaatatttccctgttaaaaaaagagatacaactcaggtcagttgtatcgattcaaaatgcatacaactgagggtagttggcctattttacccaaaaccatagacaaaattagcaaaaaactatacagtatatacagaagcagccgatccgcacgcgttattacagttaaaagtaccacatggaggagccaatatgaagcaatggtatgtcggggtagacggcggaggcacaaaaaccgccgtcgcgatctccaccgctgacagtgttccgatccaaaccatgacctacccgacctgttcctatcagtccatcggtattccggaatccgttgccctgatcacgaaggtggtacgggaggccctctccgggggcggggtaagcccacaggattgtgccgggtgttgcgtgggtatgccctgttatggcgaaaacccagcaaatgaccgggagatcgttcgcctgctgacggatgctctgactccagtcccagtgtatgttgtgaatgacggtgaagttggctgggctggatccctcgcctgtggggagggaatccatattgtttccggcacaggttctatcgcatttggacgcgggtgtgacaaagaatttgcccgctgcggggggtgggtggagttttttggggatgagggctcctgctactggattggtcggcagggaatgagtctgttttccaaagaggccgatggccggttgccgaggggtccgctctatgatctagtccacggggagtttggcctgacggaggactaccagtttattgatcggattgtccgggaatttgccccctatcgggaaaaagtcgcggggttccagcggtacgtcctacaggccgcccgggctggcgatacagccgctgccgcgctgtatgaaacggctgcgcttgagttggcgctcatgattcgcacgctcaaggcaaaacttcgtttctccgccgagcccatcagcgtttcctactccggcggtatcttccatgccggagaattcatcctggcccctctccgtaaaaaggccgaagagctgaactgcatactttgtgaacccaaatactccgcgaccgagggcgcgctcatgttggccatggaacggttccctttatcacccagttaaatgtccgaaggagaatgatgttatgtttttgaccgaagctgagattctggataccccgctgtccctgaactacacctgccaatactttgagaagaacaaaaaaaatctggagcagttcttccaggaaaaccagcaaaagaagtttaccattttgggctgcggctccagctatatgctggcgaagagcacagcatctctgtttgcgtcgctcccgggaaccagcgcaaatgcgatcgccgccggcgactacattgtggaccctctgttctggtatgagacggtgaagggcagcatcgtgctcctgctttcacggtccggaaagacctctgaaatggtatgggccctgaagcacatcaaagaggctcacggatgtccagcggtgtccatcacaacggaggatgggaatgatctgatgcccttgtgcgacctgaacctgacgctgaactggtgccatgatgacagtgtctgccagacccgaactgtcacgaacctgtatgcctccacactgcttctggcggcggaatacgcaagggatgaccgcctccgagagagtgtcctggcagccatgcgggagagcacctcgtttcagctgaagtaccggccggtgctggccgagatcgcaaaccttgattgggacaatgtggtggtgctggcggacggccccatttgcggcatcgcggaggagggcgccctcgcctttaccgagatctccatgctgacaggccgctatttccatctgctggattaccgtcacgggcctatcgtggtcagtggaaaacggactctgactctcgcgttgctgcggcccggtgaagaaaagctccaaagcgctatgatgaaagatgtgattcagcgcggcggccctgtggtcacgatttcccactgcacagaaaataggtacgacgcggcagcccatattcagattccggaagtcggcgagttcgccgcatggggcattctgttcatctatgtcgcgcaaatgacagctctgctgaaagcaattgccctaggcggaaaccccgaccagcccaagggcctggacgcctacatatccctgtaaatttttcttacaaggatcgtttgccttgtctgagagaaacgatttgaaaacagaggggagaggatagctccaaatatgaaactgccggatcaggcgtcgttaacaggataaggacggactacaaaggaggaatagaagggatatgagaaatcgaaggaaagctgtttcgcttctaacgggcctactcgtgacggcccagttatttccaaccgcggcgcttgcggcagactccagcgagtccgcattgaacaaggcccccggatatcaggattttcccgcctattacagcgacagtgcgcatgccgatgaccaggtgactcacccggacgtagttgtcctggaagaaccgtggaacggctatcgctattgggccgtttatacgcccaacgtgatgcggatctccatctacgaaaacccgtccatcgttgcctccagcgacggagtgcattgggtagaaccggaggggctttccaatcccattgagccgcagccgcccagcacccgctaccacaactgcgacgctgatatggtctataacgcggaatacgatgccatgatggcctattggaactgggcggatgaccagggcggaggcgttggggccgaagtccggctgcggatttcctatgacggcgtacattggggcgtccccgtgacttatgatgagatgacccgcgtatggtcgaagcccacctccgacgcggagcgtcaggttgcggatggagaggatgacttcattaccgccattgcttctccagaccgctacgatatgctctctcccactattgtctacgatgacttccgggatgtgttcatcctgtgggccaacaataccggcgacgtggggtatcagaatggtcaggcgaacttcgtggaaatgcgttattcggacgacgggatcacctgggatgagccagtccgcgtcaacggcttcctggggcttgacgagaatgggcagcagttggccccctggcatcaggatgtccagtatgttccagatttgaaggagtttgtttgtatctcccagtgctttgccggtcgaaatccggatggctctgtcctgcacctgaccacatcaaaggatggagtcaactgggagcaggtgggcaccaagcccctgctgtcccccgggccagacggcagttgggatgatttccagatctatcgctccagtttttactatgagccaggcagttccgccggagatggtaccatgcgcgtctggtacagtgccctgcagaagaacaccaataacaagatggtcgcggattcctccgggaatctgaccattcaggccaaaagtgaggatgaccgcatctggaggatcggctatgcggaaaacagttttgttgagatgatgcgcgtgctgctggatgaccccggctacacgacgcccgccctggtttccggcaattcccttatgctgagtgctgagaccacttcccttcccacaggggatgtcatgaagctggaaaccagtttcgcgcctgtggacacctctgatcaggtcgtgaaatatacctccagtgatccggatgtggcgacggtggatgagtttggaaccattacaggcgtttctgtcggttcagcgcgcatcatggcggaaactcgggagggcctgtccgacgaccttgaaattgcagtggtggagaatccgtacacgctgattccccagtccaatatgacggcaaccgccaccagcgtctacggcgggacgacggagggccccgcctccaatgtcctcgatggaaacgtccgcacaatatggcataccaactatgctcccaaagatgaactgccgcagagtatcaccgtttcctttgaccagccctataccgtcggccgcttcgtctataccccacgtcaaaacgggacaaatggcataatttcggagtatgagctgtacgccatccaccaggacggcagcaaggacctagtcgcctccggctcagactgggcgctcgatgccaaggataaaaccgtgagctttgcaccggtagaagccgtcggcctggagctcaaggcgattgccggcgcaggtgggttcggtactgccgccgaactcaatgtgtatgcgtatggtccaatcgagcctgcgcccgtatatgtcccggtggatgaccgggatgcttccctggtgtttacgggtgcatggaataacgacagcaacggaagcttttatgaagggacggcccgttataccaacgagatcggcgcgtccgtggagttcacatttgtggggacggccattcggtggtatggccaaaatgatgtaaatttcggcgctgcggaggtatacgtggacggcgttctggcaggggaggtaaatgtgtatgggccggcggcggctcagcagcttctatttgaggcggacggtctggcctatgggaagcataccatccgcatcgtctgtgtgtctccggtggttgacttcgactatttttcgtatgtgggagaataaagcgattctagcaggcgactttcaacacaaaggattatagagaaggaggactcggaaatgcgtggtaaaaagttcatatcactcacgctcagtacgatgctgtgtctgcagctcttgcccaccgcttcttttgcggcggcgcctgcaacggacaccggcaacgcaggactgattgcagaaggtgattatgccattgccggcaatggcgtccgcgtcacttatgacgcggacgggcagacaatcactctgtaccgcacagagggatctgggcttatccagatgagcaagccttctccattgggagggccagtggttggagggcaggaggttcaggacttcagccatatttcatgtgatgtggagcagagcaccagcggagtgatgggcagcggtcagagaatgaccattacctctcagagcatgagcacgggcctaattcgtacctatgtgctggagacctctgatatcgaggagggtgtggtatatactgcaacatcctatgaggcaggagcttctgatgtggaagtgtcttggttcattggcagtgtgtatgagctttatggtgcggaagatcgtatctggagctataacggcggcggtgaggggccgatgcactactatgatacgcttcaaaagattgacctgaccgactctggcaagttcagtagggagaataaacaggatgacacggctgcaagtattcctgtgtcagatatttacattgctgatggagggattaccgttggcgatgcttctgcaaccagaagggaggtacatactccggttcaggaaaccagtgattcagctcaagtttctatcgggtggccaggcaaagtcattgccgccggaagcgtgatcgaaattggtgagagctttgctgtagtccatccgggtgactattataacggcttgagaggttacaaaaatgcaatggatcacttgggcgtgattatgcctgcacctggggatattcctgatagcagctatgatctccgatgggaaagctggggctgggggtttaactggacgatcgacttaataatcggcaaattggatgaacttcaggcagccggagtcaagcagatcactttggatgatggttggtataccaatgcaggagactgggccttaaatccagaaaagtttccaaatggagcctccgatgcgttgcggctgacagatgcaattcatgagcatggtatgactgcactcctttggtggagaccttgtgacggcgggatcgatagtatactctatcagcaacaccctgaatatttcgttatggatgcagatggaagacctgcaaggcttcctactcctggtggtgggaccaatcccagcttgggatatgcactttgccctatggcggatggtgcgattgcaagccaagttgactttgtaaaccgtgcaatgaatgattgggggttcgatggcttcaagggagattatgtgtggagtatgcctgaatgctacaatcctgcacataaccacgcctcgccagaagaatccactgaaaagcaatccgagatataccgcgtctcttatgaggctatggtggccaacgaccccaatgtgttcaatttgttgtgcaactgcggtacgccccaggactactatagtttaccatatatgacacagattgctacggctgaccccacttctgtggatcaaacaaggagacgcgtgaaagcctacaaggcactgatgggagattatttccctgttacagccgaccacaataacatctggtatccaagtgccgtcggtacgggctctgttctcattgaaaaacgtgaccttagcggtactgccaaggaagaatatgaaaaatggcttgggattgcggatacagttcagttgcagaaaggccggtttattggcgatctttacagttatggttttgacccttacgaaacctatgtggtggagaaagacggggttatgtactatgccttctacaaagatgggagcaaatatagccccactggctatccagatattgagttgaaggggctagatccaaataaaatgtataggattgttgactatgtcaatgatcgtgtcgtggcaacaaacctgatgggtgataacgctgtattcaatacacgtttttccgactatctactggttaaagcggtggaaatttcggaaccggatccagaacctgttgaccctgattatggtttcacctctgttgatgacagagacgaggctcttatttacacagggacatggcatgatgacaacaacgcatctttcagcgaagggactgcacgttataccaacagtacggatgcttcggttgtattctcctttactggaacttccattcgctggtatggccagagggataccaattttggcacggcagaagtttatttggacgatgaactgaaaacaacagttgatgcgaatggggccgcagaagcaggcgtatgtctttttgaagcgcttgatcttccggctgccgagcataccattaaaattgtgtgcaagagcggagtgattgatattgaccgctttgcatatgaagctgctacccttgaacccatctatgaaaaggtcgatgcgctctcggatcggatcacttatgttgggaattgggaagagtatcacaacagcgagttctacatgggaaacgcaatgcgcacagacgaagccggcgcttatgctgaactgactttccgtggtacagccgtacgcctgtatgcagagatgagcttcaattttggcactgcagatgtctatttagacggagagttagtggaaaacataatcctatacggccaggaagcaactgggcagctaatgtttgagcgtacgggactggaggaaggagaacataccattcgccttgtacaaaacgcctggaacatcaatttggactatatttcttatctaccagagcaagatcaaccaacgccgccggagacgacggttactgttgatgcaatggacgcccaactggtgtatacaggcgtatggaatgatgactatcatgacgtctttcaggaaggaaccgcccgttatgccagtagtgccggcgcctcggtcgagttcgaatttactggaagcgaaatccgttggtatggacaaaatgattccaacttcggtgttgccagcgtttatatcgataatgagtttgtgcagcaggtaaatgttaacggagctgcggctgtgggaaagcttttgtttcaaaagactgatctaccagccggttcgcacacgatccgcattgtgtgcgatactccggttattgatttggactatttgacttataccactaacgcataatgtttcattccaaataaaataggaggttactcatttggataaaattacatttcttggcgcaggcagtaccgtctttgcaaaaaatgttttaggcgactgcattacgacggatgctatgcgcgagtttgagtatgcgctctatgacattgaccatcagcggttggaagagtcctatatgatgctttctaatattaaccggaactctaacgacggaaaggctaaggtcgtcaaatatgcagaccggctggatgctttacgtggagcaaaatacgtcattaactgcattcaagtgggaggatatgacccctgtacgattacagactttgaaattcccaaaaaatatggactgcgccagacgatcggagatacgcacggcatcggtggaatgttccgggcactgcgcaccatccctgtaatgttggactttgcgaaagacatggagaaggtctgtcctgatgcactcttcatcaattatacaaaccccatgtccatgctatgcttggcgatgttccgagccagttctgtcaatacagttggtctgtgccactcccaccaggcctgtgtacctgaactcctcgccgagcttggcatgccctgggacggcgtttcttacaagatttcgggcatcaaccacatggcctggctattagagattagccgcaacggcgaggatctctatcccatcatccgcaagcgtgcccaggagggaccaatttacgcccccacgcttgcattgcgtgagttacatcctgagtatgcggacagaattccgtcagtggccgagcagtttactcctgataatcatcatgatatggttcgcttcgaaatcatgaagcagttcggctacttcgtcacagaatccagcgagcacagcagcgaatattacccctggttcatcaaaaaggaccatcctgagcttatcgaccgctttcacatcccgctggatgagtacccccgccgttgccgcgatcagattgcgcggtggaagcagcaggccgagcatctggtccacaatgagaacctgacccacacaaggagcagcgagtacgccgccggcatcatcgaggcactggagaccggcagaacctttggatttgctggtaacgttctcaatactgggcttattgacaacctgcccttcgatgcctgtgtggaagtctcctgtatggtaaacgaaggtcatctctccccctgccacatggggccgcttcccaatcagctcgccgcgctgaatcggcggcagatcgaggtgcaccagctcaccgtagatgccgctctcaccaggaagaaggagtacatctatcaggccgccatgctggacccccatgccgggagcgaactgaccatcgatgagatccgcagccttgtggacgacctcatacaggcccacggcgactggttgccggagtatcattaaataaatgcaagagccacagggacccatgccaaggttattcgcgcttgccccgcaactcgttgaggaagaaacaaggagggaaattttgtgtctaccgaagtcgttaaggaagctaaattagaggaagaaccaaggcaatgtaccaagaaggaaaagctcggccacgcaattggtgtactcgggcatgattctatgtataccttgtggtctacctggactactccgtttttaacggatattctaaagctgcccgccggcttcctagcgttcctttttggtggggctcgattctttgacgcctttaccgatatctctatgggtatcattgcagaccgtactaggagtaagtggggccggtttcgcccgtggcttctccgctcaggtcctcttatggggatctgtttagcactctctttctttaagcccgatatcggcaccatcggactgtgcatttttgcaggtattatgtatatcatcacaggcagtattgtgtttacctccgtggatataccattctggagcttgcctgcggcaatgaccagcaatacgaaagagcgctcggaaatcgttggcttcactaccaccgcgtccaataccattactggaattattggattagtgatgccaatggcactggccttctttggcgaatttgactggcatgtttactttttccttgcacttgctgttgccgtctggggtgtgaccatgtacctgatttccttcaagttggtacgggagcatgtggtaccagacgacagtgagaagtttgagctcaaactggcactaaaaaatatttttcaaaacaagcccttgctcctgatccaaatctcaaatatcttttgcctgctaggtatgatgctgaaaggctatctcaattattattattgtgtatataactggggcagcctgggttatatgactgtgctgaacttgattaatctggttggtatggttgtaggcgcattgatcttcacctttctctctcagcatattgggaaaaagaattgcatgtttctctttgccggactcatgacaatatccagcctcgttctctactttgccgggtatcataacgctattgtactttttgccacatcttctgtctcaactgtatgcgttggagctgtcatggtctgtgtcaacgcgatgatgatggatacaattgagtatggcgaatggaaaaccggccagcgcaatgaagctatgattacctctacccgttgcttcgtgaccaagtgtgtcatggcagtcgcaggtatcgctgttgccgctgtaatcggtctgactggctacattccccaagagaccgtacagccggtgaacgtattaaattctttccactttgtatatacgctagtcagtgctggaattataatccttgcagttgtccccatgctgttctataagctgaccgagaagcgccacgctgagatcatggaggagttggccgcccgcaaagccagcaagacccaatgaagaagttcttaaattttatcgtctgaaaacagaacgtgccaatggggcacccggcggctatcgccgggtgccctctgtgcaaaaggaaaggggaagctatgaccaatctacaaattcaaaatccgctttctgaactcttgcaaaagcgcggacagaatcgtgaaatgggcctctattcctgctgcagtgccaacgagtatgtaattcgggcggcccttcgccgggccaaggaccgtgatacggtggtgctggtagaggcgactgcaaatcaagtgaaccagaacggcggctataccggcatgaccccggtagcgttccgggcgtttctgaaccgtttagctgaagaggaaaatttcccgattgacaaactgctctgcggcggcgaccacctgggtccgctgacctggacccatcttcccgaggctgaggcaatgaaaaacgcaggcgaactgatccgctcctatgtactggctggcttttccaaaatacatattgataccagcatgcgcctggcggacgacgctcccaatgagcggttatcggatgttgtgatcgcccaccgcggcgcccaactctgccgtatcgccgaggaagcttttgcccaatacagtgcgtggcacccggaagcccctgcgccggtctatatcatcggcagtgaggtgcccatcccaggcggcgcccaggaaaatgaggacagcgtaaccgtaaccgcgccggaggactgcgaagccacgctgtccacgttccgggcggcgttctgctccaatcatttggaggcggcatgggagcgtgtggttgccattgtggtgcagcccggggtggaatttgccgacgaaagcgtgatcgaatatgaccggacagccgcccacagcctgacggagcatttaaagcggcaccccaacctggtctttgaaggacattccacggattatcagccgcggcaatgccttcgaaagatggtagaggacgggatcgccattctcaaggtcggaccagctctgaccttcgccctccgggaaggactgtttgccctggagcagatcgaacgggaattgtatgggatgatggatttcccgtgttcccattttcgtgagatcctggagcaagtcatgctggaggaccagggccagtgggccaaatattatcatggctctatgccggagaagcggtacgcccgggccttcagctactcagaccgggcccggtattacctgaccaacagcaaggtacagggtgcgctccgcctcctgctggataatttgaacacagcaggcatcccaatggccctgatcagccagtatatgccagtccaatacgccagagtccatgcgggtatattgcctcccaaggctgaagacctcctgatggaccgtgtgggggactgcatcgacgactatctctatgcggtactcagggactgaagcaaatctggagaaagcaaagccttgaatacggaaagggtggaaatattatatggcactggtaaacagcagaggacttttgagggatgcccgtgcaaacggttatgcggtaggcgcgttcaatgtagaaaatatggagatgatgcaggctgtcatcgcggcggcggaggccgagcacgcgccggtcatacttcagacgacgccatccacattaaaatacgcggagccagcagtcttcgcggccatggcccgtgctatggccggcaaggcgtctgtgccagtggctatgcacctggatcacggagaccggtttggactatgtcagcaggccgcgtcagacggttatacctccctgatgatcgacggctctaaactgccgctggacgaaaatatcgccctggcccgcagagtggtggagatggcaagcgggatgtcttcccggccttgtgtggaagcggagctggggaaactgggcggtaaggaggatgatctggaggtcaagccaggtgaggatctttacacagatccaggcgaggcggcccgtttcgtccgggaaacgggaatcgactctttagccgtagccattgggaccgcacatggtttctacaagggcaagcccaggctggcctttgagcggctgactcagatccgggaagcggtagatatccccctggtgctccatggctcctccggtgtcccggacgaagatgtgcagcgtgcggtatccatgggtgtgtgtaaggtcaacttcgccacggagcttcgggccgcctatacccaggcggtacgggactgtctggctcatgacgccgcgctctacgatcccaagaaatatgggggccccgcgcgggaggccgtcatctctctagtgcggcatcgtataaaaatttgcgctggtaaagttggcttgattgctcccttgtaagtatatatgacctttctttcctaatgcgtatcgtattcttttggtggtaaaggtatttcaatctgccgcctgtatcatgcaaaacgaacagagcccgcatagcttttctaaattgcggaaagctaaacacaaccaatcggaaggggtgatatgcttgttcaagcacgaaaaacaactgtttcatccagtagaagtggagcagcccaatcctcagtatgccgcactattgcaggagcagctcggcggcggcaacggcgagctaaaagctgccatgcaatatatgtcccagagtttccgcatcagaaaccccaagatcaaggatctgtttatggatatcgcggcggaggagctgagccacatggaaatggtagctcagaccatcaatctgctcaacggtcatgacgtggaggcagacaaggtccaggcaggcgagatcgaaacacatgttctgcttggtttgaatcccggtctcatcaacgcctccggctattcctggacggcagactatgtcactgtcacgggagatctctgcgcggatctgctgagcaatattgcatccgagcagcgggccaaggtagtatacgaatacctctaccgccagattgaggacaaaaaggtacgggaaaccatcgacttcctgctcaaccgtgaggaggcgcacaaccaaatgttccgggatgcctttaatgaggtgcaggacagcggctccaatcaggacttcggtacgactaaggcggcaaagatgtatttctccctgtccaaccccggccccaatgcatttgcgggaaatgaagtatccgcgcccaagtttgcaaaataaaaagcggcaggggctgtgtggtcaagagttcttctgctttataaaccatcctttccctcaagcctttgctccgcagggtcctaatgggtgcatttttatcataggccaaaacaagagccgacttgtcaaacaagtcggctctcgttttatatcctgcgcccgtttgtcattccgcctcccgcaggcgctccaccacggtgtgccgggcgatggagcggtaggtcagcagggggatcaccaaccccaggaccacgaagatggggaaaataagcaggatgggcgccagggtgaaacggtaggtgaagaaccagaacaggctgttcacggcggtacccagcagcggccccatgaccacggtgaggagcagggaggccagcacggccgccagggtgtagaggaggccctctagcaccagcatcttcttgagctgcccgccggtcatcccgatggactggagcacggcgaactcccgccggcgggtgatgatgccggtgagcacggcgttgaagaagttgagcacgcccaccaggcccacgatgaagctcagcgccccgcccagcatcaggaacatcccccggaagccctcaaactctgcggcgtaggtggccttgctctcgtaatcgagctgggggttgacgttctccgtgtagtcccggagaaagccctccatatccgccgtcgcgccgtcgtccacgtcaaaggcgtagtacatgatatccgccgtgccggtgtcctggaggaaggtctggtcgttgaggataaactcgtcggccccgtaatagcggtagctcagggcggtggggacgctgaccagggctgccacctcatactcgaggtcccggtacttcaccgcccgggcggcaaagggcgcgccctccggaatgtcctcctctccgccgtacacctcgccagtgttggggttgtagtactcgtactcctccacgtgccgcagtgtaattttatccccaaggcgggcccagtggctgtccatccgcgggctgccgtagtcgtcctcggagtacacggcggccacgtaccgcccgcccggctcgtagagcttggaaatatccccctccagcacggtcaggcggtccagggcaaaccgctccataccgtagagctgggcccggtcggccagcaggccgtcctccgtgcggtccatgccggacaccatctgatccagggtttccgcgtcgttccaccggccccacaccgagcggtagtactcctcggtgatgaactcctccaccggggaggtgcagccgtaggtgcggccgccggccgtgatgccgccccgggcctccacctctttcaccgcgtcctccggcagggccatgtccgggttgaatacctccccgccggtctggaagtgtccggcatcggccaggataaagtcgctggccgtaaaggcggcgatatacttatccatgtcgaagcccttggcgaaggtgaccgtcatggtgagcagcaccaccgccaagcacagggagagcacggtgaccaccgtcttgccccggttccggcccaggttggcccaggccatggagagcagggagacccccttccccgcccgctttccggccttcctgcgggttttgctcccttcggtgtagcgcaccgcctcaacaggggacacctttgccgccatccggcccggctttcggcaggacaggagcaccgtcaccagggcgaacagggcggaggccgcaaagaggacggggttgacggacacaacattggtcacgccgttcagccggccgatcaccgccggggtgagccccgcccccaccagccagcccagcagcagccccaccgggatccccgccagggagagggccagggcctggtagcggatgatgcgccggagctggcggccggtggtgccgatggtcttgagcaggccgtagaagcggatgtcgttggtgacggagatctggaacacgttgtagatgatcagatagccggtaaagaggatgagcagcagcacggcggcaatggcggccaccacctggacgtccaatccgctggcgagctgggcgccggtgtagccccagttgacgccggagcgaatatagtcctccccggcggcgtcctcgctctggaacccgtggccggccagaatctgctccatgtcccgctcgatgtgggccgagccgctcttgagcatcacgtccaggttccaggcgccggtcatgccgtcctccggggcgttggggttcacccccgcctcgtccagcagggcgtccacccggctctccgggaggagcacgtggttggctacgatggcctcgtcgtactcccaccagccggagagggtgaaggtctgagtggtctcatgcccgtccacatcaaaggtgagggtgaaccgggcccccagctccggctccacgcccagcagctccagcacgtgggtgtcggtggccgcctcgtcggtaccctcctggggcaggcggccctccgccgggtcgcagtacatccagtgggcgtcgttggcgtcggcgtagctcacctccacgtgggctttgttgaaagggtcctgagtcggcatacccacgaaccgccgcaggccggcctgcccgatcagggggtcgtccttcagcgcctcatactgcgcttcggtcaggtatttgaagccgccgtgggagtagccgcccacctgccggaagttgttctgctggaatccgtcgttgatggacagggcgatggtgaacagggaggtaaagagcaccgtggtcagcgcaatagccagcaccgcgatgaggttgcgggtgcggctggcccgcaggctccgccgtgccagggtgcgcacacacttgcggttggagacgttcataccctcgcccccttaccgcgtgacgatgcgcccgtcctcgatgcggacgatgcggtcggccaactgggcgatctcctcgttgtgggtgatcatcaccatggtctgggcgaacttctgcccggtgaccttcatcagtcccagcacatcctggctggtgcgggagtccaggttgccggtgggctcgtcggccaggaggatggcgggcttggcagccagggcccgtgcgatggccacccgctgctgctggccgccggagagctgcccgggcaggctgtccagcttcttctccagccccaggacggcgatcacctccctgacgtagctctcgtccaccgcgccgccgtccagctgaatggggaggacgatgttctcatatacgctgagcaccggcaccagattataggcctggaacacgaagccgatcttccgccgccggaagatggtcagctcctcgtccttcagggtggacagctcccggccgtccaccgtcaccgtgccggaggtgggccggtccaacccgcccagcatgtgcagcagggtggacttgcccgaccccgacgtgccgatgatagccacgaactcgccgttctccacgctcagctccaccccgtccagggctttcaccagggtgtcccccgcgccataatatttcttcagttccctggtctgcaaaatcgccatttggaatctcctcctgtggaaaaaatgggtactgccttctgacagtacccattgtaatggatcaatctttccacactctttctcaaatcttacagtttggaaagatccgccctattcccgcgggagatagagggaaaaggtggttccctggccggggtgggaagccaccttgacatagcccccctgccgccgcaggatctcccggaccaggtagaggccgatgcccaccccctcctccgcccgcacagcgccgccccggtagaagcggccgaagatccgcccctgctcctcctctgggatgccgatgccggtgtcggacacgtccaaccggcagaactgccccagggggacagcggagagggtcacccgtccccccgccggggtgtacttcaccgcgttgtccaccacattaaagagggcctccgccgtccacttccggtcaaagcgggcggccgccccacatggctccgccgccagggtgagccccttggcctccgcctggggacgggcctgagccagcgccccctccagcagcggccccaccggctggggctccggcgcggtggtaatgatccccgtctccagccgggaggctttcaccagggcctggatcagaaaggacagcttctccgcctgccgggacagggtggccgcctgggcggcctgctctggggacagctccccctccgccagcagggaggcgtacagcaggatgttggcgatgggggtcttggtctggtgggagatgtcggagatcagggtctgtatggcggcccgcttcccctccagctcccgggccgaggcggcgctgccgttgagaaaccgggccagccggccctccagggcggagaggcgggactcgtcaaagcggctctcccgaaagctgccgtccaccgcatcggcgagcatccggtccagccgggccagcagccgccgggtgtagagccactgggccagcccgaagcccacccccagcgccgccagggccagggccccgcacaccgccggggtcaccgtttttcctcccaggtgtagcccaggccgtacaccgtcttgatgggggcatccgtcagcttgtcccgcagccgtttcaccgccaccgacagggcgttggcatccacaaactcgcccccgtcccacacccggtccaggagctgctcccgggtcagggtctgcccccggtgctccaccagcaggcgcagcagccgctgctccgtcttggacagctccacctccgtcccgttccgcataaagcgcaggcgctcaaagtcgaaggagaagggccccagctccagcgcggccgccggggcgctcccccgccgcagcaggcggttcacccgggcccgcagcaccgccagggagaagggcttggtcatgtagtcgtccgcccccagctccagacccgccacctggtcactctccaggtcgttggcggtgagaatcagcaccggcaccccgctggttcgccgcagcgcggtgagaaaatccagtccgtttccgtcgggcaggttgagatccagcagcaccagcgcgtattcctcttcgcccagggccgcccggccctgggccagggtggccgccaccctgatttcccggccctctccggccagcgccagggcgatcccccgccccagcgcctgatcatcttctatcagcagaatccgctccatgctccgccctcccctgtttcgcgcctcttatcataacacactccggtccctccggcaaccgccgccttgtccgcatagtgccgcccgttccgccatatcctagcgttgttccctttgaacaggagaccgaatataatttcaaaaattatatttaaagtttctattgattatattgtgcggcatgtgctatactaaagataaggaaaggtgatccatatgaatcaggaaaacgcactcccccgccgcaaggccatgctctattatccttcccaggcaaagccgcgcccggtcaggctgcgggaaaaggaccgggacccctatgacgggctgcgtccctggtccgccattacccacggcattggggccgccctggccctgctgggcaccgtgctgctcctgctgcgctgcgccgccctctccctcagcccgtggcacgtggtctccttcctcatctacggcgtgagcatggtgggcctgtatacggccagcactctctatcactgccgcaacgtcagcgtcaagggccgtatcgccctgcgcaagtacgaccacgcctctatctacttcctcatcgccggtacctatacccctatctgcctggtggtgctccgcaccgacggtgcctggggctgggccctgttcggtgtcatctgggccttggccctggccgggctggtgctcaccctggcctggatcaccgccccccgctggctcaccgccggcatctatatcttcatgggctggctggctgtggtggccctcgtccccctgctgcgcctgctcccccctgccggctttttctgggtgctgggcggcggcattctctacaccgtgggcggcgtgctctacgccgtcaagtggcctggccgcgataatccccgctttggctgtcacgagatttttcacctgttcatccttatgggctcggtgtttcacttcatgctcatgtaccgggtggtcgcgtttctctgagcacaagtaaaggagcttccgccatacagcggaagctcctttttgcgcggtcattcctctgctggaggctccggcacttcgggcagcgggcccatggtacccacacagcggttgatcggggtccccaggttgtggaacttctcctcgtagtcggtcattacaccgtggatgccgtcggcgtgcaggtcgcgggtgacctcagacaccccaaagcccaccctggggaactggaacagggaccactcgaatagatcccggttgtctgtcttgaagtggatctcccccgcctctgccagcacctgccggtaacgcagcaggaagtccgggtgggtcagccgccgcttggcgtggcggttgctgggccagggatcgcagaagttgatgtagatgcggtctacctcacccggagcaaagaacagcggaagctgcgctacgtccccatccacaaaaaagacgttgtgcagctcctgggcacagacccgctccatggcgatcaccatggcgtccggcacccgttccaccgcaatatagagcgcctgtggattctgcgccgcagtctccgccgtaaagcggcccttgccgcagcccagctccagaaagacctccttcgcctcgggcatcagctcccgccactttcccttccgctcctccgggtcggaaatcagcacccgggtacagcgttccatccgcactcccaggttcggtttttttctcattcgcatagcctagctcacctcgtatgggctatcatatcatatcaaaatgccctcttgcaatccttctgtctatatattataatagaaaagctgactgagcaacaaagtggaacactccaacaaaatatccgggtgtagcgcagttggtagcgcgcttgctttgggagcgtgaggctcgggttcgagccgaagtcctcggaaaacccggaaagccttgggacacttgggctgacagcactttccccctcgccggtaactggtcaaaaatcggcgttgaccacatgtttgaccacaattggaaaatttcataaccgggtgtagcgcagttggtagcgcgcttgctttgggagcaagatgccgggagttcgagtctccccactcggaccaaaatccgtcaaaatcttgtgattttgacggatttttcttaatttttacaacaaaactattctattagatttcgctatctatttttgcttttcttgaggtgccgaaatatggtaatagagacaaaccggctgatcctgcgcccctttttagaaggtgacgcggcggatgtttacgaatatctgaaagagccagcggtcaactgctttgccagcatgaaactgaactccctggacgaggcaaaagcggaaatgaaaaagcggctcggcgggacggagtactacttcgccatcaccctgaaggaaggcggcaaggtcatcggggagatcgacgcctacccggaggcaggcgagccccatgcaggcgaggatgccccacgggacaccttcagcccctgctggatgctgaacgaggcctaccagggccaggggtacgccttcgaggcggcccaggcattctttgactatctcttttcccaaaagggcgcaaggcgcatttacgcctataccgaggactataatcttgccagtcagcacctgtgcaagaaactgggtatgcgccgggagggcgtgttcctggaattcatctccttcgtgaacaatcccgacggtacgcccaggtatgaaaacacggtgcagtatgccatcctgaaaaaagagtgggaccggcagcagtcccagtaggcagtgggaggtacgatatgggcgcagcttctgtttccgagtatgtggcgtcgctgaacgaagagcagcggcggcatatcagcgcgtttattgactttatgagtgcaaaatacccgcagttgacttcaaaaatctctttttccatgcccatgtggctgctggggaagaagatgtacgagggatatgtagcaatctctgctgcgaaggcccatttctctatccatttttccgacgaggagtttcttaaccgcctgtctgatcgtctgcccgcctgcaagaaggggaagcggtgcatcaacattaaatacggcgatgaagtgtcccttcatgcggtggaaaaaagcatcggcgatttcctgaaactctatcactcggaagggagcgcgtcccaatgagcggcactgaggagatcggttgctgcggcgcctactgcggaacttgccgcgagtatttgaaaacctgtaagggctgcaaaccgggatacttggacggctctcgggatctgagccgggccagatgcaaaatgaagaaatgctgcctgactaaaggtcacatcacctgcgcagattgcgaggaatatgaacactgcgagaccgtccaggcctttctcaaccattcagtctacaaatactccaaatacaagcaggcactggagttcatccgcgcccacggctactctgcctttctgaaagcggcggaacactggacaggcgcctacggcaagtacccgaaatcagatttctgaaagagatgataccgcccgctgaaatccgtggatgttcagcgggcggtattctttgaatatagcttgttaaatactgatacgcctgatgcgagagcaaagtagaattaaggcaacagccagttgctttgctttttgctcccgctgtggtacaatccgggcaaggtggtgatcaacatggataccaaagaaatccttctggaactgcgcaccaagcacgggctctcccaggagcagctggcgcagcaggtgcatgtgacccgacaggcggtttcccgctgggagaccggcgaaacagtacccaacacagaaaccttgaaactgctctccaggctgtttgatgtctccatcaataccctgctgggttcgcccaggcagttgatctgccagtgctgtggtatgcctctggaggatgctaatatcagccgggagccggacggcaccttcaacgaggaatattgcaagtggtgctatactgacgggaaattcgtctacacaagtcttgcggaactgctgaattttctggaaagtcatatgtccaatgaagcctggcccccggagcaggtcagagcctactttgaagctcagttgccaaagctgaaccactggaaacagaccgagacatgaatacatccctctggaatctgtggttttcagagggatgtatttttatttgtgtcattcggatagggacagcccgaattttacgacaaaacaggtcatctgatttgatccagttgtccagattgaatggcatccaaattggcctggatccgtttctccggccagtcccaccaccgcagttccaatagcgcggcaattgtgtcctcggaaaaccgctttcggatcggcttagccgggacaccgcccacaatggtatagggcggtatatccttcgttacaacggcccgggcaccgatgatggctccgtctccgacggtcacccccgctaagatgaccgcctcgtagccgatccacacatcatttccgatgacaatgtcacctttgttgtcccaggctctggccacttgactccgatccagtccccactcctcaaagaagatgggaaagggataggtagagagggattgcaggctgtggttggcgctgttgaagaggaactttgcgccgcaggcgatggagcagaacttgccgatcaccagccggtcatggttgacaggatagtgatacagcacattgttcttttcaaagttaatggggtcattgacaaagtcgttatacatggtgtagtcccccacaaggatgctgggatctgtcacgacttggttgagatagacagtctgcgtatctcctgtccggggatagatattggatggattcatattattttcctcctcttatttgtttcggctgacctctcccaaatgctcacgcaccagcgtttttctttcccagactctgcttttgaagtagatgaacccaaccagagcgggcaggatgggcgaaagggcctggcccagatagattccagaaaagcccatggagaggggaaaggccagcagccaccctactggcaaacgaacgaccaccgcgtccaacagggcattgaccatggccacatgggccgcgcccacaccgatggcaaaggaatccagcgtgtacatggcggcatagaccaggctgttgactccacagcacaagcgcaggtataacacgcccacccggatcatttccggactggtgctgtcaaacaggcggatgagcggttctgccagaaactggaccgtcaccactaccgccgctgtgacggcgaggtttagtagcagaccggaccgcaccacctggcgggcccgccggatctgaccggctcccacgcactggcccaccatggcggtgatggcctgcccaatggcccagcagtgcatcccggcaaaggtgttgatcttcagtcccacgccggaggcggcggccaccgcggtgccgaagggattgagcattcccgtcaccagcagataggccgtgtttaccaccaccatctgggttgcggttggcaggcccaccttcaaaatagccagtaggatttcccggcgaagttccatttttccgtgggaaaaactccattgacgccgccgcagatagaccagcgaacccgcaaaggaaatgccttgggcagtgatcgtggcccaggccgcaccggcggtgcccatggaacacggccctaccagcagtacatccagcaagacgttgagaatcgtggcggcacctacgaaaaagagcggcgttttagaatcgcccaggcccttcagaatggagcagactgtattgtagccaaagacgaatacggtcccccagcagatgatctccatatagccgcaggcatccggataggcctccgccggaacatccagcgcccggaacagaggctcatagagggcaagaccgagcatggtaactacaacggaggccgccaatgacaggagaaacagcattccgatggtgtcacgctgtcccttttggtcgcctgcccccttgtactgggcaaccaaaacgctcccgcccatggtcaggccgatacagagggaattgatgataaaacacagcatggaggcattgctgatggcggccaggccgatttcgcccaccattttccctaccaccagcatatccaccacattgtagagggcttgcagcaggttggccagaaacagcgggaaggcaaaccggagcagttttttcggcacgctcccggtcaataaatcttgttcttgggtcatgtagtatcttcctttcaaaaaaacagagggcagcacagtgctgtgcgccctctgttccatcgcccctgaaatgggcataacaaaaggccgcggacaaaacatcgtccgcggcccaaaataaactatcttgccctgtcagtctgcaaaaagggtacaaaaaccaaaggcagagatgttctgccccggcctcccggttttacaacttgacagtccgaaaaggctccgcacaatgttttgtggtatccatttgtacggagccgaaatcaatgcagaattttccgaataacatcgtgctcacctcactttgctattataaatactataccatgtgccgctgcctgtcaatgtccgtcatgccggtgaaagccgcccgcttcgtccgcggcgcatgttcacagtttcctttgcaggtacaccatgtccaccagctgcaccccgcactcgtagatggggcggtcgtagtggtcggtgaaaaagtttttgaccagatggtgcctgtaaaagccgcaggcctcataaaaggggatggtggaggggctgtctccggtgcccacctgtagcactgcatactgccccttgtaggttcggatgagaaagtccaccatggcctttccgtagcctctgccctgcgcggcgggcgcaacggctatgttcttcagctccagaacgccgtttccctcgtcggtcaccacacactccgccttgacgccgtcgtcctccagcacatacatgaacccccgctccagatagcggtccaccatgtcctcctgttcatccgccagcagcagtaaactcaagtattgctttttgtcggtctccacttttctgatttccataggcacatcttattgtttcagaagccgcttcagcgcggcggcatccagcagatttaccgtcacgaactttccctgatagaataccgcccagttgttgaacacgcagggcaaggccttggccttctccagagtgtccaccgggatgagggtacagggcgcctccagttcttcgcaggttttgcgcaccagctccacgctctggtggatgtagggacactgggaactgtaatagacagtcagctcctggttttcgatggcctgcaccttggcgttcttcccaaagcggggcttggtcccgtcaaaggagagggccagcagccggtagccgtccggggtgacatccaccatttcaaatccatatttctctgcaaaagcctggtctgagagccaggccttttgcttttcggcacccagcatacacacgccggactttcccctggctcttgcgtcggccaagcagtactccatcagctgtctgccgtagcccttgcccttgaactccccactgacccataggcaatagatatagagatagttatccccctccaccggcacccaggcggtctccagcggagcatactcgatgaacaccacacccttggcatccagcttgcggaacacatgtccctcccggagccgctcccggagccaggcccgtttggcctccacgccggggtggggctttttgctgcggatgatgcagcacaggtgctcctgatccagattttcttctgtcagattgagaaactgatcctccatgtccgctacctcccggaaaatctgcatccatgataccatgccctccacggcaagacaatcccagatcccaccggcataagtttttctctaaaataaacatgacagacagttgtcccgttcctatgatataatgcagacagaaatgcgaaaagcggtgtaccccatgaagatggagcggctcattggcatcctgtccatcctgctccagctggagagggtcaccgctccggaaaccggcgttatatgcgtggctatccatacctttgaataggcctttgtccgtctggcactcttcgccctgatgctgcactggtgggcgtgttcctgacgcggaaaagagcataggacatgttttgggagcgtgcaccacggagcaggaagagcggtaccatcggacaaatatgagcacggaaaaccgggcagagtccgttcctttccggtatgctgaatccagaaggacggtgtgaccaatggattgggtaacaagcattcatcaggcaatccggtatatcgaggaacatctccgggaggagctgaccatccgggaaattgcgcagcaggcggccttgtcccccttctactttcagaagggctttgccatgctgtgcggcatgacggtgggcgactacatccgccagcgccggctctccgccgccgggctggaggtcctcacgacggaccagaagatcatcgacatcgcgctggagttcggctacgactcgccggacagcttcaccaaggcttttacccgtttccatggcctcacacctgccgcactgcgaaaaagcggaggcgcggtccgttcctttgctccgcttcggatcaaagtgacattggaaggtggtcaaaacatggattgcaagattatgaaaaaagaggcgtttacggtgctctgccgggcaaaaaccttcaagtatgaggacgccgtgacccaggttccccagttctgggcagagcacttcggaacgggcggcggcaaggtagtgtgcggcatgtacggcatcaacctggacgagagcatgggcggaaatgagtttgaatatctcatcgccgacaactacgatcccgccagggagattccggagggctttaccacccgcaccatcccggcctacacttgggcggtatttccctgcactggccggatgccccaggcgctccagggactgaaccagcaaattttctcccagtggttgcccacgaaccccgactataagatcgctgcgggtatcaatgtggagctgtacagcgacgccagcaagtttgagggtggaacccaggatcaggactactactgtgagatctggatcccggtggagaagaagtaaagtaaggaggcggctactgtgcctgagattgtgccaagcgcggagcagatgacaatgttagtggggaaacccttatatgagatctggacgcagttatgcgccctgattgacgaaaaatatgacatggagcgcctgtggggcagcggcgggaaggcatggacctatgagtataaataccgccggggcggcaaaaccctgtgcgcgctttatgccagagaaaactgcatcgggtttatggtcatcttaggcaaggacgaccgcttaaaatttgagaatgatagcgagcattacgctccggaagtgcaaaccatttatgatgaaacgccaacttaccacgatgggaaatggctgatgtttgaaccagcggacacctcattgtttaaggatttccttcgactgctggccatcaagcggaaaccaaaccggaaataggagcaggcccccggcgaaaagccgggggcctgtttcaaccttatttcgcccaatgagccacggcgtcccgcaggaagcgggcgcagccgggcatatgcttatcgtagtaggtggtaaaccgctcgtccatcacatagagttccgcgatcccccggtgcttggcagggtcgtaccggttcccggtgatggtgagccaccggcggtggagggcggtgatttccttgccttcctcacccttcggggacagtccggcttggacggcagcctccagccgctcctggatctcccgccccagctccgtccactcctggtactgcgcctgggtcaggttcatcaccgcggcgttggcctcgtccacttctcggtcgccgtacttggcgcgggtctccgctccgtaaactttctcattatgggctatagcccgctgcttgaacgcctcaaatttctgctcgtcgctcatgatctcgttcctttcttccgctccgatggtgtctttcaccgatcggatgagctgttccagccgctcctgctctgcctccagtgcggtcaggtggtttcgcagggcagccagacggtcaaaggagggatcgtccagacattccttgatccgagccaactccaccccgagagcccggtaatagagaatgtcctgtagccggtccacctccgcccggccatagtagcggtagccgctctccgccacccggctgggtttcagcaggccgatctggtcgtaccagcgcagggtgcgggtggtcaccccggacaggcgcgacagttcctgaatggaatactccataaacatccctccttacggatactgtatcagttgacggagcgtcaaagtcaaggggaactttaaaattggaaggttcttttccggtagctaatttccatattccaaagcccaaatccgtagtataatgatagcacatacatgtgcatataaggaggcattgctatgcgcaagaattttggagccaagccctggacttatccccagccggtctttatcctggcggcttacgatgaaaacggcacccccaacgccatgaacgcagcctggggcggcatcagcgaggacaaggagctgagtatgtgcatcagcgaaggccataaaaccaccgccaacattttggcccgcaaggcctttaccgtcagcatggccacggcggatcagatggtagcctgcgactatgtgggcattgagtccggcaacaaggtgacggacaaggtggtaaaggccggatggcacaccaccaaatcggaatttgtggatgcgcccctcatcgacgagctgcccatggcggtggagtgccgcctggtgagctacgatccggagagctgtcgcctggtgggcgaaatcgtcaatgtgagcgccgacgagtccgtgctggacgaggacgggaagatcgacccggacaagctgcggcccattacctttgatcccatccacaacgcataccgggtgctgggcgagaaggtgggcaacgctttcaaggacggcgctaagctgaaataaagactggattttattccaagcatagatgagggacggaggtacagactccgtccctcatctgttttgacggctcaccgccgccccgtcttctgccgcttgcggaagtcctcctcaatagcgtctttccagtgttcgtccaggggtgcgctgcaccggacggcggccaccgcctggcccaccacctcgtagttgaggcgggtaccctcgctgtcgcagtggtagttcactgcccggtcgggtgcgatgcccagatggcccgccgtctccacggcgtcgatgttggcccccaggaagagaaactcccagccatacttttccttctgacgctggatcatctccttcacccgccgggctgaatagcggcggctggcgttctccatgccgtcggtggtgatgacaaaaagggtatgctccggcacatcctcaggccgggcgtacttatggatgttcccaatgtggtggatggctccgccgatggcgtccagcagggcggtgcagccccggacatagtactctttttcggtgatagggtgaacctcgcccaacttcacccggtcgtggagcacctcggcccggtcatcgaagagaacagtggagacaaaggcctcgcccggctccttcttctgcttttcgatcatggcgttgaagccgccaatggtgtcgccctccagtccctgcatggagccgctgcggtccagaatgaacaccagttccgtcaaattcttcttcataaaaaatccccctatgctgtgttgtttgatttacaagcacagtataggggaattttgatttggataggtcgcccggcgggcgacaaattgctatgcttcaaacagggtgatctgcgtgccgttctcctccaggagccggagcaggtcctgggttttgagccatacggtggcggtattgtcattggggtgtacaccgatcaggccggagctctccagaaaggacttatccagccagaaggttaccttgtgttcccggtcattgagcaggcccagaggtgtcaccgcgccggggatcaggccaagcatatccatcagatcctgatccgaggcaaaggtaagcggccgggtgtcgttctgctgccggaaggctttcaggtcgactcgcttgttccccttgaccgtaatgagatagtaattacgctttttgtcatcccgaatgaagaggttcttggcgttggcctccgggtagggcaggtggatctccgccacctccgccatgttgaaaacggctttatgctccgtcacctcatgccagatgtttctggcgctgaggagggcgtaaatctcctgcttgttcatatctgttgtcctcctgtggtacaacccggtctttcatcaacgggagttcttctgtgcagggttaaaggagatccactggattgcacaggcccttccaggtctgagcgaccttatgatgtatatgctctaaggcagaaaactgcgtctgatgtgcaaatataaaataatagcgatttgtgtagcgaggatattccaaaagcaaggtgtggtcagcatgcaggaaggagttctgaaagcccagcacgctttgaatgcacatttcctttttggtcatctgcggacggtgctgatagagaatcacgctttgccctcggtcatagtagtccttgacctcctgccaggtggtatgcttttccttagctgacctgcgttcatgcatctttgcggtctccaggccattatcgggatcaaggaaaacaatgtctgtaccaatagtactggccagggccgcttgatgccaatgtgaacggttcgctggaaccaaggcatctgagaaaaaggctgctgtaagcacaccacttgcttccatttcttcgatactgcgcttttgccggtgtacaatatcggctaaacagtcgaacagttcaggatcataatgtctgtatatttccggcttgtccaggtacgaagtgtatttcccatcctcttgcttacccggacgagtgggaatcacccgataccagttgactgccagtcgaagaccagtagcggtcacattccgcaaaaggccgtactttccgtaatctccaatatctccaacatagttatcctgcatgcggtcatcctcccagcaggctctggtcaaaggcgaacagcgcctcgttgatttcgaagatgttgtagttccggtgggcgatgaaatactccacgataatatcgaacttgctggcgtgagaaaaggcaaagcccgctttccccagcatctcccgagcttcctccagcggcagttccaaggcaatggcaaaggccatggcggtgggcttggagggcttgtagtggacatctgagcggatcttggagaacagcttacggtcaatattagcctttttgtaacactgggcgtcagtcatgccacattcgtcgatcttccgcaacagcatctgagaaaaactttcatccagtttgctgagggcctcgtccagaccgaagggcgccatagcacagggggcaggcatgcactccgattcctctatgggcatggaggccatagccatccggcggcgttgggtctcccggctgtcggtgtgggcatccacatagcggtcatcaatgtaggcggcaatgtcagaaaagagcttcccactgatggtataggcggtccggtcgaagatgaccagatacaccgtcatgtcgtgggccagaaggaaatccccgatggtatccaccgcaaccttcagggcctgatccttagggtagccatacaccccggaggagatcagggggaacgccaccgtttcacactgatgggccagggccacttccagagaggagcggtaggcagagaccaacagttcacgttcactgtggctaccgccctgccagatgggaccgacggtgtgaataacaaactttgccggtaagcggtagcccttcgtgatcttggcctgtccggtcttgcagcctcccagggtgcggcactcggccagcagctccagtccggcggcacggtggatggcgccgtctacacctccgccgcccagcagactctccttggcagcgttgacgatggcgtccaccttcatggtagtaatatcatttcgaacgatatgcaggggcatgacgacacctcctcacttgatagggtcatcataccataagcgggacggtctggcaatcgagcagaggatggggagcggttttctggatgcccagcatcttttggatcatctcaaagtgcttggccactgtgtgccgagtcaccttagcccccttggcgattgtgctgtaattcgtctcgtcagggtaaattttcatatactcccagatctgccgctgcttcttggtaagtttctcaggcgatgggatccctcgcagccgatccaggattgccttccgctcggcgttcaattgctggatgagcactttcagtttctcctcacattcctcacgggtatgggcgtagacacatttggagtgcttcgtgccgtccggccaggtgggcgagtagcgaccctcaaagaggtggtcgttaatctcagtaatgcagccggttccaggctttcgggtgcgccgcatgaccggctggaagtcagtgagcggattttccttagcagagtcctctgccacttcattgcccaggccacggtcgatcttggcagcagcttcactcaacatgtcgctggtaatgtgggtatagatatccagcgttgtcgcagccgacacatggcccagcatggcagagagtgtcttgatgtccatgccgttctccagcgccatggtggcaaaggtatgacgcagatcgtgaaatctgatttgcttgcacccggcccgctccagaatgatatggagccgacggagcatggaaccaggtgtcagcggcatatccaaattcttcggagaggggaacagccaccgggactttgctgcctttcggtattcccggaacacctccaccacagcgggcggcaacaccaacttgcggatagaggcttttgtctttgggacactcaactgcatctttccatttacctcatagacctgtttggtcacggacagcgttccggtatccagatccaggtcggaccattggagggccagcagttcgccccggcgaaggccagtggataagtccagcaggaacagttcaaagtagccatcggccttggcctgaatgagaaatcgctggagttcctggcgtgacagcacctgcatctccgggctccgcttgggcggtagcttacaacctaccgcaggattggtccggatcaggttctcttgcaccgcctgatccagcgctgcccgacatttggcgtgacacattcgcaccatccgatcggacaggcccttcccaaattgttctgtgcggacgagccgtccctcctttttcaggtgagcgtagaattgctggaggtccttctgggtcaactggcacagcggaatcttgcccagctgggggatgatatgctgatagatggtactctcataagtgttctgcgtggcgggacggagaccggacttgatgtaggtctgataccagaagtccatccactccccgaagggcatatcggcgcagatcttttcggacttggcgctgcccactgtctccatcagcttggtcagcttttcctggcactcgtgcttggtcttggccagcacatttttcgttttgggcaggcccttgtcgtcatagcccaccacagcccggccttcccagcggccatctttacgctgccttatggtgcccgttccgctttttcgtttccttgccatgggttcaactcctctcccaatagatttttcagaaagccgccaactacatcgctggcggctctctgcatgtccggcgtcacatgggtataggtatcaagcgtgaacgatgcattggtgtgtcccaggatgccggagagagtcttggcatccacaccactggccagggcgtgagtggcgaaggtgtggcgtaaatcatggaacctgatgtgaggcagtcccgcctctttcagcagtaccttcatccagtagtaggcagcgctggggcgcaccggcttctccggagccagcggttccgggaagatccattgactgactgcgtgttttttcctctcctttaatcgctggacagtactggggggcagacggatggtgcgtctgccccgctcagtcttggtctcgccgatctccatttcaccccgcttaggtacattcaccgagcggaggattttcagcgtcccggcgttctcgtcgaagtccctccacatgagaccgcagatctcacctcgacgcaggccagtggtcaactccgtgtagaagaagtcccgccagatttcgttcttgtccactgccgccaggaaggcgtccatctgctctcggtcgagaacctgcttcggtttgtagttgctcttgggcagcttgacgccgtccgttgggttataggggacgatgtgatcccgctccgcatctttgaggcagcggtggagcatggcgtggatgcggagtaccatgctgtccgacagttcgtgcccgtactccgggtggtcgtggacgcggccctctttcttcagcttccggtacagcttttgaatgtccagccgtgtgacccgggagacgatcttgccgccgagatacggcttcacatagcaccggatgtactgctcgtagctacgcagagtgttgggccgcagggtgacggcaccgtactcctccatccagcgatccagccactcgcccagagtcatgcggctgtcccctgtgagctgtgcgtcctgatagatatccatgtcacggtgaagcttagccagcaactctttctgagttttggccagcacatatcggaagatgggctcaccgttttccttgtggcccactacgatgcggccttcccaacgcccgtcttcccgtttgcgtaccatgccatctcctgatggtcgtctctttgccaagttgtttcacctccaatcgttccgtttcatttgttgtgcggttactgtgtagcctatttcacaggaggatacttgtaaggctccgccacatactggtagagcacagcgccgcagcggcggcagatcagataccgcagccggttgcccagcattccgtgttttttgaatgtgaccagcgcttcgccgtgctgccagccaagaccgatgtcctcgcacccacagtactggcaccgctgaatgggaagttgatttgtcatcttaatccctcctcctgttccattctgcggcagacgcgctctgtttcctcctcgtcgaaggagtacagaccgtctgcctccagctctttgctcagtccccaagccagtttgaacccggcggtgaaactggccagagagatttcttctttcaacagattctgactgtccaccagatgcatgagcctgcgacgctgcatcttatccaggcagtcccgcacttcctggcgggtgttctcgatgtcttcttccaactctgacacatctggttcccggaagaacctctggtgcagtgctctcatgtagtcgttcattgcgcgtcgcctcctatcagcaacacacaatacccgaactgtttcccaatatccaccccttatttgaaactttttcagaaagatttctggggtgtggagaggtttttatctttgtttttgcatgtcaaattttaatacgcctacatcccgcccatggtcatgccgcccatggtctgctcctcctcatagtcatccggcttgtggcccatggcgatcttcttctgacggatcttctggcgcagtttgcgatccgctctgtggctgcccggcgggcagggcggaatggagttgtcctgaaagatccggcccatgtggtggagcagcttggtggcagagaggagcacattggggctgcggttgtcattgaagtgatccaggaagaactgggcatactcatttccttgtgatgcggattcccagaaccagctgtatgcctgttctctgtcctggctcacatcctcgctggtgaggtacaacttaccaagggcatactgagcatattcgttaccttgttccgcagaagttcttagatactccaccgccttgaccgtattctttgggacatcctttccctccagatacagtttccccagccggtaggcggcgtaggaattgccctgcgccaccgctttctcataccaggacaccgcttcctccatccgcttttggctttgcagcagtttaccaagagcgtactgtgagaagtcatgaccggcctgagcggcacggcgaaaccacagctccgcctgttcgtcatccggcagcacacccatgccatcccgcaaacacttgcccagcaagtgagctgccacggtgaagccggcgtcccagagctgctccaggacttgcacctgttccgctttttcttcctctgtattttcatataccgagaggatttctttcgcgttctggtaggcctctgccatctgccagcgggagttccaagcgtagtacacctcctcctgatcctcatccacttcatctttcatggtcgtatcttcgaatgtgaaggtacccaagcgcagttcctctgcctcccgtatgaccatgttcttgatggccttgaattcttgttgctgtgacaatggtttgtgttctcttggcgtgtctttgtagtaccgctccagttcatcccgcattcggttccattgttcatagcactccgccacctctgggagcttggccagctcatccacgacggcgtccacctgggccttgactggctttttcagatagccgtataccttcttgcccttgacttcagataacatttcggccagcgtttccatctgactggcgatgataggactgtcgcagagtccagacttcatctcccggatgagacggcccatagcttccatagccgcgtcccgtacctgctgataggacagatccttctcctgataaagagacagcagttcgtcctggaagatatcgttggacagctgggagcgcatctgctcaatacctttctcagtcagataaccctgcgtaggttcggcagaccaggccatcatgtggatgtgtgggtggtgcttttcatcgtggaaggcagcgcaccaccgaaagttgccgggcggaattttcatcgctgtcgccagttctgcctgatgggccagcaataatctgcgccaactctctccgttttcgtagcccagccgtgcggcatcctcccgtttcagggagtaggtgaaggtccacaccggaccggcgtgtgcgttgatctcctccatggtttgctccagatcagcagcaccgtccgcagagaacaaaccgtgagagcggggacgctccgcaatgtactccaagtaaccaccgcctgccgtgggttccatcagttccacgccatctcgggtggcgatgtactcggcgtagtgtccgccgccgcttcccggcttaatgtagccggacttttgaatgagacccttcattcttcaatcctcttctgaaaccggaacgcatcctggaaatcaatttccccgttggtctctttcacatttttcacgcagcgcacccgaagtttttgcagtgtatccaggccgacattgatatcgctggcaagcagattcgccatcacatcctggtccactgcctgtttgaagagcagatgccccatgcgttttccgaaggcacccagctttccctccagcacatctgagaggacacgaggcagatactcctccgcgtgttccgtgtccaggtagccggaatagaactggatcgccttttcgatgtactcatttttggtggagcagttgtccgcctggtagtgatgttccacatcggcccaggccgattcgctcagccacaccgagtgtttcttctttacctctttcatctccaaaatcgcctccttttctcatcagcgccgcctgaaatcccgcaacggcggggattcaggcgcttttttacaagaacagcgccaatcccaaagcctgctggccgaaacagcgccaactccaaatacccgaaaccgcccgcactgcgggtcgttgtgactgcccgggcgcacaaaagcgccagggctttctcctgctcctcgtcccccgtggcccccgtcccgaagccttgcccaaaatcgggccaaatccgcattgaaagccacaggtggggcaggggcttgccctgccccgaaggagggcacacagcgcctcacaggccgctgcaaagggggattcctctgccgcaggggatagcgcactgaggctggaaaatccggaagtattccgctgggccggacaccagatgctggcgcatcatctcgccgcattgaagcagtcggtacacagtaatttgattgcagaattcaaattctgcacagcgctctttcgcaaatgctctctgctcatccgtgaggctgccgcggttctcatcgcagaggaacagtgccacagcatcttcgtcgatgggctcactatgactggcgttccacttgctggtgatgtactttcgcttgtccaccatagccatggcgcacagattgggatcttcttgtatgatacggcccagttcctgcatcagcatccggatgcacactcctttctctccagcgcggccaggcgctgctttgccttgtgctgttccagtgccaggtcggccatatccatctgccgctcatagtactgatcgatggccaactggataggcaggatatgatagagcagacggccgttgcgcttgcgaccatctttggtggtaacggtcgtgcgctcggtgcggatgagcgaccgctcctccagttccgccacatacttgcgtaccgtggtcacgcacatgcccacgccctcgccgatctcccggtagctgagcaggcactgataggtcttgcgatcctcccggcggagcaggaaactgtacaccgagattgcgccgcgggacagccccagatcgtagatctcgttgggcagtgggaaatagtttttgatgggatcccgcttggtccagctctgctttctcatttcgcacctccggactgttcttccacccaccgaatgaacttttctttcggtaccaccatgcggctgcccacacggagtgtcgggaaaccgggttcgtgcattacctcgtaggcggtggagatggacacgcccagcacctgtgccaccagttttgcattgagaaacagcggcaggtcgccgtagcttttacagactgacatcttcatttcaatacctccgatcattttcaaatacagagaaaaattgttcttgcgtttcggaggtctctctgataaactgaacacagattgggctgtgctttccgaaacgcagcgggccgttgaactgttgcagcagttcagcggtctttttttacggtgactgtcttttgcctgtgtttggccatcaccatacctgttccagccctgcggccttgtttgacacgcacggcgtttgcttccccttggtatgctcggctgcttcgcccacaacagcgtcatggcaatacttctccggggagtatcatctctggtgatgggtattctgttttcaacgcctcatgaaatgccatcacagctgagaatgaaaatatagtctgtgcgttaaccgcaggatttgctaaactgaagtcagcaggcgtagtccggttgtaccttggtggattttcaccccgtttgttcaacgtggacgaattgcccaagagaacagcagtatgttgcatcacgcaagtgaagagcacgagtagcaaagttcggatacccacccgggcaattcccagcctgcatatttcagggagggatttgatgcaagacatattgacctgcgccatgggattggatgttcaccgcgatgttatcgttgcttgtcttgccagaggcgagctgggcaccgagccggaaattgagattcgctctttcagcacgcttatcccagaaatgcggaaattacgggactgggtgttggaggtagagtgtcgccatgttgccatggagagcaccgggatttattggcaacccatttatgagatgttagagccctgctttgatggtcagatcaacattctggtggtaaatgcccgccacatgaagaatgtgcctgggcgcaaaacggatatgcgtgatgcgcaatggattgctacattactccgagcagggttgctaaatgggagctttatcccagataagacttttcgggaactgcggcatctgacacggtatcgtaagagcatcgttcacgacataaccgcccaaaagaaccgcatcgataagtttctgcaaagctccggcttccgtttcacagcgtttctatcggacgcatttggagcttctggacgaaatattatccgtcatctcatggaatacggagatatctcgcgggaggctctggataagtgtctgaaaacacagactcggaaacgcattgacgaaattcttgttgctttgaacggctcactttcagagcaccagcggtcctttcttcgtatgatatttgaacacttggaatctcttgaacgacaccgccataccgtggaagatgctatttcggaagaaatcgtaaaacatgaagcggcattaagtctcctgtgttctataccgggcattgatgtaaccgcagcagcttccatcatcgcagagattggtactgatatgagtgcatttccggattcccagcacatatgctcctgggctggtttgagtcccggcaacaacgagagtgccggaaaacgcaagagcgcccatatcaataagggagatccttacctgaaaagcatgctctgcgaagtcggatgggtcatctccggaaaacgaacactgtacctctctggctggtactggcgagtcaagcagcgcaagggagcaaaacgggcaacgattgctttggctcgaaagctgttgacgttgatttacacgatgctgaagacaggaaccccctacaacgaagaatgttttgagatccgcaggaaacaaagcgaacgaaaacgggccggccgcatggtgaacgaactgcaaaaactgggatactttgtggttgcaccagactgatgttcgcggttccatacttcgaccagcgacaggttttggcctgccgctttttgtgttgcgatggtttttcatgaggcgttgaaaacctgtttgtcaaagtacacgacctcgctacctattttcgtagcaaggtgcagtaccaggaggacaacgaaagtttccattgacaaattgtcttcccaatgttagactgataataaattcaattagacagtcatcgttgtgggagtatcttaacacaccaaaatatatttgtcaagtctatcgaaactctaatttagtattagtctatttttgaggagccgactatgtggtatgtgaaaatgtatttctctgaaaaacgggagctttttcagtgtgacgcctctggcatacagggagtaccgtccgttgatcgggagtttccattcctggagagcctgcttacctttctggagatggattgtggggaactgacacccattctccagcggattgcagatcgttggggtcggctgattacagagtttgaccgggatgccggtacagaggccatggtggaactgggccagctgaaaagtcgtcatatctatctggagcttctgtatgtgcgttggtatgaccgtttctccagaatggggatctatggtgactggggcagcgcggaggatgagcagatgttggcggaactgcgagatctcccggagcagcttctcctctatcagaagcaggtgcagcgattctttgatttggttctggatgtggacagcgcagggcgcgacccacagcagcaggcagctaagaattatcttcacgatagtccgagggatcccagcctgtttcgcttccgccccattccactcagctttgagccagtggaaccggggcggtgttcgccggttttgtactccgccagcattccggacatgatcgactattctctgcgcagttgtgtggagaggggcattacggtgcggcgctgcaagaactgcggccgctacttcccccagaccggacgggtcagcgcggagtactgtgagcgtccggtgcccagaggacagcagacctgccgtgaggctggcgccttccagcagtggaccaagaagcagtctgacgatccggtattcaaggcctaccgcaaggagtataagaagcgctttgcctggatcaaagccgggcgcatctccgatacggatttctacgcctggagtgagcgtgccagagaaatgaaaaagaaatgtgaccgcgatgtcatcaccctggaggaatatgtggagtggttgaagaactcctgaaccacggacaaaaaaagaatacgggaccggctttacgaaagccggtcccgtattctttgtataggcgatgtagattttgtgctgtttacagacttccgtcccccttgttgccgccaaattcacagccgtactgatggcccttcccgtagtaccagcgaccatagcgatacccatagtggggcgggcagttggcgcagtcgccgtcgcagtgtccatcatgcttcttattgagatgactggcgactgccgctccggctgcgaaggctgccaccgccgacagcagaccgcctttctttttcggacgggcagcagaggaagccgctgcctgccgccggagttctttcacatcatcaaacacatcaatgcgtgaccgcttggagattttgtggaaggaagaatcatcaatcatcaggtagatctcttccaattgctcccggttgaagggaaccgttgtctgctccgccattttgctcaggagggactggtccaccatggccaccatttccagcacctgttccggggtgaaacggacaccggcagaaaaggccctttccaaaaatttggcggcgaaggcactgtcctcaaaatcaagctcctctgcgatctcccatacctcgtctgccgaaccataatcggacagacgataggcgtagctcttctgggtgctgggcacccagtcataaaatccgtcgtagtattcttcccaggtcagttgcttcatgtggagcactccatcctacatttccccagttctaaaatgtggggggatgtattgattgataggcaagggcggtttacaaggctctcttacccagctgataacagatcttgatggtagaactcttcccgcttggcgtcgtgtgcagcactacatcaccggcttccatggtctggtacatagcgctgcagacggatggcattttattggacagtcccatggctttatggatctcaccagacacaagggtgcagttctgtttcccgcactgctggtgctgcagcaggatttccaaaataaaatggcggatgtccgccgtcctcaccttgtttcctgacggctctgtatgtactgctgtttctgttttgggaattcgcattgctttctccggagcctttggcgcacctttcaacagggcatccagcccgcccagttctttttctgtcagcggcatggcgtccaggccctgtttgagccacattccgctctgccggatctcccactccggataggacaatcccagccaggattcactcgggccaaaatccggtgcacggtgcagggaagcaatcatgcctgcctccagacggagccgctgttccggtgtgtccacctgaaacacggaaaaagtgaaacggcttctgagatagctgctgacggcctgctcgatttctcgctcccgaatgggatcttcctgcccaagatagggcggctttgaggtatccaaagaccatgtagagagatagggatcgtgcgcctgattcaaaagcgcttttccgatgtttttgcggaaaatacttccgttgtggttttctcggacaaagtgatcccgcaatctttgccgcaggcggttgggcgaagtgtgggtgccgacccgcacgatgcggggaagaccgtgatacatctcaccctgctcaaagacgatatagatgccgttacggaatgggacagaggaaatttcttcccaggtgtatcgcggtaactccgacatcatctgatgcaggcgcacacacaacgcacggccactgtcaaatccgtttgtacaggcagacggaccccctcggctcagccgagccaactcctgttccaggaaggaaagccgcgggccgatacgcagattccccaaaggcagagtggtatgaacaaggtgcggcaggagattcttataatagtttcgcccggccaggatcacaaacacatcccggttcaaatcaaagcgctctcccatctggcggagcacatagttggcccagtcccgctgacgatgttccgggagatctgtcagggtcagatcgtagggggcaactacatcttcttctgccagcagaccatacctggcagagaggacatacacctcgtcagcgaccttcttggcatactgatatgacaaagaaaacagttggctgggcgcatatagttctcgggcaggacaggggtagttctgtttggatttgctgcaggaaatcaatgcgatccttctcatagaatcacctcatggtccggagaacttttttatggtgtgtaggtcagatgcttgcaaattggtgaattgggtaagaatgatttatgatttcgtctcatagggccaggtgttgatgccaccgaactcatagatgttggtgtagcccaaatctgccaatgtagaggatgcggtcttgctacggtttccactgcggcagtaaaccagcaccgtggagtccttctcaggaatcacatcggcggcggtggcctcatcaatggtacccgccggcagcagcatggctccgggaatgtggccgctgtcatactcgtcctgctcccgcacatccaggatgataacctcctgggagtccatcatctctttggcctcttcctgggtgatctgctggtaggagccgtcagctgcattcccgccgcatccggtcagtaacaacaaaagggaaatgagaagggggaatatacatttcatttgagttcctccagaagtttgatagcaaaggccctgtggccttgctccgtgaaatgtacgccgtcataggccagagggatgtcccaccttcccgcatcggcaaagaggatacccaactgctccgccaaagcctgacagagccgggcgaaggcacgggactcgtcaatgagctgcgggctgggtacccatgctcccagggacaccggcggcggtgcgatcagtaggatcttgttttggtctaatggaatagccgcaaggaatcgctccagcctctcagcggcctgctccggactttggccctggagcaaattattgatccccagcatgacaatcagcagatctgtgtcagcaggaaaggtgggggccgcagccggaatctcccggccattctgccccatgttgcagacggtccagccagtttcctcagccaggatatctacccatcggctgcctgcgtcatagcgcccaccgaaataacctcgggggtcatatccgtaggtgtttgagtcaccgaagcagatgacgttcattccgctcttttcctttctctggctgtcttagtaataattgaggagttctccgtttattttatagttttcagcctcgttaggatttcctcatctgctgggcaaaaatcatattgatcgatttcatccacagtaatccattggatatcattgtgctccagtttttgaggaatgcctgattgaatcaacgcattgaacagagtcagatggacggtcaggtctgaatattcgtggatgacatccataaagatatccccaacattcaatgtgaccgccagttcttccatgcactctcgtatgagtgcctgttcttttgtttcaccaggttctactttgccgccaacgaactcccataggaggcctcttgccttatgtgccgggcgctggcaaatcataaacttatcctgatcccagatcaaagctgcaactacctcagtcatttatcataccaccaatttatttgttttcatcaaaaacttcgccggaatcggtcgatccagctgccgggtaatattcatgggcctactcccgtcatgcttcacatagttggctgtgcccagaaaggtataggcacctgcaccaactgtgatccgatcggctttgagctcacggatatgcagcggaaccttgatcccacgtttccgatggtgaatatacttcatgttgcctatcttctctttggagacgtatattgtacttagtataactggaattccaaaatccgacaaggacttattggcaaacatcggcaaagctgtccggctttgatttattccatttcccatcattaaaaaatcagcttagcattatatttgtctaataaacagagatgtttttcatgtttgacaattattaaaaaatatcgttgatgcgctgccgaagatgaaatcttcattcaatagggggttggctacgcctcaacaagcaaaaacgggagggacctgcgtaagcgggtttcttcggctttggatgctttgtttgtataaagacactgtagctaaactttcttaaacactcttgtagaaatgacaaagcacaaggtgctaatttttttgagcaattgctgtcgattttacttgatttgtgactatcttggtagtaaaatggatatgactcattgtgttcttgcgtgacatgaggataatgactttatatggggctttacacaggtgtaaacacacggaatgtgtttcctctgctgtattgccctattgttacaatacaagggatcgaggtgtacggtgatgactgacagcagcgcctcctatgaaaatattttctcagagtggcttgcaaagcaagtccctcccgctcaattttctactatccattcggttttcacaaacatcaatagtttttgcttgagccgaaagattcttaaaaagcccttatttgaaacagatgatttggtgacgctctctaaggttcgtgagaccgttgaaagcaacaagatttttgcgtttatttatagaaaacagaaaagtactatgacagcggcaatgcaacattattatcgctttatcaaggaaacaaaagataaaagcagtttgattgaacctatacggatggataagtccaaaagctcggaacaggagatatccgcaagcaattcgcttcttgattttctggtggcaaacaatatctcctttatagacaatcgccaaaagaatggctgtctttggatgattggcggcgaagaactaaaagaatttgccgacaaatgctccgcttatggagtgacattccatttcaaagcggatggtgcaaaaacaacaaaacattctcctgcgtggtggacaaccgatgacttcaataactctacgaaaagagaacccactgtttcggttgcagatgcagataatgtttccgaagacaagtcgtccccaacagcctcatttgataaaaataatcgactgaagtttattgagtggctcgacaagcgtggcgtttcatccagtgacatattcgttgttctgtcttctctaaaacgctgcgcagaacgagtgaaagcagaacagattattgacgatgacatctaccatgtcatatcagcagaaacgatggaggctatttgctcttttttgcttgcagacaaggactttatcaatgctgagcgctgcagaggggatcagtttaccaatgcgctaaatctttatttggagttttttgatgagcaactaacccctccgatagctgaagtcatcgccgaaccagagacaggagtggaaccttccatcggaacgactataccgactgtatctgaaatagagatgttactgagcgaagaagttttctcaccgctcaagattgctctggcaaaagagaatatccgcacgatagaagaactcaaagccttaaagctttgggcgtttatgaatcagaagaatctctattctatttcaatgcgccagactgttcttactaaagtgcgtcagcttttagaacgagaaatagcagaaaacccggagcttctttatgagcttcattgtggaacggttgtttactctggggatacgcttgcaaaaacatttatgcatttttgcgaagacaccgctaaaaaataccctttgctgttcagatcgcttttggacaaagcaatcggtggtacttccgatattaagatatgtcgttctccggaaaacgggaatttcatcagaatggaaaatcccacttgctatatcagcacagatttaacaaagaattctgtcgttgccgctgtcgaatggattatgcagcgatgtgcgagtttaaagatgcccgtctcaatcaaagagccggaaactcttttggcgcaatcttcccatgcagaaacgacgcaaacggaatacagcaacatccaagcggcctctgtacgctcaatttcttcgctggaaagcgaaagcgcggatcccgagcaaattgcaatggttgaaaaaatcgtactcgatgccgatatggatggtgttacttacgacagcctatataatactctgagactgactatggtagcgacaaaagctcttgtccagaaatgcaagcgcattgtggaaatcaagggtaagctttaccacgaggacgcctttgttgattgggacgacggcgccaagcagatgtgcctcatcatggaaaagctgatgcaaaagaacaacggctatatttctgccgtgcagttgtatgactacgcacgagtagagatgaatatgtttctcaatgataacgctgtgaatgatgaacgctcggtttatgagattgcccagcacctgtttgaaaagaactgctttgaaggtaatcactattcatttaccggcaaggctcatatttcaaggtccgaggatgtgataagcagcaatttcgatgttatcagcaagtttgcagaggatcaaggtggcgtattccgagaagatgacctgaaggagtatctgtccggtatcggcataaagaccggaaatctcagaaatcaaatgcacattggtaaggaagcggagttcttcttctatgagccgggtacgatcatctccgctaaaagcatgcgaatcgacgacttctggaaagaaagcgttgggcgagcattgaataatctcctgaacgatgcggatgaccatatcgttcttcggcagattcagccggtttggtacgaatcgcttcctgatctgcctgggcacagacgctggacgccgttgctgctccaatttattctgcacttctatggcaaagagttcggtgcaaagacaatcatggccatgcactctcagagcatggataccctccatgccatgctggtgaaagctgacagcccgatacagaactttggcgatgccgtgatttcttatctacttgaaagcgagacagatcagcgttcctttcaggctgaggagctgcgacagcttcttgtaaaaacaggtatgattcaaggcaatgagctgatctggaatatgccgaaagccttggcaaaggacgagcgttttgcgtgggatgcgaagggtgagaatgttattgtaagggtgtgatgagatggcaagtgcaagctttacgcgggatgaagtaatactggctctggatgtgttctattcctccccaaaaggcagagtaacagcggactccgatgagatcaaggaactcagcctgctgctgaaccgcttgccgattcatccggtagaaaatagacgagctgactttaggagtccagccggcattactactcaactaataagatttcgttcaagctgtatatctggtaaaaaaggccaaaatgttggcgaattgttctttcatgttgcttttgaatacgaagatagagtaaatgaacttcactctattgcaagagcaatacgaaagaataaggaggcatttgtttctctgttcggttctccccttgaggacaatggcttcccagaaggaattcttttgggacaccttcacaacattatcgaacagcgtgacggtgcaaagttggcaatgaaagatcactgcgagatatgcaacagcagtcctgctctctgctatcgtaatgttggtcaattactccagacccatttggtagtcgctccgacacttatggattactcggaaaaatatacagccgatagttttttgaccgtatgcccaacctgccacgcagcgctgcatcgctacaggccttggctgacgaaagaaaactgtggagacgtactccgctgacaggagattagattagatgtatggatatgagtggacagacgaatatggcatatttcgtctgacgattgatgcgaaaatacaaaaggaaatccgcccggtcttccatgaagaacttgacttctttgggatggacaagtattgggattacccgaaggacacagatgctccacttctgtgggcagaaggaatccgcagatatgtaatgaatggtgtgtgtgtagccgaagcggaaggtggaggttttttcaccgttcctaaaattaagttgaataccgcagaacggataaagttggaagaaattaatatcaaacgcttaattgaagtcaaccacgcccttttggtcaacatgaagcagaaagcggttgggcttatccaaaaacaatatgagaaatattccaaactgggatattcctttatttgtgcattttctggcggaaaagattcgctggttttattagatttggtttctaaagccctggcaccaagtgagttcttggtggtatttagtaatacaggaatggaattgtcagccactttgaaagccgttgagcgagcaaagctgcattggcctcatctgcgtttcgttgaagcaaagtgccacatggagcctactgaaagttgggatgagttcggccctccaggtagaagaatgcgctggtgttgtgccgtgcataagtctgtgccaacaattttaaagttgcgtgaaatcacaggaaactataatgcgaaagcagttgtttttgatggtgtaagagctgaggaaagtgctcgcagagcaaaatatgacgaagtgagcgagggagcaaaaaatattagtcaagtcaatgtcagcccaatccacaagtggaatactgctgaactctattgctaccttttacatgagaaaatcctactcaatgacgcatacaagcttggattatttagagttggatgtatggtgtgtcctctttcgtcggactggtgggatggcatagcaaaccattactatgctgatgaaatgaggcctctgctcaatagagtagaacagtacgcgaagcgcacaaaggttgagactgaagtcgtaaagtacatagaaggcggcggttggaaagcaagaatgggtggccgcggtcttccaaatggtgggaatcgggtcgaggaaaaaatacaagagaatgccattcatttttcgattaagcaaccaacgcaagagtggttaagctgtgctccagtattgggggccgtaaccgagtttgatggtaagcgaggcactcaaaaaatatctggcattaattttaaatttaccattcaaaaagatgatgacaagatatttgtgtcctattctccattctcccaaatggatcgtttcacgatcagccatttaagaggtgttgcaaacaaaaccgctttttgcaaaggatgcaaagcgtgtatggtacaatgcccgactggagcctttaccattcaacctgatggaaagattcttattagagaagcgctttgctgtcattgttcaaattgcttgtcatttgttgagaaaagctgtctattggcaaaatctctaagcataacaggaggaacctctatggaaatgaagggaatgaatccatatcagcattttggcctgaggcaagcgtggcttgagcactatatggcagaaggaacagattgcttctcacaaggtgttttgggcactcgccaatacgatggtttaaaagcctggctcaaagaaagcaacctcttagttgcaaacaaggacaaaacactatccacgacagtgctatttgataaacttaaatctttcggaccttataacccttttacatgggctatcatttgggcaaacctggcctataattcggtaatcacgcggtggtattgcctcaacgctgagccgggggcaacctatgaaaaagctgaccttgtagtaatgattggcgaaaactactcaaagtcaaatcgtgaaaatgcaattacggcacttactgagacgctgagacagtcacccatcggctccgctctaaagcaaggcttacctattgaacttaccaaaaacaccttcgcttacttccgtgaaggctgggattatcctgacgcggttgcactcctctatgcactttacctttatgcagagcacaccggtcgaaaaacatttactttcacagagcttgccaacgctcatgcgaactctgaggcacagggcatttctccgcatgatatatacggcattgatgtcaaagacttccgtgaaaaagttcagggtcttgcaatgacctatccacagtacatccgcgtttcctttgtcgcaaacctggataacattattcttgaagactatacaagtatcgacattctcgatcttgctgagaatgaataaatgaggaggtagcagtcatgccgaacaagaagtactcggattttattgaaatcagcccaacattcgaatctgtcgttgacattgacgctgatactcgtaataaaaacctgtggcgtgagtacattgtcggtgaagacatggaaaagatgatggaggtgctgtgtcagtccctcaacaaagaggaacctgacagccgccgctccttctggatagaaggtacatacggcaccggcaaaagctatgctgctatcttgattaaacatttgatggaggatccgtctgatgttgtggattcctaccttgcagggaacagtcgcctggtgccttatcgcaaccgcttcatgaaatgccgtgcgaaagataagggagattacctcgttatctggaaaacaggctgtaccggcatccgtgacggaaatgccatgcttatggaggctgagaaagctgtccgtgaagcacttgccgccaagttcggtgataaggcagactacggcgagtcttcgttgcaagatgccgtcatgcagcaggttaacagccccgtacataattgggaatacatactggaaaactccgttctgggtgacgattacagcagcgtcgaggagttgcgagaaagccttgaagctggtgatctccttgctcttcagaagacggctgccgttatccgtcagtataattgggggctggttgacagccttgataccttcaaaaagtggatctctgccgttattgagaacaacggactttcaaagtccggcatattcttcatctgggatgagttcactgagtatgtcgcaaacagcgatgagcagacgattctccagcaactctccgagttctgcaaggtacagccgttcttcatgctttttgtagttcatcgcaccaccgcaatggtagaacgcattacgccggaacggtatcagctgattacacaccgtttccatcatgtggagttccatatcagcacagatgctgctttcgacctgattgctggctccatcaacattcgcaacggcatgagtgagcactggaaagaggaacgcaagagagttatccaaaatattcaggccttcctccccgatatgtctggtttggatgacaaaatcagcgagcagatcgagcacctttgcccgatgcaccccatgacgatcaagctcctttctcgcgtagccgagaactatgcagcttcccagcgcacaatgttccggtttatgaaagatcaatccaacagtgagcatggcttcgtgggctatatcaacaaggaaggcccagattctcaggcttgttggctgacacccgaatggctctgggattacttcttcactcgcgaaagtgatttctccgataaggatacgaaggctgcggaatacatccggcattacgaagaaagtcgtcacttggtcgaaaacgatgtgaacgcccatcgcgtattcaagactgctatgctcctgctggctcttatgtcttctacgaaggggatttacagtggtcgaagggcaaaggacggcattgccgccacaaaagactgccttgaaacttgtttggccggtgttatgggcaagacacaaatcgaagatatgcttcagacaatggtcgatggcaagatccttgttctggatgaaggttctaataacattgtccgtattcagctgcctttccgcggtgcaggtgacactgacttcaccgcacggcttgcggcaaatgataagaaatacagcagatatatgatgttctccaaagatggggcgtttgcacaggcgtttgagaagcaggcttgggatgcaaacgatgccaccctgcggcgtatgaagattgctgtctgctgcgctgaaaccaattctatcaatacccgcttaggtgagatcacaaaggaacttgaaaagtgcccctataaacttggcttacttatcgtgacagtacagagcgacgcacaggccgtatcaattcagtcagttttgcaggcgaaagctgccgaaacaagcgaaccgcgccttacaatcgctctcgtaaaaacgccgctcaccgatgaaaaccgcacaaaatggttgacggccattacaaagcaagaaatggcttccgattccggtcagaccggttccgttcagcactatcgcatggaagcgtccaccatcatcagttcttgggttggtggtgctgtcagcggtggaaagatcattgcctacaatggtaatagcgtctttaatagcatatacggaatggcacatctccgaaaaataattcgttccaatgttcaggatgtgatttttaagtatgcgccggagaacatcgttgtaaccaataccgcctataaagcttgtaacgacggagctcctactgctggtatccagcgcaaaagcggaaatagccagctcaccaatgtgttaaacgctctgaaacttgcaggtattctcgacctcactacgattggggagattgttaatacaaaaaacagcggtaataaacaggccgagtgtgttgcagcactggcagaactcataaaaaacgagatggaatccgggcacaaggttaacctcggggacttgtgggcaacgctccagaaggagccctacggctactacaacacgattgcctgcggagttttgctcggctttgtgttctcttgctataagaacagcaaatacacctggacagactcggttcagtctccccatgtcctcgcagaagcaaccatagggaaaatggtgtcttctatgtgtggaggaaaaatgacaaccgattatctgtctgccggttctcttacatggcagaacttcagcgagtacctttccaagatttttaacctttctgtagcccagctcgcagaacagacttctggttatcataatgtgcgtgaagcggttgtgaaaagtggctcgccattctgggttttaaagtaccttccggaaactgaatggagtagcgaggaccttagaaatacagctgacaaagtaatcgaccatattcagaccttcatagctcaagagggtgatattgagggcgcaatgagcgaaacattgcagcttcttaccggtcgcggaaaaatccgtattgttctggcaaaagcatttcaggataagaatgcaatggcagctgccttccgctctttcctctttgcagcttcccctgaactaaaagatgtggcaacgagacttgctattcagccggaggaattaagcgatcgcctgcactctgttatgcagggagcaatctatacctggacagaggaacaagtcaaggataagcttgcggatgtcgcagagcaatataaatacctggaagcaattggcaaggttcagggaacgacctatcatagcatagaggctgccagaaaagacttggcaaatctctttaacttcctgagaatcccgatgagcgcaatcgctgaacttaacaagccgtggttctctgcgctacaagtcttatacaatgtggcttatactgatgtagtccatttaagtgcagaagatcgaaatgccgccatcctcactcttgagcagcatggtgtgctggctaaagactgtttgcagaatggaaagcctgtgcttgaagacatactgaacagtcgcaacatcgaatgcacacaagatgagctcacggctgtatatgccggtatgaaagatctgaattgtaacacgactctgactcagtttaatagagagctggacgcgcagatcaataaaatcagctttgcacgaaataagtctacgcttttggagacttggcgtttaataaccggagaagattccataaaggaatggtgcaacacgcacgatgtacctttaatgtggattgtcccaaaagagctgaccaaagcatttagcacattgctggatgttcaaaacggcaactatacggttgacgctgccgttacaagtgcaatccattctttgcagaagatggatacgagcattttgacggataacagccgtattgaaaaagcttttatggctttgatcggttccgagtattcccttttgtgggatgtaaatcgcgttgccattattactgaggcaaaaattaaaattgggaacgacatgagcacatggacagcagccgatcttactacgctgcaaggtattctcaagcggatgcagcaggaaaaggctaaaaaagaaaaactggtcggaacaaagaacaatgtccgcaccatgcaggaatctgttttgagggaccgggttacagcatttcttgatgcgcaccctgaattctgcgacgaattttctgaataagggaaggaggcaagcagcatgacaattaaagaagttgtatccatacttcagaaggaaaaactgaacaacctaccttcccgctttccttgtcgtgccatcatggtcaacaccgttgagcagtattgccagctgctctcagagttaaagaagatcagtgatattcgggtcgttaagacaaatgagattttttcaagtgccgatgttatgcccaaatactctaacctttctgccgccgcataccgtgacgaatgggttattctgaccggtgtgagcgaatatctacgtcttttctccaaaaaggaagctactgacaggagatttgctgctctttggagcagtcaagtcccggcaagcagccttgggcggatcattattcctctatggggatgtgaagcacagtggtttgattctgccattaacttgaacggtgatttacggcaagaggattttttctttgactgtaccgatgacgaacagcaagatcaggaaatgaatctacttgtattgtctggcatgtttgagcaacacatatcggaatttaagcagggctctggcaccttgtgtgttggccttcaggagtggttcgagtattgggaaaatccttctgtttcaaacacaaaatttgtgttactgaccaaacggtttaatagtattacctcgatcagtgggaaaattaatgttcatgtagtgaatgataccttgtcatttattcaagaaaatatgcccggaggtcagtgcctgacaaaagaaaactgttctgatgaaatgcggtcggtgctctttgcatatgctttgcaaggcgtatcattggatgactcgcttctcaaaatactgaatgtatcgtcgttttccggtgttgatattatgggtaaatggaatgcgttgtccattagccacaagaaattcgttaaactctggtttcaaattcacccggacaacagttacctgagctactgttttactgttgctcgttccattaccgatattccttcagtcatctctcatgagatatttgagaagcgcattgacaagccggattgggttgatgagttcaaggcacttgcttcggttatgacaataaagcccgatcctgactattttgaggctgttgacgcaatacctgagtttgagaaacggctggattatatcacaaacgccatacgcgaagaaagaatttaccttctcaaaatggtcggccagtggatgcgtaaagatgcagagcaggtcaatggaagcgtcaagttgaaagaaacatttcctgcgctttccgcatatttgtcgcacgatttggatgtatttcaaagcgacatcggtgcgtatatgtcaagatacaaagcgcacaagcttgaaaacaccctgccaagcgacgaaatgctgtactttagcggggcaaatacatcgtcctttgactatcgttatgcagttctttcagaatatgaagatgacgatacgattatcctttgggtggacgcccttggtatcgaatggcttcctctcttatattgggggattgccaataattgcgacggcaccatcacaaatgttgcgttagcacaagcgacattacctacagagacaagctttaacgagcaatggaatagtatgtcgatgccgtataagaagctgaataagcttgacaagttggcacataaaggcgtaattgatgagccggattactatacttgcatcgaagaacagatggatttcgtgacaggaattagcaaccaagtctcttcgttactggcagagtatcgtcgtgtggtgattacaggagatcacggcaccagtcgtctcgcagctcgctttttccattgcagagatggtgtcgatgttccgcaagatgccattgtgtatagtcatggaagatactgcaaattgccacagaattcaacgttatcccttcccaatgtggaaatcgtcaaggatgcccgcggggacagatatgcggtgttcagcaattatgaccactttaagcagtctggatttgccgccggtgcggatgatgagaatgctatctatggtgaggttcatggtggcgcaacaccagaagaaatgctggttcctgtaattgtagttgaaagcaataaagaagctcagattgtgggttcatgggaaaagcaaactgttaaaatatcaatgaaaaaagcaaagctgtctatttcttttaataggcaaattgagaacctttcagtgaaaatggcgggcatccaggcaaccgtttcgaaaattgatgcagggaaaacttgggctgtcgtattccctggtgccaaagcaggcacataccctgttgaagtaaacgcagacggtcgaattgtcagcttgcctgatattactctactttcggctcttggtggcggggatggtgatttgccatgagcaaaaaagtgtgttgcgattgcggaaagtcactaaaaaaagatgagatcgctctgtctaaaaagttgatagatgttgatacagaagatttttattgcctgccgtgtatggctgaatatttcggctgtgatgaggacgagctaaaaatcaaaatcagagagttcaaagaacaaggctgtacattattcctttgagggggttgaatcatgctggaagataaggtaaaagaaatatttgctgatatggttgtactaaaagaccctcaaaggagcgaatacttttcaaatctcagtatgccttcctatatgcgcgattggctggtcatgaagttttcggatgacgatggtattgtcgattatgatagtatcaacagatacatcaagagattcatccctggaaaggacgattttgagcagtacaagttccagatgatcaacggtgatacggttcagttccttgcgcgagtccgcgttaatgtggacataaaaagcggtaagactaaatttgagttgccggactttggtggggcaaaaggtggcgcttccggaacggttgcaaatgaagtcgttgaagaatggcaagctacactgctacatgaaagcgaaaactggggcatcattactctggtttggacgcttgagggaacagcatctaagccaaagggtgtaatctccatggtcggatataaaccattttgcccgtattctatcgaccttgatttctttagagacgctcggaaagagtttgatattcatgaatggatagatattgtcctcatggcggtggactataatcctgccggatatgtggatgagaatggtgtagagagtgaggccaaaaaactgttctttttacgccgtttactaccgtttgtggaaaaaagagtgaacctgattgaacttgcccccaaagggaccgggaaaagctatgtctttgaaaagattagcaagagggggtggcttatcagcggaggtactgtatctcgcgcctcacttatttatgacaatgcaaaaaagaccggcggtctgctaactcgatttgactatgttggctttgacgaggtgcaatctattacctttgagcagcccggacaaatacagcaagcgttaaagcattatatggagtttggcgagatcaaagggtttgatgctgcacttacagccgaagccggggtaattgttctcggaaacatcaatgctgaacgtttcgacataaacaaaaatatggtagaacatatcagcgaagtttttggcgaatcggctactttggacagattccacggatttattcctggttgggagattccgcgcatgactactggtatgattgctcacggttgggcactcaacacagaatattttgcagaagtgcttcacgaactccggagtgatctctcgtatgcctctactgttgattccctgatttcctacaaatcaaatgcggataaaagagacttgaccgcaataaaacgcctttgcacagcgtttttgaagctgctatttcctcatgttcaatcaccggatgatattagcaaagaggattttgaacactattgtcttgaacctgcacttgaaatgcgaggagttattaagaagcaactatgtattattgatcccaaggagtttaatgttccgggcaagaacacgataccggaagttacttatagtcgctgaggtgatgatatgagccatgtgatctatgcagataatgcagctacaacaaaacttgatatggatgcctttgaagcaatgcgcccttatttgctggatcaatatgccaatgcgtcacagccatattcattcgcgaggcaggcgaaaaaagcccttcaagagtccagagccaaaattgcagcttgtatcaacgcagagccagaggagatatatttcacttccggtggcactgaaagcgataactgggctattaagggcagcgttgagtatggagaccatcgcgcagtaatcacttcagagttcgagcatcatgctattcttcgcgcctgcgcaaagattgaaacactgggctatccggtggtatatttgcgtccgaataaagagggtttcattacaccggataatcttgaaactacgatctctgaccaaacaaagcttgtttccattatgatggtaaacaatgaaatcggaaccatacaaccgattaaagaactctgcaatgttgcccataatcatggggctgtattccacaccgatgcggttcaagctcttggtcacatccctgtggatgtaaaagctcttggtatcgatatgatgtcgtgttctgcgcataagttcaatggccctaaaggagttggattcctgtttatcaaaaagggcactaacctttctgcatatgccgacggaggtgcgcaggagtttggattacgagcaggaacagagaatgttgcttcgatagttggaatgtccgtagctcttcagaaaaatgttgctcgtcttagtgattttcaaagcagacttctatcattggagcaagtacttactgataagctcaattcagcagcaataaactatcgtcgtaacggcacaacgccccgtgttccgggcaatctcagcctttcctttccatatgcagatggtgaagccattcttcatcgtcttgacctaatgggcattatggtttcaacgggatctgcttgtgatagcaagaacacacaaatttctcatgttcttcacgctatcaatgctgatgaactgtatgcaaagggaacagttcgtatctccctcggaaaagataacactgtgaatgaagcagaaaagatagcggatgcaatcataaaaattgtatctcaaaaacggtagagttgaagtgagaaaacgaaggagcgcgtacatggaaaacaggtccaaactcaggattctttacctctatcaatacttagttcagaatacgacatctgaacagcctgcatcaacggttgaattaactaagatgttaagagatgaatatggtattgatgttagccgcaacacaattagcgatgatttagcaatgctatgtgccgcacaatttcaaataaaaatgattcgctcgacccaaaataagtattattatgatgggcaagccttcgacattcctgaaatgaagctgttgattgatgcggttttgtcgtcccgttttattaccgagcgcaaaagtgaagtattagtcaacaagttgctttctttagtgcagcaggatgatgccttcaaactccgtagacacatatatgcttcaaatagggttagatctgaaaacgagtgtggctatttgatagttgacgcaataaatgatgcgatagacactcgccataagattgcgttctattacactgatttggatgttgccaagaatcggcatttgacaaatggtgggcaagaatatattgtcagtccatatgcactcatttgggacggcaacttctattatctccatggtttttgcgacaacagaaacgcattgcgttcatttcgcgcagatcgaattgagggcgttcctacgatattacgtgatttgattgtacccaaaccagacaactacagcattacggaatatagtaagtccattttccgtgtgtatgacactgataagccggtaatggtttcattgaaatgcgatgccacggcaatgagtgctgtggtagatatgttcggcgttgatgttgatacaaagccaataaatgaaaaggcgtttaccgcaaatgttcgcgtttgcccaagttccgcattttatagctgggtattctgctttcacggacttattaagattcagagccccgcatcaatagtgcaggagtataaatccatattggagaatgaacttaaagattaaaagtttcgcttgtagccaagtagtcgacaaactaaccacttataaaaaatccctcgtttatgaggtcatgaccgggaagaaagaggtgtaagtgatgccccgaagctcgttcatgtatttgtttaaaaagcagcaactcaattttataaccgaacttgataaaattagaggcatctactttgataggttgaaaaaagccatatctgctgatccagagaaagaagcaagagagtatggagaaggtaaatggacgcagataatggaacaaccatgtggtgaagactatcctgatccgagcaatttagcggagcaagtagaatatgaatcctatctctattatgacctactggaaaagactaattatcggcttcttgccatgtgggtttgctgcttatatgagacatgggaacagcaggtgctttgttttatacggcaggaaattagtaatggcgatttgtaccaagaaaggctgccacaaaaatatgaaggtattgagaagttatggaagaactatggaatggatatccgagaatggaattgctggcccaaactaaatgaatgtagacttgtcactaacaccattaagcatagtgaaggtcaatcagaagaagcccttagagcagtgcgagcggagttatttaagttccaaaattcaatccataataaggaaattgatagattaagattatatcattctactcttagtgaggtaacattaaacattacagagcaggatttgaacgactatgcagatgcgcttatagacttttggcggtcaattcctgtcgatcaatacatgactattataagctgataacatagcacttgagaaatacgagtgccctcttaaacgagtgtatgatatagtgcagacggttatgagtcaatgtgaaatgtggacagataatgttatgagcgccagaacaggacaacccgtgtcccaccgctttttaggataagcatcttgtggcaagcaatgctccgggagaaccattcagcgctcggcactactcattgagagcctccctccttcatcttgaacacagaatattattctgtaactacgcgtctgttggatgcttttagccggggcgtattctttgtataggcgtgttaaaaattgatacgcctgactcgaaaaaacctcttgcttctcagtctctgcagaggtacaataccccaaacctgaacatgaaaaagagcccttctgaacaggcggcggcggttataccgcgcctggtcaagaagggctctttgaccacatgtttgaccacagacagcgtcggaacactcggaaacagtggaattaagagcgtcaaagagtgagcgaaatgtagcgaaaatagttaaaacccattagaaacaaccagaaaaaatttagttcaaccgtttgggagcaagctaaggctggttcgactccagtcactcggaccatgcggagtgtccttataggatttgagtatcctgtaacggacactccgcatttttattttctgaaaaattcatacagcgatttgtgccggggcgtagctgacagctacgccttttcttgtttccatgatgatgtcagcctcggggattttcttgcggtctggcacttcaaaggctccgatacaattatagtggataaccacctgctgattggtcacgccatcctacttttcggcatggtacacatcaatgtggtcaatgagttcagacaccatgcgccgggtgattttcgttacatgagtatatcgccgcactattgccaagaagtcctccatgtccatctgctgtccctcagcctttttcagttccagccgtagggtattgacctttgcgccgatctcgccctgctcctgctcgtaccgctttgacattctggcaaaacgggaatcgtcaatctttcccgctacattgtcctcatacagtctttcaaagagcatatccagttccttgtcacggatcagtaatgtattgagttcccgctgttttcttgcacggtcattttcagccacctttgcagaacggcccagcatggcttttacaaattcactctcatactcattggcaaaggccgccagacggttgacctcatacaataccacctgttccagaaaatccagacggatgtagtgtgtcgctgaacatttccgcaagccagagttgtgattttgacaactaaaaaacttaatgtcgtggtttttctgattgaaatggaagttgagattgccgccgcactcgggacatttcagccgcccggaaaatacgctgggctcttgggtaacagtcggctttttgcgccgtgtgcctttctgcaaagtctgtaccttttcccatgtgacccggtcaatgatcggctcatggacattgaggaagatggcccggttttcctccgggttttcaatgcgccgcttcatcttgtaggatttggagtagcttttgaagttgatgacatcgccgcagtattcctgcaaggtgaggattttcttgacggtggtatgtccccatttggtaggctccaaggtacttttggagccactgcgtttgacgcccttgttccgccagtagtaagttggattgacgatcccatccttgcccaaggcgtttgcaatttcagccagtccatacccctccaaggccatatcatagatacgccgcaccacatcagcggcctccgggtcgatcacccaaaatcggggatcgtcgggatctttgatatatccatagggcggctgggacagcgggatgcccgcgttgcctttcatcttgttgacaattttccgcttcttggaaatgtccttggcgtaccactcgttcataatgttgcggaacggggtaaattcattgtccccctcatcactatccacgccatcggaaacggcgaccaagcgcacatcgtactgcgggaaaaactcctccgtcagcttgccaacctctatgtagttgcgacccacccgggagaggtctttaacaaacacggcagagatatacccggcctcgatagcggtcagcattttctgaaatccggggcgcttcatggtggtgccggtaatgccatcgtctacgaaaaacaaggtatctgtatagcctttttcccgtgctacctttaggcatgtcaaatggtctgctgtacgacggcttttttcttttgccgtcgtacggcagattgtgctttaattaaacttcaaatgtcggtcgcaataagctgtaccagcaaccgttataagggcaatacccgaaataaccataatccatcgcaaggggattgtatcagccagcggcccgaacagagccatgccgatcggataacaacttgaatagagcgaactcataaggccaaatacacgcccctgcatagaggcttccgagttttcctgtaacatggtcgtaatggtagtttgtaccgtggtcaatgcaattccatacaacgccattaaaacaaggtacagtataaaatggcggctgacacccatgccgattgccattgtgccaaacatcaccacccctgtcaccaatgttaatctacgacttttgaaaccgccccaaatgctcataaagagaccgcccagcatcatcccgccaaagccaaccagttcaactgccgtcaaataccagtaagtatctccgaaaacacggctcacaagtaagccggataagtagcctgccgggactgtaaggaaaacaaacaggccgtagatgacgagtgttttacgaacaaccatgcaggaatgagcataccgaataccaacgcctatatccgccagaacagatgtcatttcctgtgctttttcttgcttggggagtaggatgcaagaaaacacaccgatgccaatgatggcagttaatatatcaatcagaagtgtggctcgaagtgtactcattgtcagcaccacagccgcagcaaccggtgcaccaaactgtacgacagactgcatagttgcgttaatgccgttataacgcataagatgttcttcgggaacaagctgcggaatgactgcgttgaccgccggattttgaacgccggcaccagcggagcgaatgatcgacatgagcagtaatgctgtaagtagcataggttctgctgtaatgtacggcatgattagcaacattgccaatgtgacagccgcaatcagcgcatctgctccgatgatgagatatttcctgttatagcgatccgcccaaacgcctcctataaatgaaacgaaaaattgcggaagataagagcagaccgaaaaagccgctacccacgcaccgctgtttgtttgcaaagtcacataccatacgattgccatttgaacgatttgcgagccgaacagcgtaatacattgactggcaaaaaacagaatggttctctttctccaattactttgtgattccatcattcttgtatatcctccatatatttgggaggaagcacaaagcgctgtgtcggatagccaaattctatcagcaattctctttcggcaaagccaagctgttttaatacatcacgatggcctgtatcagccttgtcgccttctcgataggtggtcatgctaatttcctgtccgggcaagtatatttccataagcgcatccaaaaataacttttgaatgccttgcttgcggtattgtgggtttatgcccaaaaaatcaatacagccggagtaatcagaaaacgccatagctccaaccaaaatattgccatcttttaggacaagagctcgtttttcatctatgctttttgttatcgcattcaaatagtctgcttcattcatgaccgggtatccgtcgatcaccagccgcattaaattcatccatgccggaatatccgctttttctgccaaacaaatgtcatccttggcaaacaccttgtttgccgcatttctgtgcaaagcaaatcgtaattgcaaaggataaaattcccggttatcccggtattccgcagggggaattttatacattgacttaaaggcagaagaaaacgcctgttgactttcataaccgcagataaaggcgacttcaataatcggtctatctgaaaacaccaaaagttttgcggcttcggtcaactgacggcgctgcacataatcatgaattgtcatgcctactgtgctggtgaacatacggtgcaggtgatactttgaatagtgaactgcttcagcaaccatttccagatctagcttgccgtcaagattggcttcaatatagtcaatgactgtttcaatactcattacagtcttgttctccattttgctttcctcctttctggcatataggataacaaaaatcgggctgaaacctttcataattcttgcggttttcacgcgcaggactaattttatctcttttggccgttccaatcaagaatgtaaatagctacgctatattttgcgccgttttaagggacattccttaacggcaagcagggcaagtgtagccacacttgcgtttttggcaagcaattcgagtgtgaacacactcgatatttttgcgccgtcgggcggcaaaaatgcttgccaaaatacttgttggggagcctccccaaacccggctggctgcggcccggtgctgacgctccgggccttaactttgggacaaaatgtcccaaagcaaaaatgccggggaacagccaaaactgttccccggcagatcggaaaatgtggaaagtatttagcaatatccgtgcatgacatataatcgtattaccccctcaaaaaccgaggctggaaacccttgcaaacagggcgttttttcgggctaaatgtccacacatcagtcctgcttttttaaggtgctcccggtagcagaaaagacagccgatccccttccaataaggacaccccgcacaaggcgttccttccggtgccttctgcggggcgggtgtttctggatgggggatctctttcatcatgcgctcatagggactgttggtaaagttcataagtcaacctccgttcatgttcaacccaatccccccaccctttcccagtcatgggaaagggtgcggttctggaggattcatcccccgtcacgccgctggaaaatagaacagccggggccgccagtcaagggcaagccgccgataaacggcggtgctgatgcacccttgacggacagctcccggctgttctgaacgatatgcggcgacgggggatataccacccgagccatgtttgggggggaacggtttgggacaatttgtcccgaagttaaatcgtatatcttggcgaatagaacactgttgtaaagccaatacaaaacggtaaattagttgaaaaatgtatattgttggggtaatatatgtataccagaccatagaacacattcaagatagtggggtgcaaccatgattaatactttggatgatattatttctgctgttgaaacagtatcaagttcaattcctcaaatttcggacacaactaatttttggatggtgcgctccaagcaaggcgttttttacaacgaatatgttgctgggggatatattgctattgggtggaaccctctaaccgaggcggttttatcgggtagccatgatgacgattactataagcaaatccttaaggacagtaactatccggataaaatgcccggaactgcccttaataaatgccgtcgttttatagaggagataaagtctggcgacattgcgatgatcgtcggaagatctgaaatcgcatttgctaccattggtgattactttgaggttgatttggacaccgcaacagcagaaaaagagttagagatccatacccaaatcgaaacaggaacgtacttagggctgaattgcccatataaaaagcggcggcatatttctatcatatcaaaagttgatttgagctctgcacctcccatggtctacaaatgcctggtttccaaccgtcacagcttgagctctctaaacgagtatgctgacgctatcttaagctgctgttatgatttgtccgtctactctaaccgcttaatcatcaagtatcatattagacagcccagagatattaacccctttgatttttcactgttcaccttatccatggcggacttaatctcagatgatcggcgtgaattaaccggaaaatataatttaaactctgaaggcgatgtagttttcttcctcacaaacttcggacaagatattcttgttttcttgaaagaccacctcgtccccatcttattaggatattttattctgtttggaggaaaagccgctggaattgaatttccgtcctctatagaaaaaatcaaagacctcgtggctgattttctttacagaaaagaaacaaggcggattaaagtagctgaagctgataaagcagaagccgaagcagaaaaagccaaagtggatgcagaacgcagtcgttttgaattagaagaactgaaaaaacaggcccaagaaaaagccagtcaaactgtagaaaaccttactcgtgccgcagtaccacttaacattaagcctccggcaaataatattattgatattacggcactttttcaaattgacgacgaaaccgagtaatactaatatcgtgaaatactgattgccaacgacccgaataccatttttgttgttcgtaatttcgtggaatcctataattccactccgaccatgggtgagtcctataagggcccacccattttttaataatttgcaaattagttttgaaagtggtacagaaatgtactacttttttctttttgctgcctatatgtagaagtctgattttacatgataggtggaaatatgatatactacaaacgacatacaggaaagctgctgccgcagaaaacggcagagcagccaaactgggtccaatggacgcaccattcagagggcaaaacgcactgcgaggaatgtttgaggctggatggctgttggtttcaggaagaaaaagccccgccttgtccgcatcatcctttttgccattgcacactggatcctattccgtacgctgtagtgtttggtaatgtttcagtatacagcgattatggtaaatttgatccctatttatttaacacaaccggtctgcagacacacaataaagaaaaactcttcaaagaatggggatatactgttgacgatgcaagatggctgcaagcagagatagaacggcaagggagggaaagatatctctctgggcaatatgagcttggaaagctaaatatgtttggacaaagaatcaatatcagagtaactattccaaggaaaaatggcttcggcgatatttcttttgtcacaggttagattgtgaaacccaacggacagataaaactgaatacaccatacagaggtaaataatatgacatacatggatcatgtagaagttatcgtcgaaaaagaaatgtacgcaagagatggtgttcataaaggcatgcaagggtggatcactgaaccagaaaacatcaacggatattggttggttaattttcctcagtgcggtgaaaagaatgatattgctacaattcctgtcagagaagaagatgtgaaagtagtaaaaatccttgatgcacatgtgaacgagcgcattaaggtgcaatttggaaaagaagtcgatcagacaaaatcatttgccgaaaagccggatgatctttctgactatcgcatttgataggataaaaaccttttgcctgctgcttccaaatcattgatatgactggatttttccaagtcctatcattacattccgaccaaaccccctctggagcgaactccagagggggtatctttgtttatgcgccgcaatttctgagtttatttcagccccaactcactacgaatctcgtcataatatttccgtaccgtgttcctgtctgtccccaccgccttggcgatggcgctcttgctggtaacctccggatgctcccgcatataggcggcgatgactttcttcttctcactgatcccgtccggaatagcatccaggtttctgctctccttgatggccttgatctccgccttcatctgttcgattagcccaggcaggagcgcctcacactcctcccgtgttttagcgtacacattacgggagtgctttttgccgtccggccacattggggagtagcgtccctcccagcagttttcgctgatctgggtgatacagccggtgccgggcttccgtttccttcctgcatagggctggaatgtggtcatcgtccgcttctcttgcggctccgcaggtaattcctgcggagccgctttccctattttctggtcgattttggccgctgcctcagaccgcatgggatttgtgatgtgggtgtagatgtccagcgtggtggccgccgaaacatggcccggcatggcagagagggtcttcacatccatcccgtttccaagagcgatggtggcaaaggtatgccgtaaatcatggaaacgaatttgcttacactgggcgtgttccaggatgaggtgtagccgcgttctgatgtaggccgggtccagaggcgagtcctccttcaccggcgcggggaacatccaccgggagtttacgctctccttgtactctttcagaatgttcagaagcgtcggaggcaggctgaccgtgcggatggaggatttcgttttgggcttggaaatcaggagcccgtcctcctttgtccggtagacctgcttggtgacttgtagttctccggtctccagattcaggtcatcccattgcagggccagcagttctccccgccgcaggccggtggtcagttccagcaggaacagctcgaagtacccctccgcctttgcgtggatcagaaaccgctggatctcctcacgggtcagcacctgcatctcccgtgctttcttgggcggcagtttgcatccgacggcggggttcatgcggatcagcccctcctgcactgccttctccaaagcggaccggcagttcatgtggcaggcccgcaccatgcggtcggacagccccttgccgtagtgttccgcgtggaggagccgtccgctctttttcagtcgggcgtagaactgctgcaggtcattctgtgtcagctgatccagagggatgtttcccagttccgagataatgtgccgatagatcctgccctcatagcccgaacgggtggtgggtcgaagcttcggcttagagtagttctgataccagaagtccatccactctccgaagggcatttcgagcttaatcttgtctgacttgggtggagcgtactgctcctgcaactgcttcagcttctctacgcattcgctctttgtcttggccaagacattcttggtcttgggaaggttcttttcatcgtagccgatgaccacccggccctcccagctgccgtcttccttttttcgtaccatgccgtcgccggatggcctgcgttttgccatgatgatgtacctcctttgcagcaacacaacatatcccagaaagagagaactatccaggggcacggcgaactgttatcaaaaaagttatcatttggggtagcgaacacagtggcaatcaatcaaaaatttttctgtgataaaccaaaatatatacatttttacaaaaattgaccatcataagcagcgacgagaattctttaaaaaaacaaaagcacgaaaaacactcaaaaataggcataaaggctttgatttctcttgcaataattgaattcttggagaattggagcttgtttgtagcccacttttttactcatctcttgatagtatgtctcaagggcttttttgaatatgctttatagtgcttattctttgtatattgcgtgctaaaaattggtacgcccgttgtcagtcatcatctatgtgttttcctaacagagaacagtttctgggattttatcaattcaagttttagttgataatttccatgtaattaggtatgatggaaaagaaccatccgaccttatggtttgaaagaagcaactaaccatatataaaagtatcacaagcaacttacactgtacgcatgggatcatgcgtgatgtaggcggaagtttttgggagatgcacacgaatcagttaaagataactttatttctatataaaaatggattttgtgtgtggcggaaaccacatctgggggtggatgtggtttctttcttgcggcctttttgcgccttgcgataacctgtctaagtgacaggttatcgcagggcgcttttctatcttcgaaaaggagtccgagaatatgagcctgaaatacacctgcctcggctgtgggacacccttgggttacgagggactgtgctggaaatgcgagtgcgagaaaagccgaaaaaccgcgctgggatggatgccggaacaaatcgcagagaagcagaaaaatctgattcagaatatccagcggctggcggatatggaagacccggagtttaccgacttctggcagcttttaggctaccgggatgccattaccccggagatccaacgggcagcactggctgtagagggattctatccctgcgaactctattacggagcaccggatgatgtacgggatgcgctgatcaccgctttactggaaacggatagctcccaaaatgctgccgaactgatgtcctgccttgccttccagggagatgacaaggcaatggagactctgctggaactggagcggaacccccggccctggcgcaagagtctctatgtggatccgtccagctatgcccagtgcggaggctggacctttgataaggatggccatcggacgcagctcaacttcaatacctgctatcctatggtcaagggggcgaccgacgaagcgtctcccgttcgcattggacgggcacgggaggacacctgtccccactgtggcgggcatatggtggatatgctggtgctggatgggcgggatgagcggctgaagttcttggggctggacggtattctgacggccacctgctgtcccaactgcgtgggtttcctgaaaggccccgccttcaaccgctttaccctggacggcggcgtggaggtctttccctcggagctctttgacggggcggaggggataaaatgctatgtccggccagaggactataaggcactcaccgaaaattcttttgtgctggccaaaacacctgtgcccctgttttacggcgccgcctgcggcgatgtgaacaccattggcggctttgccaactgggtgcaggacgcggaatataccatctgcccccactgcggaaagcccatgaagtatctggcccaggtccagtgggatacggtgtatgactgtgcggagggaacgctctatgtggagttctgtccggattgccaaatcctatccatgcagcatcagcagacctgagaggagcgcatgcgatgagtttgccaaagcgtgacggcgtgaagggccgctactacctgatccacaagccggatacttctccagaggtgctggcggaggcggatctctgtatccaggatgttctggacggcactgctcgtgaaaatcactccgattacccgaccgtggtgcgaaaccacaacggaacgccctttctccctgatcagctgctggagcggtatctttcccggctgccgctgaagggatttccctgcgaggatgcggtttccctctgcgatgccatgcggcggctggtttgctgggaggagattcgctatgagttggagaagtacatagaaaagcaggtgcaggagcggctcttccttgtgggagagcgggaagatgggtttaccgtctttccgccctgcacggtgtgtccggaattgcgcctggaggatgtggacgaagggctgctgcgctttgcctgctatgtggcagtctgccacaccgtgtatgggcagagttttgagtctctcaaaaccgaacacatcctcggcctggtttcccagctccgtcccgacatggtaaaagaactgaaaaccaatggcagcggcaaattgccgcctaacatccaaacgcggaaaacaaagcacctgaccgcctcggccaatgatgcgtttgccaccgtccgcatcaccgccagggactgcacagaggagtgctatgcggaagtcttggactatctgtgtgcggtgctggagcaggaggaattcccccgcagttactcggtggagttccgtggctcagagaaaaactatctgcccattcctggacttcctaaaaagggagttaatcagttctttgcctgtgctgtccaataccccaaattacacgccgatattgagcggtatgcacggctggccatgcgggagtatgaatggtacaacaacctctccgatgaatcctgcgccatgcccggaaccttcgccgtgtttgctctgggactggaaggagaacagtgggcaccgctcgtgacggagtatctggatctctgcgacgacgagcactcctccctgcaagagaaattccttcatgcctttatccggaagtttggttttcaaccatggacactgggggtattggttcggggcgcattgtctatgcagtggatgaagcctgccaaggaattccgcagtctgattgccaatgcggaaagcctggatgctctactggcagtcaagtgccgcttttccgcttatctcctgtcagaagaaaataaggacccgaaattccgggccatcgcttggcagagcctactctgggccatctggggtccgtcctccgaaaacggtggcagcaaggtcatcaaagcggccccagaagaattgagagagaaataccggcaggtatttgcgtgaggagaacaccatgaaaaagagaaaagtcaaggactttattgccctgtacgccccggaagatgaggaaaagctggtgctgatccaaagcggcaccagcgcggacaagacctttctggatactttctggacggcgcatacccatgccctcgccatggcggatgtccagaccggacaggtgctctccggccgatgctgcctgagctggccgctgacggacaagggaagggaatccggtgactattccaagcggtttgccaagggcaacatctatcggatcaagacccgcggctggaaaggcgttgcactcagcgaaccccagtggtatgtcacggaggtactggaggaaggtgtatcctgtccggcactggagaagctctgggcggagtacacaaagcccatccttttggaagatgaagtgctggggacgctcacgctggatcgcgagatgagcacattcgatggaacctgccagtggatggggaaagaagtccggatctcgttggatgtggagatcgaaaagaaagcatcctggacccgcgtcaccaatgtaatgaagaaactgctggcagatcaggaagtctgggacaagtccctgcgggcgatggccgctcagacgctcactgctcaggccaacgaatggctggcagacaatgaccagaccgaccgggccccggagaaggaccccatcaccgaggaggagttcgcccggcgcatcctcatcaccgagttcacagtttctccgggcggcggttttaccgcctggtatgaggacgacgatatgttctggggccatgtggtcactgtggatggaatactgaaaaaggggcccattggtgcggatatgcagggataaagagaggagaaacctgaatgaacagtgagcagattacagcctttttgcaggagcattggagctgggtgacactgatcatcggcgctgtcctgctgattggtgcgatcatgagctggaactggctctgcgaccccaccggcaagccggactcccaccgctatggccgcggctcccggcgggtgatattcttcttgctggggatcgtgctgattgtgaccagtgttatgtcttggatgttgtaaggaggccgaaacgatgactgaaaaatatcctacctggctcaccggccatgtgaaggagtgggccgagaagcgtctgcccaccgtgacattgtgttccaccaccggcaatgaactgctggaggtgtggtactacggagacttgcttacagtgaagggggagcctcaatcctatattgtagatagtgacgaggcccccggactggtggcggcccgtgacccggagagcggcgaggcgttcattatcttcgacggcgggcggcatggctatgacaatctgttctgtgatgaacatgatccggctgaattggaacaccgcccccttaagcggtatgagatccccgcctccaaactagtgctggagctgggctacagcattgactatgaggatgaaaaagagggtttcgaggcggacgaggcggataccgtggaactgctcagcggcagacggatgccctgggagcaggtcaagcgggatggcattgactacattgcgctttactatgtgaacgaggaaggaaaacaagtacagattttggatgcggagctggcatgagtacagccgttccatcctccgacaatctaaggaggtaccccatgacccaggaagaacagatccgtctctaccggctcatggaaaagctcaactggtttttccaccaggagatgcactatctcgaccgggatattgcggaacagaccgcgcgggagtgttatccggagatccgggagtttacatatgatattttgtggaatgacctgcccaaagaggtgcaggatcaacttgattaggataaaccctaatgactttgcactggcccaggaggtggagttgcaatgtccataaccgcttataaaatagaatccgtcgggcatgaccggaccggcaaggactacggctatgtgaatatcatgtaccgctacggcaacaagcggtcctgtccccagcctgaacaatgcgaaaagatagaagtcatgtgggcggatgagagcgtctatgggccccctgctcccggcagcaaggtgggtgactttatcatgacctggctgatgggcccctggaactgcggggtgtttacccaccgggagatcgcccagcggctgatggataccttcaccggcctgaagatcaaggagctgaagtggttcgagaatcccagagagaagacacagaaaaacggcaagctccgggcgcgccgggccaggtggcttccggagcgggaggtggatctggtgtatctctactccgactactatattgacgcaagagaacctacttctgcccaaactgacttcttcaccgtcacaaggatggacgcctggggcgtgagcacctggttcatgtgtaccccacaggccgccgagaagctgatcgcgatggatttcgaaaatctgaccgtcaaggcaaccaccattgtgggatagattaaaaaggagtaagccaatgatggctttgggacaactgccccgcaaggtggaaaacccggaaccgaagcgcgttctgcggggctacttccacattcgcagccagaaaaagaaagtggcaaagagcatcaccgtctatcaggatgctgccgagcgattcggagagtaagctggaatggagggactggcatgatcgggacagatgaaaaccgggcggtgctccatgtggaggtcatcttttggagcggcaaacgaaaggctccccccagcctggtcagcggaaagtatagcccccattttgtagtcgtgggaaccgctgagtatctgggtgtatgcttcctggatggaaccgagtgtgtatttgatgaaccggcattggggaatgcccagcccctctacccggatactgtggactacggcccgctggaacacaatgcggaattcttgatttatgagggggccaattccgttggcaagggccgggtgctgggccgaaccgttccctatcaagtaaagcagcagaggaagtaagtcctatgatcgagggtgggtttgaaggataaggagcaatgccatgatctcaatagactttctgaacaaggtatataaaatcctggactcgcaggaatacaacctctctttttctcccgccaagttcaagaactatatgctgtactgcaacggcaactttatcggcggcctgttcgatgaggaactgtgcttcgtctatgccgacagtgtgagcgaactgctggggcagccggaacccgtctaccgcggctactccggcaccgcccagcacaggatgctggtgatcccggaggaacactgggagaaggcgctgaaactgctctatgccgagaaatttgactggagccgtttggtgtacgacatcacatacaccagcattggcgcggctgtggtggaggacttctatgatgagaatgtggtgttccttcggttctgctttgacaaggaactgctgaaaaagaaccctttggaccagcaaggccgtatccttcggatggtctatctcaatcaggacctgacaaaagcgggcaaatatctgttccccagactgctgcaaaagtttcttgtttttacagatcgcagcgggaaaaccagtctggaaaccatgctgaaacggtggtacaccacgctggagaagatgtaccgcagtcagacagcgggataaggagggcaacgacatgacagaagaaaacaaaacctacatccgccagctcaaggtcgctgatgtcccgtggcatcggctcaccaccgcctatggccgggggacggattttcccgctcacctgacagtcctggaacagatgcgtgatttggcgtcagtcaaaaagtccctctacgtgttcaccaccaacctggagcaccagggcaccctgtggcacgccacccccttcggcacggtgttcctgaaccggattctggagaaggccctcatggagagcggccagaaccccgtggctcgcttccttgccggggagctgctggacttctttgcctgcatcctccagtgcttccacgatggagatgagatggaacacgcctctccccttccctgcttctctgatctgctgaaagaagaatacctgtggtcagaggaatacgacgaggaagaagatgagatgcgctacgaggaggacgaggtcttccccgcggacttgttctacagcttctattactactcctggcaggcggtgctggcctaccgaggcgcactggaacaggaagtttctccggagtttctccccaagattgcggcggttttggaaggactgtaaaggaggttgcgcccatgtttgaggaattctatgggatgtacgagcctaaggagcaggaagtggtcgctctgatcaagcgctgtatcgggggaggatatcacaacaagggagacttttggggaatgaccgttgtaacgctgggcatggtgttctgtgacaccggcaaggtcagccccaaagaggagcggctggagtggccggtcaccaacgaggagcgggacggcgaaaagggctggggacgctttcgcgacgagcagatctgccgtctgaagatccgccggataaaggaagaatgggcgcaaaatctgttggcgcggccctggtgcatctccgaggtggtcagagctcatgaggactgcccggagcttcaggccattctggacgagtaccacaagccggtggtgatccaggacgaagtgctgggtgagctgacgctggataaggactatgatgcctttgagggtgagatccagtggtgcggaaagggtgtacgcctttctctggaggtcaatgctgagagcaagccctcatggacccgcgcccgcaacgccgccaagaggctggttacagatcaggaaacctgggacaaggccatgcgggactttgcggccaaaaacctgactgggcttgccaacaactggctttcccaggatgaggaaagcgcccgtgacccggagacagcccccatcacggaggaggagtttgcccagcgcatcctgctcaccgaggtttccgtttctcccggcggccgttttaccgcctattataacgatgacgatatgttctggggccatgcggtagaggttagcggctctttgaagaagggcattacctatgctaaccttgcaggataaggaggatagcctgatgaaactgaacagtaaacgcattgattttgaatacacgcccggcgaggaaatctttacttttcccgaggacacgggactgccctttctctttgatgtagatgaggaactgaccgacaatcctactgccatggacgcggtgggcgaaatgctggatgaggcggagacattggcggaaaaggccaaagccgccatcaaagcggcgctggcggacgagagcagcccctaccacgacctcgtgacctttttcatgcagttccaccgggacgatgtaggctctgatatcgcggctgatctttttccgggaatcgatccggccaagctgtcctttatcgagatggtggactttttgtggctcaagcgttttggcagcttggtggatggcgaaaccggccagcaagcctttattctggacctgtctttcaacccggaaatcaccgacgagctgatggtggtttactttgacttgaacaaggagattttctgcattacccatgagagctgatgaaaaaaaagggcggaacacttgcccacgcttttgatccagcagatccgcctgcaatggtataaagactgtcggggtggaaactacgctgtgcaaaggaaccagtatcccagagcaatgcgtctgccgaaggcagggaggcattttttgccaccgatggcagcggccaaagcatgattgtcctgtttgcgcccgaaggctgcgtcatcaacggtgtggactccgaactctacgactgggagaaaaactcccctgaatcgaagacctgaccgacgggatgccgaccgctttgcaaaagctcatgaccagccatgaggtcaagaagatgaaaagcaccttctgcgtctggacgaaagatggcatcgcctggcactgcaatccgatggatggcgaggatgcgtccagggacctgctctccagaatcgacggcgaggcacagacctatgtggagtacgggaagtggtttcccgctgacctgcctttggaagctgtgcgccggcttgcggacggggcgccggtgacaaaggaactggtcgccgcgctgaaccccaggcgcagcgagtgggaggaaatcaaggcaggactggataagatcggctatccaaatgaactttgatctgtagtagacaggagatggttcgaatgatcaaagaacgcaccctaatctccggcgacctcaaaagcaaggtcaagcagctgatggagtacgccgggtggtacgaagggcgaaaagttgacatctccattgcggagcagtattacgccgatcatggcgtcccgatgatgaagaccgtccagcggttttaccgcaagtatttcggcctgtgctgtgagtggtacctggagcagaaaaagatgaactgggcggctgactttgaatttgctttgtttccttacctggttaacgggatcaaagaccatttggaggacgcctattttcgggacatgtccggctgtgagctggcggagatcgaacaggccgccggtgagcggtgtcagcctatcggtcatatcggctactactacccggcagaggtttggatctccgagtacgggaaactgtatgcgaaatatgagtatcaggatgagattgaatgctttcccgatgtgttcgccctgattgagcacgatttgcggcagtgtaaatttaattccgctgccatgaaaaccgtggaggcgctggatgggaagcaatgagaaatcaatcgcaagcaaaactggaggaaatagctatggattatttgaaaatactgcgtgaaaatcctaatttggcagaggaatttgattcgctttttgacttcttcctgctggatgagttgtccccgagggatgaggcggacggtcgagcaaccttcacactgcccggcatggcatttgccagagatggctccggcggagaataccatttgttggaggatggctccatcggctattacagcagcgaaggtgagacaggccgtctggctgagagcatggacgatctcttttccctgcttgtgagctgtatctgctggcatgactgctgtgatacaaagcagtatgtggattccaaaacactggaggaatatgggcagaggcagcgtaactgtaacttggaagatatggataggggcagcttgcggcgggtgtctgatgtgctcggtatccctaccggtgaggcgctggctcctgttctggagaggttccgcaaagcaacacagcgccagcccctgtatcagtgtattttccatgaggacgacggaagcctgaccaaatcatacggtttgatgtttgaatgagaaaggagcaatcacgatgaaagcatttgacccggattataagctgttggacgagatgtatcaggatgattactatcctgcttttctggtagacagggtaaaggacgagctccagaaggtcatcgacttgctggaaagcggcgaaaccgacaccgaagtgatacaggaaacgctggatgaggcagtctgcggcatcaatgatcttcaggaggagtttgacgagaacgacagcgagatcgaaacggtggcccgtgattgcatcggcgttaccgtggcctacattctggagtggttcaatatccccattgacaccgaggaggccatccgggaaagggactggtgatacccatggcgaaaaaagaaccggccgtttgtgatgagtacggcagcctgtttttcaaaggctcctcacagatgatgggactgtgcccggaatgtgcccatattctctatggctaccccaatcgtccccatcattttcagaatggccggtgtgtgaactgctactgggacgactcaaagagcgagtacataaagaaactgaatcaacaggaggaagctgatatgcctacgaccgaatggctgaacaaatacgaatccaccaaggacaaactggcctgcaaagctgacctggaggcccattttacagaaaaaatgattgggaacatggcggtggatgtgctggacatcggccccgtccatttccccaccgggcagatcttcgcctgcgatccgctggtggagctggaggacacgccgccctttatacagacaatccccgccgggacttacccagtaaaaatctgcgtggtacccagtgaacaatacggcgaccgctacgcctgtgtcaaggtggaggtcagccaggagaagcctgtccgctatgagttgggcatgacaggcaaagaggatctggaggaggaactgggcgaggacgattattttggctttggcgtagacgccgggatggggtgcattgcggacatccaaacccaggcagcctttaagaggtactgggccaagcggctggaggaagacccggacatcgatccctacaacgacctgttctgcgacttgatggaggaaaacgccaaagcccatcccaagtatcaggagagccacggcgactggctcaactggacgataccgggcacggactgcaacctgcctgtcttctcctccggctggggtgatggctactatcccgtctacttcggctatggcgcaaagggcgaaatttgcgccgtgtatgtgcggttcatcgacatcgaagcctgctacaaggagcaggcgtaaggaggcaagcgatggaatggccaaaacgggcgcggacagcagcatgggaaagcggtgtcctgaccctggatggagaaaaacagtttgaggtaccggagctgaccatgaatctaatagagcgactggctggttacaccctggtggggttccatgtgaaggactacccggtatcggatgaactgcttgcagcctttgccggacataaaagcatggtcaactttggtgtggaaaacgccgccctcaccgacacctgtttttccattttttctgccatgcccaagctgcgctatctgctgctggacggcaacgccgccatccacggcagcggcctgtccgccctgcaaaactgcaagctggatcttttgaccctcaaccgcaccgggctggacgacggcggactgctccaggcagccgccatccccaagctttcccacatccagatcgaccataccgcaattacctatgatggtctgctggccgtcgccgggaacagccggatcgagccggtggcccatgagcaattcaccaaggagcagatggaacacttcttccagattcagcgggagaaggccaaaaagcccactgtgctggacgagcaggcggcggaggaatgccgcagggtgttgtccgctttctttgccgagatgacagaatgggagcaatatatggagcaggccggatttgaggactccgaagctgcgccccgccttctggcgatctgggagaggtatgtgagcgaaaagccccgtccgggctaccggccgttggcactctcttacagcgcccagggaacctacaagggggaagggttcctggacgcggagcagatcaccaagaacaagctctacatctacaccagagaggaaaacaccggctttgaccgccgcttcctcatgaagcgtgtggacgggagctggaagatcgacgcggtgcaggagcggctggacggctggcagcgcgtgggattgtgagggatacgaaatgacatggaaatttgaaacatccggtttcgatgggcagtgtacgttgtttggcgtaaatatctttcagtaccgctggcgcgactgccgggaaacagcggcggtcatcgatccccattacggcacggaaaaagtgtttcatgtctatgaggtggagatcaacgggcagatccaccgctttgctgccggagagttctccaactgcgtgtggggattttatctggagaaggactgaagagaggagggtgaacccgtgaatgtcagcgccggagaggtttatacagtctacaacaaatacctggaacgctacaccgcctgtcaggtggcctacatcgcgccgccggacaacgtgagcagtcagtcctgggcggtgatcctgtccctggactgggtgggtgacgcccctctgaccgcggaggaactgctccatctccgcccgctctacaaggacttcatgtactggccccgtgaacttcacctgctgcgggtgccggtggaaatcccgccacagtacacgctggtgggtatcctgccatccttcgccgatgagccctgccgctcctacggcggctggaatgacggctatgaggtgtaccgtcagatcaagtggcaggagatcccggaggagcggcggcgggccttcaaggaggccatggagagcgacggggagccagagattggcggtatcccggtgaaggtcagcagccatcggctgatggacaaatatctaccctttggctcagcgcgggaactggaggcgctgccctgcctctccgacctcatctgcgagcggtggcacccggatctgctggagtttctgcgggaaaaccccttccttgatgaactgactttactgagccacggtcagagggcacttgatctgcggcgcaccagcgtcagaaagctgatgctggacatgactggcctggaggaactgtggcttggcgaggagacggagcagctcctgttccagaacaaggggccggacgcctgcaccatccatgccgccggaaatggcagcggtttaaccctccaatttatcggggaataccgcccccacccggagctgccgaacctgtggggactgcatggtatccggctggaagagtttgacctgaccggcttgcccgttgttcatcccagcctgaaggagctgcggctctggggcgcgccgggaaacctgagacatttctctgctgtggcacagttccgagaactgacagacctctccaccttcgacctgttcggcttcgacgcggccgacatcccaaccccggagcagatgccaaatcttcactggttctggatgaccagcctgccggagtacgctgcaaaagcggcaaaacagctctggaaaggcaagccgggcatggatctgcgaatcaccaagccccggaaaccggagtggctggcgcaaaatctggacaaccccttccggggctgggacggcgcggagcatatccccgccagtgccgcgaaaaaggcagccgatcaataccgcaagactcgttctcagatgatgaagctggccgctgagccggacggggacgcccagacccaggcgctggaggcggtggcagcctatacccagaccttcaataagatgcgctttatcgaaaccgaggaacgggatgaaatttatatggccctgcggggtatcctggatgccctgccgggagatacgctccagaaagatgccctgatcgaacagtttgagcagctacgagatttttgaggatatgaattgatgagccgaatggttgatgaaccctattttacatatagtacctacagcgccctgacctccggcatccaggtgaaatgcccaaaatgcaaccgcgcaggtgttgtgacagcggacgatgaaaatgcttatttccgatgcctgagctgcggccatcaagaaacccgcgaccggacggtctaccgctacgatgtgcataaccaatgtaggaactgtggcaggtgctatcgggtggacattgaagatgaggcaaagcagcacttttccgttctccatgtggcctgtccctattgtgggacgaccatgtcgggcgaggtacacaagacggcggaggctttctcctatgccgctgagatcaaggacggaaaggaaccctggtttggtctggaactgtggttcctgaccgcctttcaaggcaagccggtctggtctctcaaccgggaacatcttgcctatctgatcgactatctcagcgccgacctgcgggaaaagccgctgggcatcccacgaaagacccaggctgaccatctacccaccttcatgaaaaccgcaaagaaccgggagcggatcgtgaagctgctgaagaaaatgcaggaggaatgaggatggagcagaaagttatttacaacggccaagttcttactctgacccagttttgggcaacgggggagccttgcctgtggatcaccgacccacagcagatcgggataccaaaaatggagtttgtaggcggatacccaaacgaatactgcattttcctgaaaaatctgactgaaacggagttggaacaaatcacatccccggacggtactccactggatatgacagaagaactgcggcagcatctaacagaaaaggacaaaccctatggcgctacaggataagaaaatcatgcctcccccttggctggctcaccgggagatcgagcgatactccatcggctggcgcatgggctctggggaggattacatagaccgatttagcgattggctggacgccctctcatcggaggagcggacggaataccgcaccctctttcccgaaccggtgacctggacgggctggtgggatgacgaggacaaggttgaggtgctggaacatggtgacttctgggtggatgcatggcagccggagggccagcccaagtacacccaccagtggctccagcaggaattttccatggggagaaagcgagaactgtacctattctggggccatcagcctgccgagggcggccagctaacgaaaagctgcctcagccagtggtggatggaggacttctggtccatcgccgacacctatctctgcatggagcagtatatgatggccgcaaaagctgagctgttcggtgacggggagatccgggaccagattttgaaatgcagcgaccccaggcagatcaaggccctgggccgcaaggtgcggggctttgaccagaaggtatgggacaggttcaaatacgccattgtgctgggtggcaactggtgcaaattcagccagaaccgtgacctgcgggagtttctcctctctaccggggacagcgtgctggtggaggccagtccctatgacagcatctggggcatccggctctcgtccagctccccgggggcccaggacccgatgaagtggcgggggcagaacctgctgggctttgcgctaatggaggtgcgggacgagctgcgccgggtgacgcagaatgaaatgctttgcgattggagtacggtatggcagaaatgaaactctatgaactggtcaaccactatcacatcggcaccgaactgacctgcgccgaggcgatgttcatggcctgcaatgaatattaccatctgaatttgtccgaggagacacggaagatgttctccgtcatgggccttgggatgcagaccgagcagtcctgctgcggcgctttcactgtggcggtggggatcatcggtctgatgaccgccaaagagggccagaccgatgtgaacaacatggagggctatcggatgattgctgaattaacagactttatgcttggattctatggaacactccattgtgtcgagctgcaaaggctggagatcgtaggatacgaaaacccctgccatgctattgtggaggcgctggccaaaaaactggaggagctgctggcgggccgcagcatcttacgcccggcagatgcaggacagattggctcctgacctttggcaaaagaaacaggaggtcatgaacatgagtattgaactttcccacgacgaattgctggtgctgtacgacctgctccaccggctggaggatgtagaggagatatttgaagatccgtcggaacaagaggtcctctggcacattcaaacacagcttgaaaaggaattggttgagccgttccaggcggactaccaggccatcatcgaggaagcccgccgtgctgtgacggagcagtattgagatggagtacatcaaactcttttgggagggcgcaccggagggagaaccaccggtcatcctctatgaggtggacacagagcatgagcggctggccttccgttccattgacattttcgccggcggccgcacccacaacatccccgacctttacgacggagccattgaaatcacacccattcccaccgtggaggaattcaacgcccatgtctggggtgaggagttccatgcctgtttgatagagaaaacggaatttgaggccgtctgggagagccacacccacaatggagcgttaaagcaatcaggaggaatctgatgaaacagacagatatttatactgaggccttggtctgtctgcggctaatcctacagacagaccacccggaattcaaaaactggctcgactggctggggcgggatattgaggattggacccagcggcgggaggtcgcccaccatcttttagcatacggcggaatgggttctttcaacgatctgcccaatatgcggggaaaccatgattatatcttcgattttctcaaatcggtgtgctacacctttggccaccgcaatggcaagcggcaaggaatttcaccagaggcattgatggaggagtgtgtccacgatgcagagcaggcatcctatcatccccataagggactaaaccgagctatcgcccaacatctgatgcaaggcaatttacaggataatctggatcgactgtaggaggacttgctatgaacgaaaaacgatttcgcccccaattcaatcaaatggataccaccgagaaacaggtgctgatggagaacctggctgctcgttatgctatgaccttcctcggtctacatacctttgaccgctggggccaaagctgcaccaccggcatattcgaaaaagatggccgggagttcgtctttgtccctggcgataccgtcaccttgggctgggaacggttctctgtgggactgaatcaggacagtcgagaggaactggactatctgttccaggaatgggagatggagtgtgattcggaggagatgatccgtgaaagcatggctcccgttcggcaggcagccattggccctatgctggtgggccgggaactggaggaactctgctgggagccggtcaagatggacgatcccagactgaccgcccaccccgactggctgaagaagttccgggattttgcctggagcgaccttgacagccttaccttgcatcagtcagcccgtattgagcggacggaaaagggctttcagatctggatctataaccgcacagactacggtacgcttcttgaccaactggagaagcagggtctttcgctgcctacggcggacgagtgggcctatctgtgcggcggcgggtgccgcaccctgttcccctggggggatggaatggactactccatgcatctgcaccattttgaacgtccggaggatgaggacaagcccttcgatatggaggaacccaacttcttcggcctgtccgtcgcctatgacccctatatgcgggaggtggtgaaaggcaaagggtttaccacctgcggcggtgatggcgggcgcagcatctgcggcggactgggaatctttctcggcttcctgccctgttcgccgcactgcaagccggaagtgcaggaggagaaggaactgaacggcgactatgacttctaccggcccatcatccggatagagtcagcttgagagatcatttggaggacactgcacgagagagacaacacctgatcttacaaagatcagcaaatatgagtttaatccttcggcacaagccggaggtcatcagaacccaattggacgcccatggctgggcggatgtcaatgcgctgccggcgggcatcggtaagaagtaccccatcaatcgggacattctggaggagattgtgaggagcgacagcaaacagcggtatgccttcaatgaagaccggacgctgatccgagccaaccaggggcactccatccaagtggatgtaggactccccgtaaccgagccgccggagacgctgtaccacggaacggcccagcggttttccgctggcggagtcctcctatcgggcgctatccctatctgggcgaccgggagaaggcgctccagaccgcgaagcggttggcgacggagcggctgtggccgggccgacacaggttccaccccatgtccttctttgagaacccgaacctgcgggagcttttgctggaaccggaatccctccggcgcatccgggaggctgccctcattgacaacgggagtttaatacggaaataaattgcttgggaatggaggatctgccatgagcaaggagctgaaactgtataaagcatttattgacggccttgtggagcgtaaagacagcatgacggcccggtgggtcaagggcgatggtttcccccaaacggatgacaacaaggcaaaaaacgatcttttcgccgcactgacaccagcgcagagagaagtgctggctgaaatacttcaggacgaacacattgcgggtatccatgatgcccttgcatatatcaatgagatgatggatctggagggactggggcttcatcaggatggtgaatcctatcccaacgactattttgagagcctgcactatgacttcatcagccgttgtgacggcgatgagtggccggaataaaaggaggcatgacggatgtatatcgacaaatactggggcaactttattggaggttccgatgacagtctgaaccttgtggcgtttttggaggaccagaagaaagaggagatccctctcagcgaaatctttgccaaggtcgggctggacaagcagaactgggacttccaccaaacggtggagtatcttgagttcacccactccaatggcgtggagatcgactttcacttcgccattgatgtcgtcactgatctggccgctatcctgctggagtgtagtgtcagcggcggggtaaacctccatgatctggacgagtataacaccccctcccgccgcatccgtgtcacagccacggcagaggagcacgacgctatggacaaggctctggcagatttcgcccaagatcccctgtcctatgacctccacgatctgatgagcgatgaggagatcgaggagatggcccatcaggtggcggcgctgcgaaaggagctgtacgagtccgctggccgcaaccgcagctaccatgtgaaggcggaggacatgaagaatctgctccccgactgggctggggccgatggctgcatcgccaccaaccgcatcacggtggagggctgcaaggttggctactgctaccgggaggagccggatggcgactgggacagcggctggcgcttcaccgccggtgacgagagcgatgattacatggacgaccccaacaacgccgggctttacaagctgaacacgatctgcaacgacgattccgacattatcccgcttttgaatacgcccgccccctgcgcctttgagcgggatgagcatggcgtgttccagccgattaaagattggaaaccagaaaatgaggaggaaccggatatggacattttacagcagtgccagaggtggcatgaaaacgacgaataccagaagatcattgacgcgctggaggctatccccgccgaggaacgcactcctgagatggacagtgagctggcccgggcttataacaatctggcagacccaaataagccaggcggcaaggatatgctcaaaaaggcgattgctttgctgaagccccatgaggaatacttcgagagcgaccactactggaacttccgcatgggctattcctattattatctggaccaggaggggcgcgcccttcggtactttgaaaaggcgctggaggcccgcccggatgacgcggataccaaagaattgattgattcgtgcaagaaaggcattgccctgccgcagttctcggagtgcttccgggagcggacagaggactggtgggaaacctttgccgaaatggaaggggcactgcgccagatgatggacgaggacaaggatcacacccgtggcgcggagattgtggcccaaatggaagatactttgaacctggtctttgacgagatctccttcgaaatgggcttcaacggagagaagtacgagctgatcctcaccccggagggggacagggtcaagctgtttgaactggtctacttccagaagcacgtccccaaggaggtgctggaacactggaacatcctggtgggccgccagcccatccgggatatcggcctgcgcactgacgacggctgggatatctccggggatgacgtgcagatctggttggaggagcagggtgaaaacagttttactatctccgcctactgtgaaaagctgctgcccatgctgcggaaagaggaaggccgggcctggtggatgctaaccaccctcaccgaccaggtgctgggtgagatctcccacatgtggtatatcgacggcttcgatgtgctggaggggcccagggcggagccttcccttctcctctcccaactgccggacaagctgaaagagcggggggtggacctctccaccgccccggaagcgtacttagacagctgcctcgcctacaaaatggagcccaataaagacccggacgccgattggcggctggatgtgatcgccggttccaccaactgtgtgcctctgatcaacggctatctgaacgaagacaacgacttcatggacgctctccatgccgacggcgcggtggcgggcttcttctgctatcccctggataccctgcgggaggaagaaggaagccagaagctcttcgacttccgggacaagctggaggaggtgttcacctccggggaaggcccggaagtgctcaccctcacaggcggggccaccggtctcttctgcggctatgtggactttatcgcctgggacattcgcaccgcactcaggatggccaaggcgttctttgaggacagcggcattccctgggccagcttccacacattccgccgtgaagcgggcacggtgaacctgaaagcgccacctgaggaggagccggctgacggggggcaggccgccgagttggccgagccgctgacgggcatggactatatcccttacaccccggaaaacgcggaggagtttttcgcacagatcgagcagtggaacgacgcggacgagtacacccgctgtatccaggcgctgaacgccatcccggaggactggcggaactaccgcacgacctacgctctggcccgagcgctggaaaactacgccatcattggggaccatgacgagggcacgccccgttacaagggagacaaggccctgctccgcgccatcgatgtcttggagtccgtttgggaggagggccaggacaaggcggagtggaacatgcggatggcctatgcctatcagtatctctttgagcaggaggagaaagccattccctacgcccagcggtgggcggagctggaccctgaggatgagaacgccccggcggtgatccgggagtgccaggaggagatcgcaaagcggggcgaggcggaaacagacggcgagacagaccacacgggcgtcttcaccggctttgtcctgctgtccaggggagaatgggacaaggcgcagttcatccgggacatgaaggaaaaatgggacatccccgtggaggaatacgacgcaagcgaggacaagagcgacgacgctctggtattcgaggtgggcggcatggtcgctgccgtcagtctggcggcctgtcccattcccggcggcgaagccgaggccaacgcggaaaacaactatatgtgggaggatgccgtaaaagctgccagggagcaccgcgcccacatcatggtggcggtgcttggcaaagaggaagatgttctggagaagggcaaactctataccaaattggtggctgcctgctgccgccagaaatacgccaccggcatctacaccagcggcgtggtgtttgaaccgcgcttttacgaggactttgcagacatgatgctggaggacgagctgcccatcttcaactggatctggtttggtctttggcgggatgagaacggcatgaacggctatacctacggcatggatgtgttcggcaaagacgagatggaggtgctgggcaccgatgccgagccaggcgacctgcgggactttttggccagccttgcctcctatgtgctggagaatgatatggaactccacgctggggaaaccatcggttttgcggaggatgataagcacgccatcacccgcagccccggcgtcggcctgccggaagatcagatgaccctaaagatctcctgggagtcatcggctggcggtccggatgatgaccgtgaggacggcccggacggtgaagccccccaggatgaggaatccagtgttcccgaggtctatacggaggaggaactggcggccgtcgaggggcacatccagcagtatttcggcaagtttgggcatgtgttccatgagctgtcttccccggacatccatgtggacatctgcgtggtgccgccctcccaggagcgggactactacaccctggtcaccatgggcatgggcgcccaccggatgaatgtgccggaggcgctggcggaatacaagctggagcgggcggagctggccatcgcgctgccgaggaactggaagctgaagcatgaggatctgaagaatgagcggtggtactggcccatccgcctgttgaaaaccctggcccgactgcccattgccagcgatacttggctgggtttcggccataccatggacaatgaggaggactttgcagagaacacgaagctgtgcgccgccattctcacgcccccccaggggacggaggacggcagcgaggtctgcaccctaccgggcggcgaggaggtcaacttctaccaggtgctccccctctaccgggacgagctggagtacaaactggcccacgacgcggacgccctgctggataaaatgaacggcatcagctttgtggcggagcctgaccgtcagaatgccgctaccagcggcaccctttcgcacgggaacctcataggcgatatggacgatgctgcctggcatctggagaccatccgggagaagcatctgccggtggacgagatcaacgcctataaccacatggccatctacctgcgctggtgcatggagcatgacctgatgagtgtggaatttatcgagcggtacagcgagcagtatcaggcgtttctggcagatatcaagcaagcggacttgcgttctttcatccgcgatgtactgaagggacagctctttggcgctctattcaacgagaagggcgcggcctttgccgggtactactacggagagagcgacagcccttactatcccagcgatatcgacagctacgccgtcagcgtcatcgggccggagcgcaattactccgaggagatccaggacgaggcgtacctgttcatcccctttgacgaggactactaccaggctatggcagaggtgatcgaagaacgctttgccaactggcagggtcaggactttgacgaggacacgctggagccctccgaggtggctcaggccatcatggagtatctggactgtgaatgcacctatttcccttccatggcagatgacgatcccatcatgtcggcatacagctacgccaggcgggacgccgcccatgggggcttcgtgccggtgctgatcagagcggacgacgagacgctgctggagtgcctggtgatgaacgccgacccggagcacgacgcggactgctatgaatttgacctcaaaaccgtgacggagtaccggaagaagatgctctccgcccccatcaaggacggcaaggcagtcctggaggcattgaccggccagcgcaaggaagaagccgaggacgatgacatggactgggaggaggaagttcttggagagatggagggcggctatgacaatgaccgcttctcctgctattgggattcggatagccacatgacctatcccctcattttggccaagatcccggtaaagaacccctgggagatcttcgcctacctgcccttcggcaactggaatgagtgccccgacaccccggacctgatggcagtggcgagatactggttcgagcagtatggcgccatccctgccgccatgagccacgacgagttggagtttgacctcccggcccctgtttcccaggagaaggccatggaggtagccacagagcagtacggcttctgcccggacattgtggatcaggagcaggataaacccacagtgggcaatctggcggatgttctgcggcagtccactgtctggtatctctggtgggattgatgggaggtgccccggcaagcgatgaaaactcaaacactgaccattcagaggagcagattggaaatcgagaaaaagtgctgggctttacgcttccgtcccaggttcggaagtttttcctgctgaccgcaggcatctatgtatccacaggcgtgatcattgatcttttcggaatgtttgatctgaccctccatggagagcggtattgcgtatcgggcgagttctggaaagacacaggtgacgaccagcttctgctctatcctgatgacgaaaccatatggtactatgcccatggagatgatgactatatcctggttgtggggatctattgtgattgagaggtggtaacatggcaagtgtatccacttggagcggaatccggaacaaactggagcaggactacctctgcccggctctccgcgggcacatccaataatcgcatccttttctcccatgcggctatatggaccacgcctgggccgcgagccgcacggtggaggaattggatgcagttgccggaagccatgtccaggcaaaaaacagcatgacacatgggatgatcaggataaggccggctatcaactctacctttaggagcgggacatggaaaagcggtcctaccaggactggtatctgagccaatccctggaaactgccccaagaaatcgtccagcaggaactggagtttcgattcaagttattccctaacaaaaaggaggaaacgaaatgagcaatgaagtattccagcaaaatctggatgatgaaaaaggctcccgtcccggcggaccctatctcattcagatgctgttcaaagagccggtgtctatgcctggaaaagcagaaatgaccgccgtgatggaaaaacacatcgggacggcggagtgtttctgtcacgataaaaagacagcaggctttgccgccctggagcatatggcggaattcaaggatgtcaaggctccggtacagctcatggtgatgggctgcagcaaatttaagggcaaaggcttcgacgcgttcctcatgagtcagatgtgggactgtcaggagggccgggaacggatcttccgggagtgccggtatcaggtcgtggccacggatatgctggcagcggcccttccagttctggagcgggccaacctggatgctgactttgtggaggccctggcggagctgtatcccacctgtgaggcgttctactttcagaactgcggcaagctgcttctggctgaggatgtgtgttctcaccagatcgagggggcggaccgcttcatccgcttcggggtcaatgtccgtttctttaacattcagggtaccgaggatatgctcatcgacacggtgggtatgagtaccctgttcctgccggacctacagtaccatttccacggaatggatcccaactgggtggtaaaccacgcctacaatgcggcgtcgtatattctggcgaatgacaaccccatcaaggatggggaaacgatagatggcatagcggacggccagatgagccgggagcttcaatggaaatgccgatatgaggatgctctgatccagccgcccaggggagtggtagacatccatatgggtgagtatgcttccggaaaacgctgaactgataaaacgacttcctgcgcagtcagaggaaatgtttgtcgtccccttaggtggatttttcgttcagtcggtgtattctttgtctattacataataaaatctgatatgcctgatgtgaaaaacttgcttctcagacattctgagggtacaatacccaaaacccgaacatgaaaaagagcccttccgaccaggcggcagccgttttgctgcacctggtcaagaagggctctctgaccaaatgtaagaccacaggcagattggaagtaaacggaaacagcaaaagcaaggttgtcaaaaagtgatattttacaaaaacatcacaacaccccaaattaaaatgaaccgctcagctttgaccgtaaaacaggtcatctgatttgatcgagccgtcccgactggatcgcatctaaattggccttgagccgttcctccggccaatcccaccaccgtagttccagcaaagccgcgatgagatcctcagaaaaccgctttcggattggctttgcagggacaccacctacgatggtatagggtggtacatcttttgtcacaacggccctggcgccgatgacagccccgtctccaacggtcacacccgccaggatgaccgcctcgtagccaatccacacatcgtttccaatcacaatatcccccttgttgtcccaggctttggccacctgttgccgctccaatccccacttctcaaaaaagattgggaagggatatgtggcgagagattgcagcttgtggttggcgctgttgaacaggaacctggccccgcaggcgatggagcagaacctgccgatcaccagccggtcctggttgacgggatagtgatacagcacattgtttttttcaaagtcaacagggttataaacaaagtcgttgtatatggtatagtccccgacaataatactgggagctttcacggcatgcttgagataaactgtctgacggtctcccgtccggggatagatgtttgattcattcatattctttttctccttttactcgtttcggctgccctgtgctggcggtttatgcaccggcgttctcccttcccaaaccctgcttttaaagtagaccagccccacaagagcaggcaggatgggcgaaagggcctggcccagatagatcccggaaaagcccagagagaggggaaatgccagcagccatcccactggcaggcgcacaacgacggcgtccaacagggcattgaccatggccacgtgggctgctcccacgccgatggcaaaggaatccagtgtgtacatcgcggcgtagatcaggctgtttatactacagcaggtacgcaggtactgcaccccgcagcggatcacctccgggctggtgccgtcaaacatgcagatgagaggttcggccagaagctggaccaccaccactaccgccgcagtgaccacaaggttcagcaacaggccggaccacaccaccttgcgggcccgctcaatttggccagcccccaaacactggcccaccatggcggttattgcctgaccgatggcccagcagtgcatcccggcaaaggtgttgatcttcagtcccacaccggacgcagcggccaccggagttccaaactggttgagcatccctgtcaccagcagataggccgtgttcaccacaaccatctgtatggcggtgggcaggccaaccttcaagatggccagcagcttttcccgatgaaactcgatttttctaagagaaaagcctggctgataccgccgtagatataccagggaacccataaaggaaacaccctgagccgtgatagtggcccaggctgcgcctgccgtgcccatggaaagcagcccaaccagaagcacatccagcaccacattgaggaccgtggcgacacctacgaaaaagagaggcgtttgggaatcgcccaaccccttcaggatagaacagaccgcattatagccaaaaacgaacaccgttccacagcaaatgatcttcatgtagccgcaggcatcctgataagcattcgccggtacatttaacgcctgaaagagggcctcataaatggcgaggccaaggatggtaacaacagcggaacccaccagcgatagaaagaacagcattccgatcgtgtcccgctgacccgtttggtcgtttgcgcccttgcactgggccaccagaacgctccctcccatagtcaggccaatgcaaagagaattgatgataaagcacagcatggaggcgttgctgatggcggccaatccagtctttcccacgattttgcctaccaccagcatatccaccacattgtagagggcctgcagcagattggccagaaacagcggaaaggcaaaccgaatcagttttttcggcacgctcccggtcaataaatcttgtccttgggtcatataatatcttcctttcaaaacaacagagggcagcacaatactgtgcgccctctgctccattcccctaaaatgggtatcacaaaaggccgcggacaaaacatcgtccgcggcctgaaatggtctatcttttccagtcagcctgcaaaaaggggcacaacaaacccaaggcagtgactttctgccctgtcctcccggttttacaagttgaaattccagtaaggctccgcacaatgttttgtggtataaacttgtgtggagccaaaatcaatgcagaattttccgaacaacatcgtgcccacctcactttactgcaataaatactataccaggtgtgccgccgcctgtcaatgtgcttctgatggacggtcattgacaggtcagagcacagttccctcaaccagagtgtggaggatcacatcagctacgcggaaaacactgtggagattgagggtggcagccacacccagttcggcaactatgggcccacgtgagcggtcttccggccaccatttctgcggaggagccgcagagacagatggtaccgtccatcggagcctctcttgcacatcggatatcaaggcaacccctattagccagaaagcggagtggccggcaggcactccgcttttcatagttctctttgcagatacaccatatctaccagcttgactccgcactcatagatggggtggtcgtagtggtcagtgaaaaagttcttgaccagatgatgcctgcaaaagccgcagctctcgtaaaacgggatggtggaggggctgtccccagtacccacctgtagcagcgtatactgtcccgcgtaggctcgaatgaggaagtccaccagggctttcccatagcctttgccctgaaagtccggctccacggcgatgtttttcaactccagaacgcctccgccctcgtcggttacgacacactccgccttaactccgtcatcttccagcacatacatgctcccacgctccaggtaacggtcgatcatgtcctcctgctcatccgccagcaatagcagcgcaagatattgcttcttattggtttcaacccttctgatttccacgcttgtcaccgcttttcgtagaccagatccacgattccgttgtaatgttctgttgccacgagcttcagcggcagttcccgatgaagccccggaaacagccgcacgcctttgcccagcactgtaggaatcactgacagccacaatttatcaatgcggttctctttcaatagctgcctggccacggacgcaccgccgcagatccagacgtttcccttcgactccgtttttagctgatcggccagggcggtcagttccccattccagaagcagacattctcctgattttctccctgccggtgggtcaccacataacaggggcggccctcgtagggccagatgtccggagagagcgccgtgacgatctgatggtacgtagtccaccccatgacgatggcttctaccgtctcataaaacgccggataactgccggaggtatccggtttgctgccgtctccctccagccaactcacgccgccctgctcgtccgcaatatatccgtccacactcatggcaagatataacacgatctttcccacaatcatccccccgctgcccctattgtacccaatggtcaaaaaaagcgcaaggtaaaaagaaacaggacagacagttgtggtgttcctgtggtataatacagaaaaatcaggaaaggcggagctgccggagcgggaagagccggagagcagcttggggatttgactgaaacattggccgatcgttacaggaggaattgacatggcgtcccatccggattttgtgaactatatggccgagcagttgcgggaggccggagccatccgcagccggaagatgttcggcgaatatggcctttattgcgacgatgtattcttcgccgtcgtctgtgacgaccagcttttcgtcaaggtcaccccacagggcgaagcggcgtttcccgacctgcccaaggccccgccctatgagggggccagggattcctttctggtggaggatgtggagaaccgggaacagatgacggagctggtgcgtatcacctgtgaggcactgagaagcgggcctcagagaaagcggaggaaatgaccatggtctttgacaacaagaaagagcacaaggaattctatctcccgcccaaggcgccgggcatcgtcaacgcgcccgctatgagctttctggcggcgcggagccatggcgagcctgagaagcaggccatgtggttttaagggaggggcgaacagaatgaaaggctttacccgcatggaaacccgtttctccctgtgcggtctcaactgcgatttgtgcagtatgcatctaggcggctattgtcccggctgcggaggcggagcaggcaaccagagctgcactatggctaagtgctccctggagcacgggggcatccagttttgttgggagtgccgggagtatccctgcccccgctacgatggcatcgacgattgggattcctttgtccctcaccggagccgacagcaggacatcgccaaggtccgggaactggggctggaggtctatctggcccagttgggggaaaaacgggcgatcctggatgcactcttggcccgtttcaacgatggccgccgcaaaactcttttcaacacggcggtctatctcctgcccctggaggatttgcagtccgtgatggctgatctgaacagccggacggagctggctgggcaatctgtcaaggagcgggccctcgccgctgtggagctggtccagcaggcggcggaccgccggggcgtcagtctgaagttaaacaagaaaccgaaaaaggggtgatcctatggcggcttccagggtgaccgtccacttcccctgcccggtggagcgagtgtggcagaccgtgaccgacctaatgaataccgcttggcgcggcgacctggcccgggtggaaattttgaatgaaacccattttgtggaacacaccaaaagcggctatgccacgaattttaccgttacggcctgcgagccgctttgccgctgggcattcaccatggaaaacggcagcatgtccgggacctgggtggggatctttgagacggcggagggcggcgcccggctaacctgcatcgaaaccgttaacgccaaacactggtggatgcgcccccttgtccccggatacctgaagcggcagcagaaacggtatctggacgatttgcggcgggaactgcaaaaataggaccgtgttactctgcgttgcttgcggcaacgggccgctttccctacaatggggggtgaaaggagtgagcccatatgttgaacgaaactatcaaagcccttcggaaatccaagggtctttcccagcaggagctggcggtcaaggtaaacgtggtgcggcagaccatctcaaaatgggagcaaggcctgtccgtcccggactccgatctgctgatcgccctgtcggaggccctggagacgcctgtgagcacgctgctgggcgagacagtggcggagtcggaggcggacgaggtcaaagccctttcggaaaagctggagatcatcaatttgcagtttgcccggagaaaggccgtgcggcgggcggccctccactggctgctcatcgcggtgtgcgggggcatcctggccgtcgccgcggttctggccgcggtaaacagtccctatctgggctgggattacagcgccccggaaaccgccgttatgggggtggccatccacgcctttgaatggggctttgtccgtctggcgccctttgctctgatcgcggcaatggtcggcgttttcctgacgcgaaaaaaacataaggtatgaattgggagagtgcaccactgaacatggagataactaccaccggacaaatataggcacggaaagtcgggcagagtcacttacattctgctatgctgaatccagaaggacggtgtgaccaatggattgggtagcaagtattcatcaggcgatccagtatatcgaagaacatctccgggaggagctgaccatccgggagatcgcgcagcaggcggccctatcccctttttactttcagaagggttttgccatgctgtgcggtatgacggtgggcgactacatccgccagcgccggctctccgccgccgggctggaggttctcacgacagaccggaagatcatcgatatcgcgctggagttcggctacgattcgccggacagcttcaccaaggcttttgtccgattccacggtctcacacctgccgcactgcgaaaaagcggaggcgcggtccgctcctttgctccgcttcgaattaaagtgacattggaaggtggtcaaaacatggattgcaagattatgaaaaaagaggcgttcacggtgctctgccgggcaaagacgttcaagtatgaggacgccgctgctcaggttccccagttctgggcagagcatttcggcacaggcggcggcaaggtggtttgcggcatgtacggtatcaacctggacgagagcatgggcggcaacgagtttgaatatcttatcgccgacaactacgatccggccaaggagatccccgatggcttcaccacccgcaccatcccggcccatacctgggcggtgttcccctgtactggccggatgccccaagccctccagggactgaaccagcagatcttctcccaatggctgcccacgaaccccgactacaagatcgccgcaggcatcaatgtggagctgtatagcgacgccagcaggtttgaggacggcacccaggaccaggactactactgcgaggtctgggtcccggtggaaaagaagtaaggcacattccccggcaaaattaacggtcctaccatattgtttcaaacagaatccaccaaacataccagtatcgtatgctgacagcgtgcgctgtatgttatgtgttgcatcaggtgggatgccgaagatattggaggaaaatgtaaacaaatccgtcgaagacagtttcgtttatagataaaaatcgattccgcctgtgaaggaaactacatccggcaatcgatgcggctctttctttgcggcctttatacgccctgcgtcagcctgtccaacggacagcgtatcgcagggcgtttttctatcgtttgaaaggtgccaaggcgcatgagcttgaaatacacttgccccatttgcggcacgcccctgggttataagggcctgtgctggaaatgcaggtctgagcaggagcgaaggactgattgtcctggacaccggaacaaatctcagagaaacagaaaagccttattcagaacatccagcggctgggtgatgtggaggccctggaactcaccgacttccggcagcgggacggcctgatctatcctctgctgtccacatagattccagcgaagcatcaaacctgatgtgcggcctggctatacagggggatgaccgggccacggaaacgttatcggaactggatttgtgatcccactggaacccccatgcggaccgatacagcagaggcggacggcgtctgatctttttcctgatggggactgtgccggtccgggagtgccaggaggcgttcgcgagtcggagccaaatggtggggggtggatatcggatacggcggggaacctctgctcatccccatcaacatgcgggacgggagccttctctgcgtgggcaggggcaatgaggagtgagaaattccgccgaaaaccgtaggcggactgcggcaggaactggagaagctgaaccaactggcatggcaggccggcaaggacacaatcccccgctggacagaaacagagggttatccggttgacggtagcctccaccgctgtattcaatacaagaatattggtttggaatgcaatattatcaatcgtcctgataatgttctcaatttcatcggagccctgtttgaactcttccatagaaccggcctgttcggccgctccccgaaccaacgctgcgctccgctgaaaacctgatcgccggttttatcatttgggttgctttgaatgtcagcatccagatttccctgggcaaattcctgtgcaatcaaaatgggtatccatactgccaatttgtcaaatccggttctgtaccccctagggcttgtttgaaaattggcgatgtgcccggcgacgaggaatttggggccgctggcaagcaattttttcgcaggaatcctgacggatttcagggaaaaattgcgccgtccagcggtcaaaaggcccgtcgattgggcatgttgacatttttcaaacaagccctaggatacaaaaatccaagcatgtccacagtcagcctgcaatgaaacaaacaagtccaaatatcttataggaagccgtgggacttcgcccacggctttttagctggaacaggtacttgcaaccctgccttttcttatggtgcactattccaagatcatttctatcagcaaggaggtgctgccttgaacgggcaggtttacggctatatccgggtcagcagcagggaacagaacgaggagcgacagctcatttccctgcgggaagtacaggtgccggaggagaacacatttatagataagcagtccggcaaggattttgagcggccgcagtacaagaggcttctgcggaaattaaaaaaagacgatctgctctacattaagagcattgaccgcctgggccgcaattatggcgagattttagagcaatggagaatattgaccaaagaaaaaagcgttgacattgtggtactggacatgcctctgctggatacccgacaggggaaggatctgatgggcacgtttttgagcgatattgtgctgcaagtactctcctttgtcgccgaaaatgaacgtgccaatatccgtcagcgtcaagcggagggaattgcggccgccaaggcccgaggggtacggttcggccggccgccaaagccgctgcccgataactacctgagcacctatctgcaatggaaaagcggggcactcacagggaccgccgccgcgaaggagtgcggaatgccgttggctaccttccgttaccgggcggaacggtacgaaaacacgaaacgttgaacagcaggcagcttcacaaaaaggtgtacctttctgtaagcccccaattttcaaaatctttttcaaaaaactcttaacatgacgaggatttggacgataaggataatgtatagagacagcaggcagcttcacagaaaggtacacatttctgtaagcagccaaaagcaaagcatggatttggaggcgggcggccacgatggcatccagagaaaaacaatataatgtcctcaagctgcgcctgtatccaacctcagagcaagcagaactttttgaaaagacctttggctgctgccgctatctctggaaccagatgctggctgaccagcagcggttttatttggagactggcgtccacttcatccctaccccggcaaaatacaaaaagggagccccttttctaaaagaagtggataatcaggcactcattcaggagcacaaccagttgtcccgggcgttccgtttattttttcaaaacccggaggcttttgggcatcccaattttaagcgaaaaaaagatgaccgggactccttcaccgcctgcaatcatgtgtttacttccggcccgaccatttataccacgcgggacggcatccgcatgaccaaggcaggaatgattcgggccgtctttccacgccgcccgcaaaacgggtggaaactcaagcgcgtcacagtggaaaaggcccggacgggccgctattacgcttatgtcctgtatgaaagcctggtacagccgccggagccggtccttcccgctccggagcgcaccctggggctgaaatattccctgcgccacttttatgtggacgaccagggcaacagggccgatccaccccgctggctgaaacagtcccaggaaaagctggtgcatcttcagcggcggctgaatcgaatgcagcctggctcgaaaaattatgaggaagccgtactgaaataccgcctgctccatgagcacatcgccaatcagcgcagagacttcctccacaaggaatcccggcggatagccaacgcctgggatgccgtatgtgtgaggggcgacgatctgggtgcgatgacggacacgctgattcaggccgggagcgccgtaaaggaggcggggttcgggatgttccgggagatgctgtgctacaagctggcccgccagggaaaggcatttattcaggtagaccggtatctccctaccacccggagctgttcggcctgtgggttgacgcgggacgcgctccatgcgcgggattacaggcgaagtggttgggtctgtccagagtgcggcgcggttcatgaccgtgaggtcaacgcggcaaaaaacatcaaagcccgtgggctggaacagttttttgatttacaggggcaggacaggagcgcctgaccctttccaggcggcctgtgctccgccttgacaatatgccggccgggacaccggtgaacgcccatgattccggctggagagcgtggatggaacgccggtggggagcctccgcccttccatccacattctccggaccgccgagtgggaaacgagaggccgcatccgtgcggctgaagcctgtaagcaggcgtccacaatattatgacgatgtttttgcacgcggcgcatggatgcgcgccgctggccacaggaaggagatcccccatgcttcagctctctctgcgccccggtgagtatctcaccatccatggcgacattgtggtacagctcgctcagctctccggcagccgcgccttccttcgggtagaggccgaccgcagcatccccattgtgcggggaaaggtactggagcggtcgggggctccccggccggagtgtctggcatctcttccccgcagccgcgccaggaaaggccgggatgccgtctaccactggagtgcagagcgggagcgggccgtccgcacaatggaacagctcctggagcggatggaggccggggacagccgggaggaagcccaggcgctgcgtgcacagttggagcacctgcttccaactgtatgggaggaggagctgtccggccaaatacaggccctgctccgcagcaaaacagcccaggacgtataaataaccaccttagtttggtttcacccggtctcgcgaaccggttgaaataaatcgaagtgcagggacacagcccgccaaaggccacggcgtctgtgttggtctgccaaaccactaaacgcacatgagggatcggtgcgttggaccagcaaacccaatatcatttcagaaagaaaggaaacgatcgaaatgaggatccagcataacatcatggcgatgaacgcctaccgcaactacaccaacaacacctccgccctgtccaagaacctggagaagctgtcctctggctacaagatcaaccgcgccggtgacgacgccgcgggcctcgccatctccgagaagatgcgcgcccagatcaccggcctggacaaggcccaggacaacgccaaggacggcatctccctggtgcagaccgctgagggcgccctgaccgaggtccacgacatgctcaaccgcatgtacgagctggccgagcagtccgccaacggcaccttcgaggacggcaccgaccgcacccagctccagaaggaggtcgaccagctcaagagcgagatcgaccgcatcgccgactccgccaactttaacggcatcaagctgctggacggctccatgaagaccggcaccacggtgaacattgccgccgataccatctccggcacggtcaatcagacggctatccagctcaccgctgctggcggaaaggtcaactttggtaatacgtttaagggtggcgacaacgtcaccatcaacggcgttacctatacctatgcaagtcaggccacgggcactgacggcaagacctttaaggatttcaacgcgctgaagtccgccgccaagaaaaacggcgtgaccattggtggtaatgcctctgcggctacctttaccaaagccggtaaagatctgaccctccagatcggcgacaccagcgagaagttcaatcagctgcaggtctccatcaacgactgccacgtggacgccctgggcctcactgatatgaagatctccgatcaggacagcgcggcgaaggctctgaacagcatcaagagcgccatcaactatgtgtccgatgtccgcggtaccctgggcgccacccagaaccgcctggaccacaccatcaacaacctgtccgtcatgcaggagaacatccaggacgctgagtccaccatccgcgacaccgacgtggccgacgagatgatggcctacaccaagaacaacatcctgatccagtccgctcaggccatgctggctcaggccaaccaggtgccccagggcgtgctgcagctcctccagtaagaggtcgaaacggtatcacagccataacgctgcgggggccgggcccagttgcccggcccccgctttttcccacggaatgaggtgtactccatgaataccattgaaattgcccggaggctggcggagtgcggtgaaaaggccgaggcccagcgggcctacaccctcgcgctacaggcggcggacctgtccccggaggaggaactggaggccgccagctaccttcttttctccaaaggcgattaccggatcgcctataccagcttcctggccctctaccgccggggctgctttcaggcagagctgctggagctgatgacccaggccttctacctgccgaacgtggattcgctccgcaggcggtatgaggagaactgcaccctgctggcccgctatccctacctgtttcggcgggattttccgtcttttgaggatctgcccatccggttttacccctacgacgacgacggctatctcccctttgaccggaaaagcagcgtcttttccgactatgtaaatttccgaatcccggtggtagaccgaaacttctttcatgacttggaacggcctgtgctggcatcggatgtgtactcccaataccagttggaatacctgaatgacaatgtgcgtaaaagcgagtgggtggggcgtgagaaccacatctaccttcattactccgactggacgactttttgctctcacctccagtgcctgtccttcaaaaagctgctgaaagaggagaaactggtctttctgattggggatgagcttgctcaataccccattgacttccaggcccgcttcggcatcgattacagtcagtatcctgtcaagcccgtcggcatccgggaggtcaaccgcctaatctggcacacccagctggctgcccacaatggcggagacttcttcaacgagatcttttacgggcaccccaatcttctggcctatgaatccattattctggatgacattgatacccttctggacgagatgcgccgccgagtacgcgagcggcggctggagacagccattgaccggcagctcctccaaatcaaacatcccaccgataaggatcttctggtcgcctacttcctgaaccagcaggaaagcagcggtagcctcgatcccaacgcccggatcgcccctgtcctcttcttccagcctcacttttacactatctcatatgagatatcggtggacccgaaaagtaatgcaaccgtgctgcactctgagcagtacgaccgcatccgcgcctccgttgtgttccagaatttcaagtatatcaagaccttcacccctattcgccgtcccaccaccagctacgccgcgaccgtgcgctttatgataccgcaaattgaaaaagaagggcgcattgtatccgatgatctgaccgcccgtatgctcaaccgcagctttatggtggacccctgggaccggctctaccgggacagcgtgctggtgcgctttgaggacggcaagctcaatccgagggctacctttaccgctctggcaaagtttttggaccttccctacacggaaagcatgacttattgctccggagccagcggcatcaacccggaatccctggccggaaatgcccggggctttgacccggccacggtataccggacctatgatgagtttgcaaatgatgatgagcgggcatttctagaatactttctccgcgacgtctatatagtctatggatatgattttcactactacaagaatgaaccggtagatgaacagtgggtcaaggataaaatatcaaaatttactagactcaaccaatttatcagccgttctttggaaccgctatacaagaacacccacaatcagaaaaccggcgctcccctggatcaggaggaaatcgagcgccggatcagggacaccatctccggcctggactccaaccggctgcacgttgcccagttgctcatgcggggactgcattttatcaacaaagacggccagcctttgaaaatgatgaggccgttaaagctggacccggcgctgctggaacagccgctgtatcactgaggaggaggacatggaacacaagggaaccgtatactttttcaccggcctgtctggggcggggaagacgaccgtgggcagcctgttctaccagcggctcaaaaacaccaagcccaatgcggtctatctggatggggacgaaatccgggtggccttcggcgaggatgtgggctacaccaacgatgagcgcctgcgctgggcgggccggatcttccgggtgtgcaggctgctctccgaccagggtatcgacgtggtgtgctgctccatcgccatgtttgacactgtgcgccgctggaaccgggagcatattccaaattacaaggaaatctatatccgggtcaaaaaagagaccctcatccagcgcaaccagaagggcctctataccggggggcgcaatgtggtgggggtggatctgccctttgacgagccccaaagccccgaccttgtgctccagaacgacggggagcgcactccgctggagctggtagaggagatcgagggggcgctctacccgaatatcgtggagcaccccatcgacaataccgattactggaacctgtattatcaaaacaagctctgccccaccagcccctcccccttcgcccggtatgtgtccaccctggtggagccggggcggacgctggcggagctggggtgcggcaacgggcgggacgccctctactttgcctctctggggctggacgtggtggcgatggacctctctgaggcggccatcggcatgctccggcagcagccggtcccacacgcccggttcgtatgcggcgacttcgtcagccacaccctccaccagccggagagctatgactacgcctacagccgctttaccatccacgccatcaaccagaagcaggagcggatgctcctggggagcatggcccgggccctcaagccgggcggaaagttcttcatcgaggtgcgcagcgtccatgacccgctgtacggcaagggggaggcgctggagcgcaacgcctttttctacgacaaccactaccgccgttttcttgtgctggacgagctgaccgaggccctccggcaggccggcttccgcatcgagtacgccagggaacagaccggcttcgccccctacggcaacgacgatccccccgtcatccgcgttgtggcggtgaagaattgaggaggcggtttttatgacctgtccggcggatctgcatacccataccaccgcgtcagacgggcagtataccccgtcccaactggccgccaaggccctggcggccggaatccagattctggcagtcaccgatcatgacaccatggacggcgcggaggaggccgtccgggcgggacaagcctgcggattgacggtgctccgcggggtggagctgggggcccgggaggaccgtcacatgcacatactcggcctcaatctgggccccgagtgtcccgccctggcggagctctgccgcaggctccgcgccagccgggaggagcggaaataccgcatcgccgcgtttctccgcgggaaggggctggacgtgccgctggaggaggtggaggccctcgccggcggcggagtggtcgcccgcccccacttcgcccgggtgatgctccggcgcgggtatgtctcctccctccgggaggccttcgaccgctatctggacacggacgaataccagcgcattgagcggtggaaggccggcgccccggaatgcatcgcggccatccatgacgcgggtggaaaggcggttctggcccatccctgccagctcggctgctcccacgggcgcctggaggaaatcctccatgcactgaaggacgcggggctggatgggattgagtgcttttatccccggcattcccccgaacagaccgccgcctatctgcgccttgcagacaaatacggcctccatatcacggggggcagcgatttccacggggaggccgtccgacctgataccttccttacccccactcccctcaacctcgactggctgggaaccttccaaaatgcccagctagtccccaattgatttacgtacggtgtcacaaatggcgtttggcatggtatgatggatttctcgattagataagggtagatcagaacaggtatgtatccggggctttcttcatctgaaatagcatgacagagcagtatgtcggcttcggttatcaggcgacagaactggaactgcacttccgaaccgccagcccggaagggcggcgtacggaagtgcagttctctttttacaccaagcgcagaagctgcggcctatgtgttttctcctgtcagagaaaaatatctatcttcctatatagttcagcccggcaggtaaacagatgccctaattcaccccgaccaatcaccctgctctactgcgctttcgccgcaccgaaatagttcccgcagcttggtctaccttatccgcctgttctatctctcccaacgtctttcgcaacagaaaccctaccggaagtaatagcagattcaaaaagatggcatatccgagagacaggcatgctacatttagggcaatccctaattcctccagattaccgccacccaggctgtgcatcattttaatcagactaagcagtgagccagcacctccggccagtaaagatcctatagccacctgccgataggccagataactctccagcgcacgggcggcggaaggttttttctcttgaaacatagcccggattgcccaaccaaaagcgcggaaagagttgttccccagaagaaccagtacgcacgcgattagcaggaacgccagcgttgtataatccagaagcgacagcaagtttgcaacatccagtctgattccggacggtgtaactgaacagactgccccacctccgaccaacagaacgcatccaaagagataaaccagataacgcacctttaccacgccctttctctgtctacagtagtatttcggtttccctctgctcttaatggtttcatgtatcatatcgacatatttttgcaaaaattaaggctctaacctggctacatctcctcactgctgatagtgtactggataaggtgaggtacaggaacgcgccgtactcaaaaatgcggctaaaataaacgaatatgaaaaatgtccgatgggtcttcccatcggacattttttgccgtgtctactgcggatacccgtaccccggtcaggatatctccatcatcttcccattttccagcacaataggcggtagctccgtctcgtctccatataggtccggacgggccagaagatagtgctccaatgcgttccggctctcaaatttggtcgcctggaagggaccagccgggccatacttctccacaaacagcagtccgtcctccgtctccatcaatacgccggtatgtcccacaaagcggaccccgtcaagtggggaatgcagatatacctcgatcagggacattcccttggcgctgtccacctgtatgccacgctccgaccacgcttcctcaatgcgggcaaggtgttcctcctgggtcgccgccccctccagaggtacggcattgaacagagtaatgaaatcggcccgtgcttctgaactgagctggtattccttctgcgtgtcaatggcctcaatgtcaaacattagataggtatcactctcatccgcagtcccacaggtctggagctgatcccgcatcaacaggaacgcggtcaggcggcaattggcctccataaaaaatgtgccgtctggcagttccttaatgtcaaacaaaagtgagctgtagtcaacaaagtcaccctccatggcggtaaagccctccgtgagggtgggcgtggtcacccgggcgttaaagtcgtctgcccaggccagcagggtatcggtctgctcctgagatacgccgtgggcctgaagcgcatccacgacctccctcctggagctgtcatccgtcaaattggaatagagggcctgtgttttttccggcacatgggaaccgtcaggcgcggagggtaagctcccagcaggtgtactacagctagccagagaaattaccaagagtgctgccacaattgtagcgaatcgttttttcttcatatcaatctgagttcctttcataattgcctgtgaatttgagatgtatctaacagagcatatatgttccggagcaaatctgtcagctatcgtccagcacagatttgcggcgtctccacattatagacgcaaatccagctaaaaagttttcagcagctgctttgtttctaatattcgcgctctatcgcgcccacaaggaacgtggtataatatttaataactttctcaaaaaatgtggagggaaatgtgacctggcggccaggccatgcgtgtatagaacaggaggtaagaacattgcgtcatggagaaacggttgatttaacggcgctatacgaaacatattccgatctgctgttccggacagcactgacctatgtgagccattcagaagacgctcaggatgtcgtccacgatgtgtttgcggtctatctggcgaagcggcctacgttccaggatacgtcccaccaacgggcatggatgctgcgcgttacaatcaataaatgccgggatctccagcgccgcaacgcggtacgcaggtatacccctttagaagatgcggaacacatcgcctcgccggaggattcagaaacatccgaacttctggccgccgttcggagcctgccggacaagctgcatgaggtggtggtgctccactatctggaagggttttcagtggaagaaaccgcacgctgcctgcgcatctcggtttccgcagtcaaaatgcgtctgacccgcggccggcaggcaatcaaagcactccttggaacggaggaatgaatatgtttgatcaaaaagatgtagaggcataccgcaggatcaaagcgccggaggagctccgggagcaggtcatgcgcctggaacaaaagccggagccgacacgcaccagaacgaaatggatttcgtttggatctctggccgctgccgcctgcgcagccgtcctgtttattgccgctctccctccctttgctgtgcagggggaaaccgccctcttgtatcagggcgtacccgttggggcggaaccggtctccattccggcggaccatcctcaaatgacatctggacttcgggaagtctccggcggaattcctctggcgctggaaaccggcgaaacgacccgggtatctgtttccggcggtgaattcagcctgtttgatccggagggcgaactcctcggagacggcaccgaagcagagatctccgaagacgttctgctctactgggacctctccggcacagaggacaccatgttttccctgaccttgaaaaccaatggcaaacagcttacctatgtactctccatgcgtgacgatggagggtatgaccttcagcaaaatcagtcacccaaataaatgcagaacaggagaccatgtattatgaaaaagatgatcacttttattctcggtgcggcaatggcgatctccctggtgggatgcagcggcaacaatggcagcagcaatcacggcggaagcggagacggctccacctcttcctactccagtgcggtggaggttctggagacggtctatggggtgtattcagaggatcaaaagttccccatcggcggcggcgattcggagcacatgaccacagatgccccaggcgcctttgacgtatccaagaccgaggagctgacctccaccctgagccttccggagagcgagaccacccacattgatgacgcggcatctatgatccacatgatgaatgccaacacctttaccggcgcggcctatcacctgaccggcgatgtgagtgccgacgagttcgccgacgccctcaaggagggaatcctggcgaagcagtggatctgcggtatgccggataccttagtcgtaatcaacgtggacggccagtatgtcattgccgcgtatggcgcggatgatttggtggaaaccttcaaggataacgcgctctccgccctggacggagccgaggcaatcattgacaccccggtggtagagggctgagaaccgccagttcaatataacattatatagcgttgcggggcggcctcttcgccagggagccgccccgtacgttgctgttaaggaaggttttctatgcttttttccagcatcccatttctatactactttctcccgctggttctggccgtatactttctcactccggcccgcttccgaaatgcagtgctcctgctggccagcctgatcttctatgcctggggcgagcctaaatacgtccttcttatgctggcctccatcctgtccggctatggcttcggcctcttgcaggagcggtaccggggccaaaaaggggccaaactgttctgcgggctctccgtggcggtcagcctgtcctttctcctgtacttcaaatacgcagacttcttcctggaaaactttaacgcggccaccggactgggggttcccctgctgcgcatcgccctgcccattggcatcagcttctacaccttccagatcatcagctatacggtggatgtataccggggcgagccagctcagaaaaatctgatccacctggcagcctatgtggctatgtttccccaactcattgcagggcctatcgtccgctattccgacattgcacagcagttggaacaccgttcccactccaccgctctggctgccgggggggtgcggcgctttctcattggattggggaaaaagatcctgatcgccaaccaactgggagagctgtgcagcgtgttccgggcgtccgatgagaagtccgtgctcttttactggctatacgccgtcgcattcgccctgcacatttatttcgacttctccggatacagcgatatggccatcggcctaggcaaagtatttggcttccacttccttgaaaactttaactatccctatatttccgccagcatcacagagttctggcgccgctggcacatatcgctgggcacctggttccgggattatgtgtatatcccgctgggcggcaaccgcgtcggaagggcccgccaactgctgaatattctggtggtgtggatgctgaccggcttctggcacggggcagcctggaacttcgttgtctggggactgatgttcgccgttcttctgatcatggagaagctgtggctgctgaaacctctctcgaaatgccgcccgctcgcccatctctatgtagtattcttcgtcgtgatcagctttgtgatcttcaacgcggagaatatggggcaggccctctccgacattggcggtctgttcggtgccggcggtatcccgctggtttctgcagaggcggtctactgtctgcgcagcttcgctctggtgctgattctggccgttttgggagccacccccctcctccggaatgggcttgtccgcctctcccagtaccccaccgccggtaaggtcctcaacgcactggaaccctttacactgtttgtactgctgctggtcatgaccggctatctggtggacggctcctttaacccattcctatacttccggttttgataggaggataccatggatagcaaaaagaaaaacctgacggtctgtatcctgtttgggctgcttctggccgtggcctttctggcctgtttgtttctccccaaggaagccacttcggacagtgagcggaggaaactggccgccatgccggcgttcaccttggataccgtactgagcgggcggttcatgtccggctttgaaacctacacccaggatcattttcccttccgggaccagttccgtacactgaaagccctgtccgccaccggcctgttccaccggcaggacaacaatggtatctatgtttccgacggcttcgccgccgcggtggaataccccctgaacgaggcctccctggaccgggcggcaggccgcttccagtacctctatgacaaatacctgaacggcagcaatcgggtgttcctctccgtaatcccggacaagaactgctttctggcccgggagagcgggcacctctccatggattatgcgcaattggagtccctgatggcacagaaggttggctttgccgactatatctccatctcagacctgttggagcgggacgactattacaggaccgacacccattggcggcaggagcggatcaccgatgtggcggagcggctggcccaagccatgggggtcaccttgactcaaaattacgaagagtccgtgttggagcgggacttctacggcgtttactgcggacaatcggccctccccttggcccccgagtccatccactatctcatcaacgataccatccgggactgcacggtgtatgattaccagaacaaccgaaccggaacggtgtacgacatggagcgtgccatgggaaaggacccctatgaaatgttcctctccggttctctgtctctgattaccatggaaaatccttacgcccaaagcggccgggagttggtgttgttccgcgactcttttggctccagcattgcgcctttgctgctcagcggatactccaggatcactctggtggatattcgctacatccagccggactacctcgggcagttcattgattttgaaaactgcgatgtactgtttctctacagctccctggttctgaacaacagcgacacgctgaaataaccgatccggctgtggatgctttgggttatccacagccggatctttttgttcaaaggccaatctgccaatccatgctgccattggaacagcatccccattcccaccctcgcagacgcagtcaatacccggtcattacaatcatccgttacaatacatctgtacgcagtcggggcataacaattcttgaggactcgaacctcgcacgtgcccttccgtgtatccatgatgcgacttacgctgtcgccgcgcggcattcgccctgcttctgctaccaggcactttggcctattccactaagtcggtcttccagttgctctcttgcagccggttatccagccggcgcagttctttggacatccggtcgatctccttttgccagtccgccacagagaacgcagaccggatcttgatctccgtatttctggcgcggtaggatatctgacttcccgcgtacacaacatcccggtatacatggagtttgagggacagggcatccttttgggcaatcagttctgtcagagtctgcccctcaaccacagtctggcagttggtccgattgattctcgcaatcaaataggacaggcgagaaatggaagcatccagctcctgttttagattctccgggcattccaccggttgctcgccctcctgcaccagcgcattgctgctcaaacggtttttgagctgttcaatattccggttcagatctgcgcgttcctgtaaagcctctgcaagtttcataacttcacccttcccgatccatcggctgctctatagccctggctttcttaggagatgtagataccgcctgtttcaaaggcatcttacagcgtctgcatctctccttatccgattgaatactgaaacatacatacagagcgtgaatcccataaacgctatgtataaaagcaattataaattatagtatagcatactttatcagaaatggaaccattgtctgcccgaaaagattctttttgcagcagcggttttagcgataaaaatattgtgtgggtaccaaaccggccagcaaggaactgtggaccgctgttcttcgcctccgctccgttggggacagatagtaaccccacacaccttgaatttcatcaaattgtatgatattatttgcaacaatgttatcgcggaacggccagtgctcaactttcttttccctttcctgcccgcattttttctattttcagcagccgcaatttttcacatcatccacggcgatatgatactccctatcttgtccccggcatgcgccggactagagcaatgggtgccccgagcaggcgggaatccctggggcgtcaatatgaaagcaggtcagataaatgaaacggtttgtgaagaatgtcgctctggtgctccttgtgtggcttttattcatcattctctgtctagtcattccaccggcgtttcacaaaagggccactcccgaagattggctgaacgatatccgctatgaacataccgcaccagagcgggtgcggagcatcgacgacaactctgatgccctgctgtggcggctccggcttattgaggaagcaaaggagcggattatactcaccacgtttgatttttgggatgaggaaagcggccaggatgtgattggcgcactttgggcggcagccgagcgcggtgtcagggttcaggtgcttctggacggcatcaatggcggacatttccttcccatgagtaggaacctttgccagttgtcaagccatgagaacgtggagatccggctctacaacccgatcaaccttctaaccccgtggaaaatcaactatcggatgcacgataagtatctgatcgctgatgactttgcctatatcctgggtggtagaaatacagataaccgcttcctgggcaattaccaagaacactacaatgtggaccgggatattttagtatatgaaaccgagcctggggcaggccagtcctatcaacagctgatgaattattttgaggcggtgtgggcgcttccatgctgtaaggtttttaaagattcaaggtgtgaaagcgatctggctggctgttatgagcagaccgcccaacgttacccggaagtctttacagacagtttgactacagcagaatgggagtccgccacactggcggcatatagcgtggagctatggtccaatccaatcgagccggaaaataagacaccaatcctgtgggcccgcatggtagacgctatggcgcaggacagtaacgttctggttcagacgccctacattatatgcagtaaggatatgtacgaggaccttcggactgtctgtgctgcgggtaccagaacagatattctgatcaatgccgtagaaagtgggacaaatccttttggctgcaccgactacttaaatcagaaaacgcatctccgcagcaccggcacccatatctatgaatatctgggcgagcaggcacagcatactaaggccgtgctcataggcgaagatctgacgctcgcaggttcctgcaactttgatatgaggagtgtttatctggacaccgagctaatgcttgcgatcaaaagcccggggctaaatgctcagatccgtgctcaactcgatgtactgaaggaaagcagccgacacatgagtcctgatggctctatagaagatggcccaagttatgttcctagaaagctaagttggggaaaagaggccatgtatgctgtcctgcgggtaattactttgccattccggcatttgctataatttatttccaaataggctggactttttgcgcttctgtgtgtggtattccgtctatctattttccgagtgaatgcctgagtcacaccgttgggcccagatccagaggtaacgtgagcggctccgccgccattgacacggtctggattcgaaccaataggccgtgtctatcatactttcgtccacatcgaggcgtggcagaactgctctttgcagggcggctgttcccacctgtctcaaaactggggtatcggctacgaaaatatggctattttggttactataacgtcaacgagaatggttcccgtaaagttctgtgcactgctgatggtatgaatgaggataaagcgagtagcgccagcttctttcagcggcccggtgaccatggcctgggaagggggcagcttatggttgaagaaaagtgtttgggaattctggagcctgtacgagaagtgtctccggaggcaataccagcactgcactgtttgtattcactgttaccctggattccaaagtgaagctggcagccaaaattcttagaggtccggcactattttatgtttctatcccgtagcataaattgtaaagctaaaaaagaaatcccttgaaaccatttcgtttcaagggatttctgcaaaggacggtcaaaaccgatatttctataaaatcaaaaaacgccgcgaagcggcgataccaaatcacaacccagcgcagcggttgtgatttggaaaggatgagcagcggcgtgagcgcgctctgacttttgtaaaaaagttggagcaagcgatacaaagcttgctccgacgtggtcggagtgtaattataggacttggaaaaatccagtcatatcaatggttttagcgcagcaagcaagaggcttttatcccattagatacgataattagaaagatcatccagcttttcggcaaatgattttgtctgatcggcttctttttcaaattgcgccttgatttgctcatttacatctggagacataacaggaatcaatttcagatcctcttcttccatgtagaggtctgcaatatcttccttatctccacattgaggaaagaggacgacccaacagccgtcttttggctccttttcccagacaaccccttgcattcccttgtgaacgccttcttttgcatagctatctttttctaccatcacttctacgcaatccatcatcttcattttattttaccccatacggcgtattcaatttgagttttccgttcagcataagcatccatccagtaataaatgacacgctgcctgatttgccttttctgggaatcgtaactctgatatcaattcgctggcctcgtctatccaactttcctaacgtatagtcaccggatagatatttttgaagtgcctgtttctcaatttgattcttaagccacgtagaatctgaaacagaatagccccaactttcaaatgctcgattttttccatgtctatctgtattttctgggtcaaatagatagggatcaaatttgctgtaatcgctatatgatgttgtattcatcaaaaccacagcatagggaatcgtgtctaatgtgcagtggcagtatggatgatgtggacaagacggagcattttcttcctgaaaccaacaaccatccaacattaagcattcctcacagtgggttttgccctctgaatggtgcgtccattggacccagcttggctgctctgccgttttctgcggaagcagctttcccgtatatcgtttgtaatatatcatatttcctcctatcatgtaaaatcaggcttctacatataggctggaaaaagaaaaaagttgtaaatttctgtacaactttcaaaatgaatttacaaattatgaaaaaatgagtgagtcctataaggactcacccatggcggaagcggtgggattcgaacccacgtgcccttgcggacaacttgatttcgagtcaagctcgttacgaccacttcgatacgcttccgtatagaatattcaatttatgcaatcctgtcacatgatttcgagtcagccccgttatgaccacttcgataccgctgcaactggctgtgggcgggtagcgtcacaaagccacaatcaccgtattgattagaataccctatttttgtgcgcttgtcaatattgcaggggcgtgtaaaatagtttataatcttattcagaagcattgaaaccgtgcattggacggaagggagtaccatggaagaattaaaacgacggattttaagcgatgcggtggtcggcgagggggacatcatccacgtggacatgttcctcaatcactgtatggatataaatctgatggagcacatgggaaacgcgctggcaaagcgtttccggggtgtgaggatcaccaaggtactgactgcggaaagctccggtatcgccttggcctgttttgtagcacgagctctggatgtcccggcggtctatgcgaagaagttccagaccgggtacatcgatccggaggtctactcggccgaaacccactccttctctctggagaagtcctataccctgcgggtctctaaaaagtacctggacggggacgacgtggttctcctggtagacgatatcctctccaatgggcaggccattctgagcctgctggaactcgtctccaaggcgggcggcgaggtggccggcgtgggcgtggccatcgaaaaggccatgcgggacggcggtcgtgttctgcggcggatgggcatccgggtggaggccctcgccacagtggagcacatcgagggtgaccgtatcattctgaaagattgaggaatcgggaaacatggcagacgaagcacagcttgacgcaattgcaagggccaacgcctttgccatctataacggtatcacgacccatcaaactggggacggcacggcggaggccatcctggagatcgggccggatagtctaaacccctatggtctgctccacggaggggcctactacacgctggccgactgtgccgccggaagcgcctgccggaccgacggccggaagtatgtgacgctccacggcagccttgatttcatccgctccgccagagcgggtcaggtgatcgcccgggcccgggtggagcaccgtggccgcaccacctgcctggtatccatcaccgtggacgacggagcgggtacggtatatgccagcggtcgcttcacctttttctgcaccggcaccctctgagcagaggggcgaccgcccggacggcaaacgctgtccgggcggttttcgttcctgctactgcccccgccaagcggccactgaccaggtctgccaatgggcggcctgccacctggcgctgtcccgaagcgtctccaccacctggcgcagctctgtctcctccggctgggtctccagcagctcctccagcgcaggcagggcccccagccgtccgtccgaggcggagagtaccgccccggtgtccaggccgcggccaatgttgtagcgggccaccaaggcgtccacattggcgtagttaaggagcagccagcccgccacccccacgctcagcagcacccggaaccagcggaagtgccggtgccacaccttccacagggcggctgccaggagcaccgccagcacggccatcccccaataggtcagcacccgcttaaaggacaacccataggcccccacatagaggttcatgcgccacagggcggataccagcagcacaccgctggccgccaccaggagtgtacccagcacctgcaccatcctgagcccccgcccctcacccttgcagagagcaaggcaggccagcaggcaggccaaattgaccgcagctacggccacaagctggaaaaaaccgctgcgggcatagctcgcatagctgattcccacccgggccaggtagtcagcgccgccgaacagcgctgcgcactgcaccgccagaaagaaggcatacaggacatccagcactgccaggacggtgaccggccctgcggcctccattgaaaggccctccacgggccgggtaagccgcttcagcggctccggccgccgcagggagtagagcagcccgaacaggaatggggcgacaagcagtccgaaaatcaaccgcagggcccacagcgccagatgctcatcaaaccagtccgccgcccggcgggtcacctgggcgaacagcgcatccgccgatgtgagcaggggaaagaccaccatcagcagtggaacgcacaccagcagtgcccccagaacatagggcatctttttgcgggagaggccccgaatggagcccagcgcctgaaccggcgcgcccagatagccgaacaggccgcccatcacccgcaggaaacgctcccccaacatggcggatgtcccaacggaatacacctccatccccggccagccccccatttgaattcccatcagcagaacgagggccagtgtgttccacagccggagccacggattggcaaacagggcgaaggtcagagccaacaggcccacggcgtacagaagaaggcggttttcccgcctggccagcggggcggcgccgccgtaccagaacaggacgccataccatgccgccgccaggagggtcatccccaggccggacaggccccagagcagcgcctccgcgcacaggacgcccacgccccatgccagaaccagcagcgcccgatccctcccgtccaccggaaacacccgccgggccgccgtcacgggcggcgttaccgggatagtctttttctcctccatttgtctcactccttatatctggtacggagccatgccgcggcgttgagcgccagggttccaagaaccagagcggcggcgctgagggcgaaggcgtgcgctgtatcctgaatggcggacaagtcgcccgcctccacctccaggtagacatggagaggcaccagggacagagcgacggcgcagcaccccagactgggggcgcacagtcccgtccggcgggtcatcagggctgccaggcccagcgcccacgccaacaggcccagcgccagcgggccgagggtgctcagatcgtccattccgacattcctcctgtctcaggtgtccagctcctggtagtacaggatgccggtatctgggtcatagaccgcaaaggtatagttgtaagagtaccgctgccacatatcctccgtctcgtcctcctgacggtcctccagataccaccatccccgggctggcacgggccagtccggccagtccgacgcgccggcgccgtccgggtagaggcgctcctccagttccggctccatgggaaacagactccatcccgcgctggatacggcctcctccaccgccagggcgtcctcttgggaaaaggtcagctccatgtggagcaggccgtccccgtggaagcccccgtggctgtccccggaggtgactgccgccggctgcggcagcacaatatccaatttccgggccacgtaaccggcgtccttctccccaccgcagcccgccagcagcaggagtgccaacatcatcgcaatccatatccgtatcataaagcaatccctcctgtctgtctctgaggatagcacaggagggattgtttgtcaatttattattatcgaatttcaataatatttttttgaatataacaaaaaacggacaaccaaaggccacccctacgggtgttctgctgactccggcacgtattccagcaggtcgcccggctgacagtccaacgccttgcagatagcctccagcgtggtaaagcgcaccgccttggcgtggttatttttcaggatggacaggttggccagggtgatatccacccgggcggagagctcgttgagactcatcttccgcttggccatcatcacgtccagattgacgacaatgggcatggcttcccctcctcaaatagtcagatcattctccgccttcagctccgccgcctgacggaacagcgcggacatgaccaggcagagcaggccgcccagaataaaaatgggaacgaacagagcgttataggtcagcaggggcgcgacggaaccgtagtagaacagcccccacaccacccgggccagcgcggcggcggcgatcaaaaagcaacacaccgccgcccggcggaggctgacgccgttctccgcccggaaaggggcgcccgtcaggatggtgcccagcacccggcggccctgccacaaaattacggcggtgcagatgccgcagaacaggaggaaaagggtgaggacaaaggtgaaggcaaaattctccgtccaagcccccactactaccagaaacatctgtagaccaggcgaaaaatagggccagtcgtccccaggcaacggtggttctgctgtcagattgcctaacagctcaggcaatgggatttggcacccagcaacggacactagtaccggcaccaagggcaggacaatgagattacacacgaatgtgatagtcaccaggatcttcagtaccccggccagcttctgcacagcggttttttccatggtatctccccctttagggagagtataccatgggttttatcgattttcaacaaaaaaattgaaagggcgtccacgcggacgcccttctgttatacccggatggctcccagtacttcgccgagagaggcattgatgaccaggccggcctctctgtcgtagggggtggcgctcctgttgatcagggccagcctattcccgcggtaatagcggatcagccccgccgccgggtacaccgccagggaggtaccgccgatgatcagcatgtccgccccggcgatggcctccaccgcgccctccatggttgtctcgtccaggcactcctcgtagagcaccacgtctggcttcaccaccccgccgcacgctggacagtggggcacgccgccggtctccagcaggaagtccaggccgtagaaccggcggcacttcatgcagtggttccggtggacggagccgtggagctcgtacaccgttttgctccccgccgcctggtggagcccgtcgatgttctgagtcaccacggcggtcagctttcccgccgcctccagctccgccagtttccaatgagctgcattgggcctggcctgcggaaagagcattttgctgcggtaaaatcggtagaactcctccggattccgctcaaaaaaactgtggcttaaaatcgtctccggcggaaatgcgtattgctggtggtacaggccgtccacgctgcggaagtcggggataccactctcagtggacacccccgcgccgccgaaaaagacgatatgccggctctcgctgatccagtcctgaagctgtttgagttgatggtccataagagcgcctccttgctgcgggccgatgtgggcatcggcccctatgtcctgcggtggcggcagcgggtgtgggggcaggaagggcatccgccgcagccgcacccccgcttgcccttcagactctggtggaaacggtagatcaggtaggccgccgcccatacgatcagcgccgccacaccggtatatacgatatattttaacatcctatcacccgcagcacaagagagccgagctgatagaccaggaaggagcccagccaggcggcccccagctgccagccgatggaggccagggtccatttggtggagttcatctccttgcggatggtggacaccgccgccacgcagggcacatagagcaggacaaacaccaggaaagaataggcggccagggggctttggaaggtgccgcccagggcggcggcaatcgccgcaccgctggcagtgacagaaaagccgtagaacatgctcatggaggagaccaccatctccttggctaccagtccggtgagcagggccaccgccgcctgccaggtgccgaagcccaagggggcgaacagaggagccaggaggccgcccacgaagcccaggatagaggactcctcgctggacaccatcccgaaggtcccgccctcaaagccgaaggactggaggaaccagagcagtacactcatggccagaatcagggtgcccgccttcaccaggaagccctttaccttctcccacacgtggagggcgatatttttgagggtgggcaggcggtaggggggcagctccagcacgaaggcggcgggctccccctggaagaccagcttcttgaggaggatgcccgagccgatggcgaagatcaggcccagcagatagagggaaaataccaccagccctccgtattgggggaagaaggcggcggtgagcaggccgtacaccggcagccgggcggagcaggacataaagggaaccagcatgatggtcatgcggcggtccttctcgttctccatggtgcgggctcccatgactgccgggacggtgcagccgaagcccatgagcatggggataaacgccttgccggacaggccgaagcgccgcagcaaccggtccataatgaaggccgcccgggccatgtagcctgaatcctccaggaaggacaggaacagaaatagaatggcgatctggggcaggaaggtgagcacgccgcccacaccggcgatcacgccgtccaccagcagggcctccacccacggtgcagtacccgcggcggccaggagggagcggacacccccggcaaaccagccgccgataagggcgtccaccccgtcggccagcatctgccccggcccgaaggtgagggcaaacatacacagcatcatcagcaggaacaccgggatggccagaaccttgtgggtcacgatggcgtcaatgcggtcggacagggtgggcgcccccagagggcggccccgcctgacgcactgggccaccacggtctggatgaactggtagcgggcgtcggcgatcaaggtctcccggtcgcccagatcataggccccctcatactcccggcagacggcctccagctcgtcccgctccctctgagacaggcccagggctttctccaccagggcgtccccctcgatgagcttgatagacgcccagtgggcggggatatgggcggcgtaggccttgtcgtggatcagctcgcccaccttgtgatggatctggtgggtaaagccgtcgtacagatcatccggttcaatggtgacgcccacgtgcatctgccggtgggccgcctccagcagagtctgaatgttctcccctgaccgggcagtgatgggaatcaccggcacccccagggccttggacagccccgccacgtcgatgtggtcgccgtgcttctccacctcgtccataaagttgagcgctatgaccataggccgctccagctccagaagctgggcggtcaggtagaggttgcgctcaatgttggtggcgtcgatgatgtcgatgatggcgtcgggccgctcccccacgatgaagtcccgggcgacaatctcctccatggagtagggggagagggagtagatgccgggcagatccaccactgtgacggacttgccttccacctgggcccggccctccttcttctccactgtcacgcccggccagttgcccacgtactggttggagccggtgagggcgttgaacagggtggtcttgccgcagttggggttgcccaccagggccagcttcatctcccgtgtgtcgtggctggcgtagtcgggcacgccgccgtgctccgccgcctcatgggcgtggtcggcatccatccggcggagggtttcctcgtccggaatgtgctgcaccatgccgatgcgccgccgccgtgtctgggcgcgccgctccccctccgcgccggttgccacccggatctgggccgcgtccgctttgcgcagggacagctcgtacccccgcaggttgagctccaccggatcgccgaaaggggctaccttgcgcaccgtgacctcggtgcccggagtcagccccatatccaccagccgccgcttcaccgggccgttttcattgccaacctggagaataacaccgcgctcgcccggcgccacctcctccagggttctctcgttctgttccgtctgagtcctcatagccgctccactcaaaaaatttagtttacctaagttaactccttcattatactatggtatccagggccgcgcaagagagggaccggtgctgttttctacaaaaagcaggcgctatggggcgcggtcctgcgtagttccgcaaaaaagagcggacgcccactcggggcgcccgctcagggggttctattagtcgtggtcgtgctcctcacagccgcagccacagccatcctcgtctccgtccccgcagcagcagtcgtcggacagatccagcgcaaacttctgcttgcagccggggcactgaatcacgccctcttccaggacagactcgtcgatcatcagggtgtcgccgcagttggggcagtccacctcaaaaaaatcgtcgtcctcgtcgccgcagcaacagtcatcgtcgtcgtcatcctcgtcaaacacggccttctccacgtcggagaggtcgtcggagatggcgtcgatctcctcgcccagggcgacggtgttctcctccagatcctcgatggacatgccgatctcctccaggatgccgatcattacggagatgagcctgccctccttggacttggcagtgtccagatccaggccctcggccagacccttcagatacgcgaccttctcagaaatagtcataataatctccttttcacaggcggcccaaagggccttcacaaaacgatgcgcctttacagcgtcagctatcacgcctcacaccctccgcgacggcacactgcttaccgctccgcaaaaaacatcttgcgcctacggcacaactgctttttcgtctgcgcggttcgctgtgcgcctgttccagggcgttcgggcgcttacgccttgcagcgctccaggtactcgccggtgcgggtgagtcccacgcaaagcacactttgcgcgggaaccctttgatttcatttgcaaggcggaactgaattccgccttgcgccaaggttttgcctccggcaaaacgcttgtgtgcgccagaggcgcgccccgctgcgcggggcccccgacacccgccgatgcccttccgcctccgcggaagtccggcaggcaatcaggccttgcagcgctccaggtactcgccggtgcgggtgtcgatcttgatcttgtcgccggggttgatgaacaggggcaccttgatctcagcgccggtctccagggtggcgggcttggtcacgttggtggccgtgtcgccgcggaagccgggatcggtctcggtgatctccagctccacgaaagtggggggctccaccgcaaagatcttgcccttataggagttgatcttgcagaccatgttctccttcacaaagcggaagttgtcgcccagcagctcggcgccgatgggtaccagatcgtaggtctcggggtccatgaagtagtacagatcgccgtcgttgtagctgtactccatgtccttgcgctccacataggcctgctcaaacttggcggtggggttgaaggaggtctcggtcacgccgccggtgatgacgttcttcatcttggtgcgcacaaaggccgcgcccttgccgggcttcacgtgctggaactccaccacctgcatcacctgaccgtccatctcgaaggtcacgccgttgcggaaatcactggcagtaatcgtaggcattggtattcatcctccaaaataaggtttctcaaaattcagctacgctattttaccccattcttcccttatttgcaagggtttttacagaataatcagctctttgggggatttggtgaggaccatacagccgtcagcggtcaaaaccgtcacgtcctcaatgcggacgccgaatttcccgggcaggtagatacccggctcggcggacaccacggcgcccacaggcagcaaagtctcctcccgagtgttcgcgttgggggactcgtggatctcgatgcccaggctgtggccgtagccgtggccgaaatactccccgtagcccgcgtcctcgatgaccttgcgggcggcggcgtcgatgctcttaccgggcacgccggcctttgtcacggcgatgcccgccagttgggcctccagcacggtctgatagaccttccgcatctccccggtgggctcgcccagggccacggtgcgggtcatgtcggagcagtatccgccgtacttgcagccgaaatccatagtgatgaactcgccctgctgcacctgcttggcgctggggatgccgtggggcaggctgccgttggggccggaaaccacgatggggtcgaagctcatcttctccgcaccgaagcggagcatatcgtactggagcttggccgcgatctcctgctcggtcatgccgggctggataaacttcaggatctcggaaaaggcgcggtcggtgatctcctgggcctttgtcatcagggcgatctccccgtcgtccttggccgcccgcaggctgttcaccagcttctgggcgggcaccagctcggcggtgaggccctccttccagaggttatagtccgccaccgacagatagccctcctcaaagcccagcttccggatgcggcagcggtcgacgacctcctgcaccatagcccggtagttgcggctgcggccggtcatggcgatctccgcgccggtgatgaggtgattggcagcctcaatgtagcgggagtcggtgaagtaaaagcacccctgcgccgtcaccaccacattgccctctccgtggaagcccacggcatagtattccccgggctcactgttaagcagcatggcatcgaggccatattccggcagcctggccgcaatctgtttcagatgattcatggtaaaaccttcccttctattacatgcaatctgtatagttctctcacgtaaatggcggatacctgcaccgcccgccgtcagccgcaggcggcctgatacagccgcttcatggtcagcgcgtcctccgcctgggtgcctgcgcttgccccagcgggccaaggcccgccgggggccccggccccttcatctgcacgggcgaactgaattcgcccggcatcaaggttttcccttcgggaaaacgcttgtacggcgcaaagcgccgccccgctccgcggggcccctgcgaaagcgccccatcccctcacttctgacatgcctgatacagctttttcatagtcagcgcgtcctccgcctgggtgcctgcgctttcgcagatgaaggtgggactccagccccggcgggccacctccgccatgaggggggcggggtcgggcccgaagtcgtcctgggcgaaggtcaggtgcatcttctcgcccccgttgggggtaaactgaatcttggagaagtggctgtggaaggcgccggcccgctccgccccaagcaccgcctcgatgcggtccagcatggacgcgcaggccgcagtcccctccagctcccccagggagcgggcgtaaaggtggccgaagtccacgcagggtaccagccgctcgtccagggtgcacagctccagcacctcgtccagatcccccagttggttgatcttgcccatggtctcggggcacagggcgatgtgtccatagccggcgtcgtcgcaggcggctatcaccgctttcagggagcgcagggcgatgtccagggcctcccgccgcgtacgcttcatcagcgcgccggaatggataaccacccggcccgcccccatccagtccgccgcctgacaggccgcggtgatgtaaccgatggtcttttgcaggctcccggggtcggggtttgccaggttgatgaagtagggggcgtggagggacaggcggatgcccgccgccaccgccgccgcgccgatgttcctggcggtctcctcccggacattgacccccttgccgcactggtactcatagcagtccagtcccagctccgccagccagcggggggcgtctaccgaggatttataaggaaaggactcggcgttgcccgccgggccgaagattgcgctcataacggttttgtcctccttttgctccacatgcggaagggccactccgctccgtagcgcaggtagcgccccggattgcccgccaggcggataggctccaccagcagagtgaacaccccggcgttccgcccgcccagaatgtcggtaaagagctgatcccccacgatggcagtctgctccggcgtgcagcccatctgctccatggcccgccggaagccccccggcttcggcttgcccgcgtggcccaggaagggcacgcccagcgcctgggaaaaccggcggggccgctccgggtgccggttgttggagagcacaaagagggtgatcccctgctctcccagggccgccgcccagtccctcaccgcctgtgtgggctccggttccccatagggtgccagggtattgtccagatcggctagcaggaggcggatgccccgccgggccagggcggcgggctcgatgtcgaaaatgctccggcccgcccagtgggccaggatgggaagcgccatggtttcacctcttctattctccgtcttgtccgcatataagtgattataccacgtttttcagaacttggacaagggggtacctaagatatgcaaaccagcatgaagcttcttctcaccgcgccgcccgaccagtgccgggccgccctgcgcttcggcctcccagtggcccacgttgcctaccgggtggggggcgggccccacctgttccgggccagcatcccggtatcggtgcggggcggcctgatggtcattgacaacaccggcttcgacggccgcggcgaggccgggcccttctgccaggaggtgctgcgggagtgcatggcccgagggtatgacggtattctctgcgattttgagggccatcccctccaggtgctggcccaggcggtgcgcacgctgggcgagctgaccaaaaagcggggctggcccctctacgtgaccgaggcctacgcccccttttccgactccgccatcgccctcatcccctccgccctgtccggcggctccctccagcagcgccttcaggaggcggtggagcgcttcggcgcggcccgggtggccctggcggtggagcgggtggcggaggacttctttctcccctcccccaccggccaggggatgcccctcacccgggaggagctgcgccagcggctggaggaacgggctccgtcggtgttcttctccagcgagctgtgcgcccactacttcacctacatgtcccggcagaacggggcccacttcgttctgttcgacgacgcaggctccatccgcaagaagctccaggtggcccgcaatctgggcatctccagcgccgtgctggcctatcctcaggtggatgatctccttcccgagctgttgaagtagcccttgtccgtcggggcgttttctgctatactgtcctttcaaaataaaaaaggaggacagagcaatggattggagaccgtggatggacgcctttctcccgccgctgctggaggccctgcccggccgggtggcctttgttggcatccagggcagcttcggccggggggaggctgggccggagagcgacgtggatctggtggtagtgctggacgcgctgggggcggcggagctggccgcctgccggggtgtgctggagaagatgcccttcgctgaccgggcctgcggcttcttctgcgaccgggcggccctggctgcctggcccgccttcgacgccctccagctcaggctggacaccctcccggtctacggctctctggaggaactgctgccccccatggggaaggagacgctggacgaggccgttcgggcggcggcctccgccctctaccatgccgcctgccacaccgccctctttgacgcccagccggaggcggccctccccgccctccaaaaggcggccttctttgccctgcggctggcccactgccggaggagcggccaatatacggccgcccgccagtccctgctccccaagctggagccggaggagcgggccctgctggggaaggattgcaccctgcccgccctcatggcgtgggccaggggagagatggaatcctgacacaagcccttcccgggatgcaacaaacccccgcgccgaatcggcgcgggggtttgtgattcttagtaatacttcttgcggttcttgcgggcggcctcagacttcttgcggcgcttgacgctcgggctctcgtagtgctcacgcttgcgaacctcggccagaacgcccgacttggcgcaactgcgcttaaagcgcttgagtgcgttctccaaggactcgccgtccttcacatggacttccgacattgacttcccctccctccgaagcggcgggattccaccgccaaagggccacatagatatggctttaacagaaccattgtattcgatccttttgcagttgtcaagagcggattttgatttccagcattctgtttttactgttcctggaaaaacggcggctcctcaccagctcacttcgcaatcaggttgaccagcttattgggtaccagaatggtcttgaccagcttcttgccctcggtgaacttctgcaccttgggatcggccagggcggcggccaccacggcctcctccccgctgtccacggggacggtgatggtgccgcggagcttgccgcacacctgcacggccatattcacctcggcgtccacggtcttgctggcgtcgtaggcgggccagctctgctggcaggccatgccgcccttctcggctgcaaagcccagggtctcccacagctcctccaccatgtggggggcaaagggggagagcatgagcagcagggcggcgtagtcgcccttggagcagccgttctggtagaagtcgttcaccagggccatcagggcggcgatggcggtgttgaacttcatggcctcgatgtcgtcggacaccttcttgatggtcttgtgcaccgcgctctcgttggccttggaacagccggcctcctccgtgaggttctccgccaggttccagacccggtcaaggaagcgcttgcagcccttgacggcgttgtcgctccaggcggcggccttttcaaagtcgccgatgaacatgatatacagccgcatggtgtccgcgccgtactgggccaccacgtcgttggggttgatgacgttgccgcggctcttggacatcttctcgccgccctcgcccaggatcatgccgtgggaggtacgctttttgtagggctccttggtgggcaccacgccgatgtcgtacaggaacttgtgccagaagcgggagtaaagcaggtgcagggtggtgtgctccatgccgccgttgtaccagtccacggggctccagtagtccagggcctctctggaggccagggctttctcgttgtgggggtccatatagcgcaggaagtaccaggaggagcccgcccactggggcatggtgtcggtctcccgcttggcggggccgccgcagcaggggcaggtggtgttcacccagtcggtcatcttgctcaggggggactcgccgtcgtcggtgggctcgtaggagtccacctcggggagcaacagggggagctgctcctcgggcaggggctgccagccgcacttctcgcagtacaccatggggatgggctcgccccagtaccgctggcgggagaagacccagtcgcgcagcttgtagttgaccttggccgcgccgatgcccttctcctccagccactggatcatggcggggatggcgtccttcacggtcttgccgttgaggaagtcggagttgaccaggataccggtgtcgtccttggcggtgaaggcggcctgctgcacgtcctcaccaccggagaccacctcgatgatctcgcagccgaacttcttggcgaactcccagtcccggtcgtcgtgggcgggtacggccatgatggcgccggtgccataggtggagagcacgtagtcggagatgaagatggggatctccctgccgttgactgggttgacgccccgcacgccgtccaggcgcacgccggtcttctccttgttcagctccgtgcgctccaggtcggacttggaggcggcggccttctggtaggcggtgacctcggcggcgttcttcagcgcgcccccctccagccacttgcgcaccagctcgtgctcgggggagagcaccatataggtggcgccaaagagggtgtccggccgggtggtgtagaccacgatggcgtcgccggtggtggcctggaaggtgacctccgcgccggtggagcggccgatccagttcttctgctgggtcttgacccgctcgatgaagtccagcccgtccagatcgtcgatgaggcgctgggcgtactcggtgatcttgagcatccactggctcttctccttgcggataacgggggagccgcagcgctcgcacacgccctccactacctcctcgttggccagcacgcacttgcaggaggtgcaccagttcaccggcatggtggtcttgtaggccaggccgtgcttatagagctggaggaagatccactgggtccacttgtagtagctgggatcggtggtgttgacctcccggctccagtcgaaggagtagcccagcatctgtagctgcctgcggaaattctcgatgttgtcgtgggtcaccttagccggatggatatggttcttgatggcgtagttctccgtgggcaggccgaaggcgtcataccccatggggaagagcacattgtagccgtccatgcggcgcttgcgggccaccacgtccatggcggtgtagggccgggcgtggcccacatgcaggccctgtccggagggataggggaactccaccagggcgtagaacttgggcttgtcgctgtgattcccggtctgatagactccggtttcctgccatttcttctgccacttcggctcaatggcggcaaaatcgtatttcaaatctctcacgctttctttcgatctgtctcgtccgcgacgggcatataatctgtgatattataatcgaaaagcggccggtttgcaaggggtgtgcttgacttttcccgcttatccagataagatggagccgacaaagaagggagcgtgtatggacatgggaagcaggcgcatgcagatcgtcggaatcgtcctggccgtgctgatggccgccctgctggcggtcaccctgtgggtgtaccgcccggtctcgctggcggaggcggcggacgcccgcaccggactggagcccaaggtggtggttgtggtgcgcctggatgagatggacgggaatggcacctcccatgaatatcaggcgtacgaccccgccctgctggagcagatggagctgctggtggataccgcccggctccgtctggtccggcggagctccatcgcccccctggacggcatgtgtaagatcgtcatcatcggggaggatgaaatcatctgctcctttgactacaaccttacaaccaacgccatctacatcggggaccggatttacgcgctccgctccacccagtcggagcccctctccgagctgactgccgccatctgcggggaggtgtaggacgtgggcgtgcaatggaagtatctctggccggtgctggtgctggccgccgcactgacgctcgggctgggggccgccctccggtttctccgcccagcctccctgggggagcggatcagcgtggcggagggcgcgtccctccggcaggtagtggtggaacacagcgacggcggcgggcatggctcccacgagagcagcgagcctgctctgctggcggagctttcctccctgctggcggacacccggctgcgctatgacgggctcaccgacggcggcgtacccgtctcccccgccgcctataccgtcacggtctattccgccccggcagaggaggggcgcaccttcggcgtggacagccaggggcgcgtctaccaggacaaccggcgctattccgcctccccggaacaggtggaagagctgacggccctcctgaagcgcatctgctcttaaaaccgtccagaggccgcctctttccgttctacagcagcacggccatctctctttacgaaatataaactacacacatttccatcgaagtaagcggcaaaaagcggcgtggggggaattcccccgcacgccgccggcctgtttccccgtgttcagttcagcgggatggttaccgcctcgtcctccagaacgcggatggtatcgtttggctgccagaaggacacacgggccacccgggccagctcctccggtgtagctcccggatagtgtgtggtcacggtccacacgcccgtctcccagtcgtagtcccgttcccggctgacctgccacgaatccgcttccacgctctctccgtcggcgtccagcaacgtgaaccaagtgccgtcaccgccgtactcgtactggagcagctcttccccggtctggaaccgggccaccgcctgctctgccccgatgtccagagagaccagagtgtagccggtttcggcggaggcgtcagtaaggggcagttcgtccacagcgccaaaaatctcgtgacttccacctggttcatcgccggggtagacccgctcatagggcaccagagtgatggactccatgtccggccgcccgccataaaaagcgataaagttcgagatcggcagccacccgcctgcccctccataacgctcggtatcgacatagagataatgccctgtatcatcgcggagcaagaaatctgtcaggggagggaatccgacctcagtgagcaccagcccgccgccggagggggctaccactactttgtccgcccgtacccggtggtccagcatcgtaaatgtctgacggggttctactaccaagctctccccgtccggggcggtcttatccaccagcagattcaggctccaatcaccggacaggccgtaaaacagctcattggtgtagacctggagctccaccacatcgggcagcgtgcgggccaccgggcaccgctgcatcacctttaatgtatagtcgtccacccactcggtttcccgatcccggccccagaactccagctcctttccctcggccttcagggaaaaggaccacagctccggctcaccccggtcatccctggggatcggttcttctccggtgacggtggcgtagagggtaataaacgcctcgtccacaccgatgccgtccagggtgagggtgtagccctggtcggtgaccgacgcccccacctcggcggaatagggctggaagccctccgccgtaccgccgaagccgccgggccgggcgatcagctccagcgcgccggaggccgccgccacgccgcccacgcacagggccgccgccagaaccccggctaccgcccaccggcggagacggcgggggccgggctttctccgtccctccggcagcccctccaaaatggcgtccatgcgcccgtcaaagccctgtggaattgggcagtcctcccgccgggcccgctcttttaaccgttcatccaaccggttcatattttctcctcctcctgtagttgctccttcagccgctggcgggcccggcccagccgggacttcaccgttccctgggccacccccagcacccgggcgatctccgccacgggcaaatcctcgtagtagtagagggtcacggcggcccgctgctcctccggcagatggagcaccgcatcccacaggccgccggggagcgcgtcttccgcgccgccggccagcggctccagctcgtcggtatagatcaccctgctgtccctccgccgctgctcataggcgcagttgaccgcaatcttcagcagccaggcgcggaccgctccccgggcccgcaggcggtcccaggactgccaggcccgcaggacagcctcgcccaccgcgtcctccgcgtcggcgtcgctgtccaggatgctccgggccgcccggaacatgccgtggctgtgctcggtcaccgccgcagcaaattcctcccgcgccgacgcccggcccgcgccgtctctggtctgttccatgtgctcacctcgtctttccttgtccggacaccctatagatgcatgggcgggcggtttggttccctctccgcgcaaaaaaagcccggcgggagtcccgccgggcttttttgcgttagttttcggtcagcacgccggacagatccaccggcgtggcgtcgctccacaggcgctccaggtcgtaaaactcccgggcctcctcgttgaagatgtgcaccacaacggaggagaaatccagcaggatccaggtgccgccccggtggccctccacatggtgggggggttccccggcgtccttgagggtcttctcacagacatcggccagggccttgatctgggtggtggaggtggcggtgcagagcacaaaatagtccgccagggtggtcaggtggccggtctccaggcacttgatgtcctggcccttcttgctgtccagcgccttcacggcggtcagggcaatctcgtttgcagtcatctcattctccttctattcaatgggctccatgccgggaccaaagccgtccacgggcacgtcgggcgccggggtggaggcggggatgggcgtgggagccggcgtgggtacgggggttgcggccggggtgggttccggcgcaggcgtgacagccggagtctctacggcggggggctggctgtccaccgggacggagggcgtggtctccggcgtcaccgttggcgtggcctccggtgtggccgtcggagtgaccgacggctccggggtgtcgggcacctccggcgcgggattgtcggtgggcttggagctgccggagttccccttcgcggggggcttggtggccttggtatcctccacatggccgcgggtggaggacaggctgccgtcctcgttgacctgcatcagatccagctcgttcagctcgatgtcctccaaataggggttgaagcaggtattcaccagctccagcatctcgtccggaatgggagtaacataggactggtagttgtggtacgtccggctgtagacgctggccccccggttgggcagggtcataaagtgcacgttctccatgctcaggccgcccacgatggcctccttggcaaaccaggccaggttgttcaccgtcaggctgccgttggtatccacgttgtccaggaagatctgggccattttggggatggtgccgaggctgatgctgttgaggcacttctcaatgaccgccttcaaaaaggcctgctgggtctcgatgcggcccagatcgccgttggggtagccgccgtatacgtttccataagcgtcggagttcttccgccagcgcagaagctgcatggccttgtcgccgtcgatgtcctggagcccggcgctcaggtggatgtgcaggttctgggtggggtcgtcgtagttcatgtcgatgggcacatcaaactctacgccgccgatggcatccaccagctcgcccaccgcctcccactccaccacgatggtgtagtccggctgaaacccgatgaggtaggagacctcctccttgagaaattggatgccgtccttatcgtagtagggcgcgtagttgtataccgagttgatgcgcttgatgtcccacggcacgttcaccatggtgtcccgggggatgctcatgacgtttagggtctggtttgggatgtcgtaggccatcaccataagggtatcggtattgccgccgccgcccgtgtcccggcccaccagcaggaaagtataaaactcctccttgcggtcgccggagaggcgggggccgtcgccaaactcatagttttggtcctcgtccggcagctccacacctggctccggcagcgagggcttgaccaccaggaggcggtaggcggcgaaaaccgtcaccagaaccgccgccagaatggccaaaaccaggcacgcaatgcgcagggccttctgcctcggtgtgaggggcgtgcggggctttccagcccgcgttccaccccggcttgtctttttgttctcaggattcatccgtttctatcttcctttattccaccggcaccatgccgggtccgtagccgccgtccggcgtggcggccgggggcggcgtcatggctggggtgttctccgccgggggcggggtcggctccgcggaggggacggcgggcgccggagtggccgccggggtctggaccggaggcggcgtctgcccgcccggagtggatatggctgggggctggcttccgcccggggtggacgtggccggcggcgtgcccggcgggctttcgaccggagcggaggttgcgctgggcgtggtttccggcttaggcgtagcctggggcctgggcgtcgtgcccgtgctgctggagccgggtcgctttccggccagattcagatcccgcaggctgatgtccgactgataggggttgaagccctcattgaccatctccacaatctggctgcccacgggcagcaggtgggcgtccccagcggactggttgggcagggtgacaaactccacgctgtccatgtccagcttgccgatggccgacttgccgaagtaggccagattgcccacgctaagatcggtggtcacattcttctggaagatgctgatatagtccatcaggttgctcagcagcacatcgggctggaggcacttgcggacgacctccttgaggaatgcctgctgggtctcgatgcggcccagatcgcccatggcgtagccgctgttgagaatgtgcccgctgtcatcgctgttgtgccgccagcggagcacacccatggcaccgttgccgtccagaagctgatagccaggttggaggtcaattttgaagtgctgggacagatcattgtaatacatgcgccgcggcacgtcaaaatatacgccgccgatggcatcgaccagctcacccactgcctcccactccaccaatacatagaagtcgggggtcacgccggtgagggagcccaccgcctttttcagggcctccacgccgccttcctcgccgccgccccggctgtaaaccgagttgatcatcacggtgcggccgttgtagatgacataggtgtcacggggaaggctcatgacgctgagcttctggttgggcacatcgtaggccgccaacagcatcgtatcggtgttgccgccgctgacgcccgccaccaggaaagtgtaaaactgctccttgcggccggcggacaggcctgggatctccacctctacctcctcaccctgctcgttgatgatggtggtgtgccggggggtgggagtggggagggccacctccggcggggcgctcatgaggccgaacacaatcgcccccgccacgatgatggccgccaccaccgtcagggcaatatacagccccagcagaatcttctgctttttggtgcgcggccggccgggctttttctcccgcttggtctctttttcccgccggggactctccggcttctgtacccgggcgccgccccggtggttctttctctgttccgggttcatcaatcactaattcctttcgtcttgctccgcagccaatcccgggcctttaccgtattggggtgcacgggcaggccccgctccgccatctcctgtatgctcatctcgcaccccaggagcaccgccgcgtccagatcctcataggccagcgcccgcaggcgctccacccccggaaagtcccgggtgggctccatgtagtcggcgacatagaggagcttctccagcagggtcatgccggcctttccggtggtgtgccagaaaatggcctcatagatgtcgtcgctcaccccgtacacgtgccgggccacacacgcgcccgtcttggagtggaggagcttgacggcctgctgctccaattcgtccagtacgataccatatttcgcgcataattgcaactgctcgtccaattccaaatacttggtgcagtcgtggaggatcgccgcccggcgggcgtgctcctcgtcggcgccccagcgccgggccagccgcaccgcctcctcctccgtgcccttcacgtgggcgatgcgcttggcgcggatcatggagtaggagcaggcccgcagctcccggtcgggcaggcgcttcagatcccgccccgccccgtagagcccgtggcgcaggatgtacccgtacaccgccgggggcagatactcccaaccctcaccgcgggccagcagctcccgcagccgggtggaggacacgtccaccacctggggcagttggaggacgcacaccttcgccccgaaggtcttccgcaggtactcggcctggatggtgagcagctccccgcagtcggcctgggtgcgggcaaaggcgcagatgcccgccagggcggtgatccgctccggctcccgccagttctggagggtgaggaacatgtccgtccccatcatcagccacagctccgcgccggggttctgggcgtgaagctgctccagggtgtcggcggtatagctcttgccgggccgggagagctccatatcgctgacgctcacccggccgggcaggagcaggccgtcggcggccagctccaccatctccagccgggcctccggcccgggggcgtcggggggcaggcgcttgtggggcggcagcgccgccggtacaaactgcagctcgtccagccccagcgcgtccagggccagccgggcggaggtcaggtgccccaggtggggcgggttgaaggtgccgccgtagatgccgagcttcataggcttcccctcctctgcgttacttgcgcttcttgtccgtcaccagtacgatcttgtcctttttgtccttcttatgggttggacgatacaaaacgaatttggttccaatgacctgtaccacctggctccgggtggcctccgccagggcctcggccgcctcccggctgctcagcaggctgttctccagaaccttgcccttgatgagctcccgggcctccagggcgtcgtcggcctgcttcaccaggttgtccccgatgccgtccttgcccacgtgcaggatggtgtcaatgctgttggccagacccctgagctgggcccgctgcttgcttgtcagttcttccatagaccggtctccttttgatctgccctcctgcgggaaggcattttacttgttcagatactgctccagcttctcccgaaaggccgtgagcgcattcccccggtgggagatggcgttcttctccgccggagagagctccgcaaaggtctttttcagggcggggacaaagaaaatgggatcatagccgaagccgtcctcccccttgggggcgtaggccaaggtgccgggacactccccccgggcctccacccggtccccgttgggaaagcagcagcagatggcggagacaaagcggcaccgccggtccagctgcccccgcatgttctccagcaaaagccggtagcggcccacgtcgtccagccccggcccgccgtagcgggcggagtacacgccgggcgcgccgttcagcgcgtccacgcacaggccggagtcgtccgcgatggcgggcaggccggaggcctccatcaccgcgcgggccttcaaaaaggcgttttcctcaaaggtggcgccggtctcctccacgtccacatcgacgcccacctcggactccagcaccacctccacccccaactgggaaaggatgtccctcatctccaccagcttatgggcattcttgctggccaataccagtttcatacatttagccccccaacacttgtctctgaatgttctggagctcccggatgcccttggcgcacagctccaccagggcccgctgctccacgatggtgaagggccggccctcgccggtgccctggagctccaccagctcccccgcgccggtcatgacgcagttgagatccacctgggcgtgggagtcctcctcatagcacaggtccagcatgggctcgtcccccacgatgccggcggacaccgccgccacacagttggtcagcggcatctctggcaggacaccgtccatcaccagcttgtgcagggccagactcaacgccacaaacccgccggtgacggaggcggtgcgggtgccgccgtccccctggagtacgtcgcagtcgatcgtaatagtgcgctctcccagctttttcatgtccacgcaggcccgcagggcgcggccgatgagccgctggatctccgcggagcggggggacagcttcagcttggcgatatcccgccgggagcgctcccggttggcccggggcagcatggaatactcggcggtgacccagccctccccctcggggacgtggcggggcgcgccctcctccacgctggcgcagcagagcacatgggtgctgccgcagcggatcaggcaggagccctccgcaaattgattgatgttggggatgatctccacgggccggagctgatccgccgcccgtccgtcgattctcgccatgttacggcctccaatctccaatatgcgggccgatgagggcaccggcccatactgctttttaaacaagggcttcgacaaatttctccgcctcaaaaggcatcaggtcgtcgatgccctcccccacgccgatgaatttcaccggcacctggagctcctgggcgatggcaatgacaatgccgcccttggccgagccgtccagcttggtcaggacgatgccggtgatgcccgcggcctccttgaactgcttggcctggatcaggccgttctgtccggtggtggcgtccagcaccagcagggtctcccggtcgcagccgggcagctcccggtccacgacgcggctgatcttattcagctcgttcatcaggttctgcttgttgtgcagccgcccggcggtgtcgatgagcaccacgtctgcgctgcgggccttggcggcggacagggcgtcaaagaccaccgccgcgggatcggccccctcgtactggcggacgagctccacgccgctgcgctcgctccagatctcgagctggtcggcggcggcggcccggaaggtatcggcggcggccatcagcacccggcggccctcccccttcatccgggcggccagcttgccgatggtggtggtcttgcccacgccgttgacgccgataaacagggccaccgacggggcggtgtccagcctcagctccggctcccccacctgaagcatgtcggtgagcacccggcgcagacacgcccgcgccccctccatgtccttgatcttctccgccttcacccggcggcgcagctcctccacggctttcatggtggtctccacccccatgtcgcccagaatcagcgtctcctccagctcgtcgtaaaagtcgtcgttcagctctccggcgaagagctggtcgaaggagtgtccgatgttctccttggtgcgggtcagccccgccttgatcttttcaaaaaagcccatgtggtgtcggttcctttcgtcgttcagacatggtattcatcctccgcccagcgggcggggttatgctcgatatagctccagtggttgagaaggtcgttctcatcccggatgatgtggtcgtgataggatgcctgccagagcggacggccgcacacgcggttggtgtagcgcttgagagaggagacaaaacccggcacgcgcatcccagtagggcgcggcatccctgacgcgccgtttccctccccgcagacgcacagcaaaatgtgaacatgatttggcatgatgaccgacgccgcaatctgaatttgggcgtcatgtccggccagatagtccatcgcgtcctgaacgcaccggccggtctccgacaactgtatcagcggcgcgtcagggatgccgcgccctacaatctcgctcaggatggggagccggttctgggtgcagagggtaagaaaatatactccgctccggctgtaatcatacccgcgcaggcgcggatgcacccactttggaagctctgtcatttgatgtgcaattccttctccacatcgttcaggttgatc
